United States Patent Application Publication US 2020/0377945 A1 - sequence listing, part 16

SEQ ID NO: 3185 - DNA, 150674 bp, Unknown
  gut microbiota DNA sequence
aaatcgtaatccacgaatcggaagcccttgacgggaaacgccgggggaagctccgcagacaggaaatcgaaatctattattcttttgtcggcaaggtagaattgcccgactaaagcccgacccgtccggcagtcagccggacagggaacggcaaaattttttacacttcttttacttctttatctcacatgagcaaaaagtcaaggcatgaaacagttaatggcggggggcggggttgcccttatcggcatggtgcttgtaccacttctttccggcttgttcggttaagcgcgggtaacagcctatgcagagcatacttgacgcgattaacgaatggataaaggaaatccttatcggagcgataaacggtaatctgtcaactatgttcggggacgtaaacgaaaaagtcggcacaatcgcaggacaggtagggcagaccccgcaggggtggaacggcaatatcttttccatgatacagaccctttccgaaaatgtgattgtccccattgcggggcttgtcattacctacgtcctatgcgtggagctaatcagcatggtaacggaaaagaacaatatgcacgacgttgacacgttcatgttctttaagtggtttttcaaggcgtgggtggcggtattcctcgtcacccacacctttgatataacaatggcggtgttcgatatggcgcagcacgtcgtatcgggcgcggcgggggtaatcggcggcgacacgaatatagatgtcgccgccgcccttgaagccatgcaggaggggcttgacgcaatggaaatccccgaacttttgctgctcgtcatggaaacaagccttgtcagcctttgcatgaaaatcatgtcggtgctgataacggttatcctgtacggcagaatgatagaaatatacctgtactgttccgtttcccctatcccgtttgcgacttttgccaaccgggaatgggggcagattggaaacaactacctcaaaggcttaatagcactcggctttcagggcttcctcattatgatatgcgtcggcatttacgcggtactggtgaatgacatgataatagcggacaatctgcacagcgcgattttttcccttgcagcctataccgttatcctctgcttttccctgttcaagtccggcgcgcttgcaaagtcgatattttccgcgcattagccccgtgtcaagggtagggtggagattttgcagggcaaaatacgacccgaccttgacgcgcccaacacccaaacaccctatggacagggcagacggcacacttgaccgttgcccttgattaccctatggggaactatcaacagccaacagcgaaaggaggtattcaatggcgtatgtacctgtaccaaaagacttgtcacgcataaaaacaaaagtcgccctcaatctgacgaagcggcaaatcatatgttttgcggtagccctcattatcggactgccgcttttctttttactcaaagacagcgcagggacgagctttgcagcgttcgtgatgatacttgtcatgttgccctgttttctcattgccatgtacgagaaacacggacagccccttgaagtggtggtaaaaaacatcattcagacaaagtttgtccgaccaaaggcacgcccctaccagacagaaaacctatacgccgttatcgaacggcagcgaaaacttgaaaaggaggtatcagcgattgtcaaaagcacagcacacaaagaagcaaggcgcagcgcaggaagcaagccccgcaagggctaaacgcaaactgacccgcgccgaaaagaaacaaatcgctgcccttatccaaaaggcaaagggcgacggcaaggcgcacacggcgcagcagactatcccctacttgcagatgtacccggacggtatctgccgggtatcagcaaagaaatacagtaaaagcatggagtacgacgacattaactatcagcttgcacaggcagacgacaagaccgccatttttgaaaactggtgcgacttcttaaactactttgacgcttccgtgtcggtgcagctctctttcatcaatcaggggacacagcaggaaaaagcgcaaaaggcgattgacattgctccgcaggacgacgctttcaactctatccgcaccgaatacgcggatatgctgaaaaatcagcttgcaaagggcaacaacgggcttgaaaagcacaagtacatcacattcagtatcgaagccgacaatctgaacgcggcaaaggcgcggcttgcccgcattgaaaccgacatactgaacaatttcaaggtgcttggcgtgtctgcccgccccatgacgggctatgaccgcttgcagaccctacacggcgtattccacccggagggcgaaccgttcacgtttgactgggcttggcttgccccgtccgggcttaccacaaaggactttatcgccccgtcctctttccgctttggcgaagggcgcacgttccgcatggggcgcaaaatcggcgcggtatcgttcttacagatacttgcgccggaactgaacgaccgtatgcttgcggacattctcgaccttgaaacgggcgttatcgtcaatctgcatatcaagagtatcgaccagaccgaagcaatcaagaccatcaagcggaagataacggacttagacaaaatgaaaatcgaggaacagaaaaaagctgtccgcagcgggtacgacatggatattatcccctctgaccttgccacgttcggcgcggaagcaaaaaatcttttgcaggacttacagagccgcaatgaaagaatgttcctcttgacgttccttgtggtgaacatggcagacacgaagcagaaacttgaaaatgacgtgttcgcggcggcgggtatcgcgcagaaatataattgtgcgctgacccgccttgactatcagcaggaagcggggcttatgtcaagcgtccccattggcgagaaccttatccccattcaaaggggcttgacgacaagcagcaccgccattttcattccattcatcacacaagaattgttccaaacgggtgaagccctctactatgggctgaacgctctttcaaacaacatgattttatgcgaccgcaagaaactgaaaaacccgaacgggcttatcttgggaacgccgggaagcggtaaatcctttgcggcaaaacgggaaatgacaaatgcgttcctcattaccgacgacgacattatcatttgcgacccggaagccgagtattacccacttgtgcagcggcttcacggacaggttatccgcatttcgcccacaagcacccagtatgtaaacccaatggatattaaccttaactattccgaggacgacaacccccttgcgctgaaaagcgattttatcctctctctttgcgagcttgtcattggcggcaaggagggcttgcagcccgtggaaaagaccgtcattgaccgcgccgtgaggaacgtgtaccgcctatttttagcagaccccgacccggcgaaaatgccgatattgggcgacctgtatgacgagctgttgaagcagccggagccggaagcggcgcggattgcggcggcgttggaactttacgtttccgggagccttaacgtattcaaccacagaaccaatgtggagcttgaaaaccgccttgtctgctttgacattaagcagcttggaaagcagttaaagaaacttggtatgctcattgtgcaagaccagacttggaaccgggtaacagtcaaccgcgccgaaaaaaaggcaacccgctactacatggacgaatttcatctgctcttgaaagaagaacagaccgccgcttacagcgtggaaatctggaagcgttttcgtaaatggggcggtattccgacagcaatcacgcagaacgtcaaagacttattgagcagccgcgaagtggaaaatatctttgaaaacagcgactttgtgctaatgctcaatcaagcggcgggcgaccgggctatccttgcgaagcagctttccatttcgccgcagcagatgaagtatgtcacccacaccgaagcgggcgagggcttgattttctttggtaacgtggtgctgccctttgtagaccgcttccccaccaacacggagctttaccgggtaatgacgacgaagccggaggaaaccgaaacccaaccatgaaagcgaggataattcatgaatgaaaccttacaagtccccatagggaaacaggaacacttgaaagaatttttcaagctactgaatgagaacgggcaaaagcaggaagccgccgagttttcagcccttgtcaaccaattaagcaacatggaacagcagtattccgctgtcctgtccgagctgcaagctgtccgagggcagcttgaccgcatacaggataagggtatcaagtccgcgcttctgaaaggcatatcagccgtacaggagacagtgacacaggcaaaagaacagctcacccacatcaaggctgacttttcccaatcggtgaaaaaagccttatccaatgtgaagcagcagggcatttctgccctgcataaagcggttgacttcatgggaataaagaccgcccttgccgatatgcgggaaaacctgcaatcttccatttcgcagacacagaaaagcattgaccgtatcaacgccataggcagcgagcttcacgcgctgaacgaacacagccggaatttagggcgtgcgctgacaggcagggaaacaaaggagctgaccgcccgcaatgaggataaaggcgttcttgcggcggttgcaaagcccttgaagaaatcaaaatccatgttggagagcatggaaaaaggtgtgacccgcgctatacagagcgttgaccgattggaacaggcagcagccaaaggcagggagcaaaagccctctatccgcgaggggttgaaagccgcaaagggacaggaacgcccccaaaaaacgccgtccccgcagaaaaagcgggaagcgagcctatgacgggaggtgacagccattgaaagaccctatgaagccccgtgacaaaatcacgcagaaaatgacccgtgacggcttggtggaagtcaacgaagcgcagcagaccgccgagcgtatcagcaaacggaaacaggacgcggattttcagaaaaccccggagcagcaagcggcacaggacgcggcggcgcagcttaaccccttatcgtccggcacgccgccgccccatgcgccggggcttgccatgaagccggacacgggaaccgccgaacaggtttttgaacatatcgacgggcggcacacccgcaaggcggcaaaaaaagcagcgcggaaagcacagcaggaagccaccgcacgaacgaagtcgtcccggctgcaattcaccgacgaggaacgcgccaacccggagcttgaaacgtatatccagaaatccgacaaagccgccgaccgtctggacgcagcaaaggcggctatccccaaaaagaaaacccttgccgcagaacgcacctttgacgaagccacaggcaggggcaagacccggctacactttgaggaaaaggaaaagcccattcccggaaaacccgccaaaaacccgctgtcccgccccgcgcaggaagcgggcattttcgtacacaacaaaatccacagcgtcgaaaaagacaattccggcgtggagggggcgcacaaatccgaggaagccgccgagcgtttgggaaagtacggagtacggaaagtcaaacagggctaccgcagccacaagctgaaaccctaccgggcggcggcgaaagcggaaaaagcggcggcaaaggcaaacgtcaatttccagtaccacaagacacttgccaataacccgcagcttgcaagcaaccccgtttcccgactatggcagaagcagcaaatcaagcggcagtatgcaaaagcggcaagggcgggcggcgcaaagggcatacgcggcgcagccgataacgtccgcagggcggcaaagaaaaccgctgaaaagacaaggcagacggcggcgttcgttgcccgccacccggcaggggtaatcattgccattgccgcgctgctgctgttcatcatggtatttgcgggcttgtcctcttgttcctctatgttttccggcacgttaaacggcgtgttgggaacgtcctacacgtcagaggacagcgaccttgtagccgtggaaaacgcctatatttccaaagaaaacgagctgaaaagccggatagacaatatcgagcgcgactatcccggctatgacgaataccgttatgaccttgcacaaatcgggcataacccacatgaattagcgtcctacctcaccgcccttttgcagagctacacgccggatagcgcacaggcagaattacagcgtgtctttgataagcagtataccttgacgctgaccgaagaagtgcagatacgcacatataccgacgaggacggggacgaacacgaatatgagtattacattctccatatcaagctgacaaacaagcccatatcgtcccttgcgccggagctgcttaccccggaacagcttgaaatgttccgggtatatctggaaacaagcggcaacaagccgctgatattcggcggcggttctccagatggaaccccgtcggaggatttaagcggcgtggactttgtaaacggcacacgtcccggaaataccgccgttgtagacatagcgaaagcgcaagtcggcaacgtgggcggctatccctattggagctggtacggcttcaacagccgtgtggaatggtgcgcctgttttgtgtcatggtgctataaccagatggggaaaagtgaaccccgctttgccgcctgccagtcgcagggtattccgtggtttacctcacgcgggcaatggggcgaccggggatatgagaacatagcccccggcgacgcaatcttttttgattgggatttagacggcagcgcagaccatgtagggattgtcataggcacagacggaagccgtgtctacaccgtcgagggcaattccggcgacgcctgcaaggtaaagagctattcccttgactatgcctgtatcaagggctacgggctgatgaactggaactgacaggctttgaaaatgaaaggagtatcacactatggcagcaaacaaaattgaccgtatcgaccgggaaatccaaaagacccgcgagaaaatcaccgaataccagaacaggctgaaagggcttgaagcgcagaaaaccgaagcggaaaacctgcaaatcgttcagcttgtgcgttccatgcgtctgtccccgcaggagcttaccgccatgcttgggaaagagcctatccccggcattgctaccttacccgccaatcacaacggacaggaggaaaccgaagatgaagaataagaagatttttagaacgctcaccgtactttgtgccgcccttatcctcatgggcggcttttccgtcaccgcctacgcgcagaccccggaggacaccccgccggacaccgccgccgagccggacacgccgcccttaacgccagagggcaacgcgacccttgttgacgattacggcggcaacaaacagcttatcaccgtcaccaccaaaagcggcaactacttttatatcttggtagaccgcgccgccgagggggaaaacaccgtccatttccttaatcaagtagatgaagccgatttaatggcactcatggaggacggggacggcaagaccgaaacgccgcccgctgtctgcaactgtactgaaaaatgcgaaaccgggaaagtcaacctttcctgccctctctgcaaaaccgatacaagcggctgcacaggcaaggaagccgcccccgccgagccggagccggaggaagaacagccggaaaagaaaagcaacccggcgggtatgctgcttgtggtgcttctcgttgccggacttggcggcggggcgttctattatttcaaagtcctaaagccgaagcagagcgtcaagggcggcactgaccttgaagatttcgactttgacgaatacggcgaggacgagcagcccgaaaccgacagcgacggaagccccggcgaacaggaggacgaaacggaggacacgctatgacatggttcaccgacagcgtttttgaaaaaatgatgactcaaagaccaaacgggcggcgtgacagtgcgccgcccgttccccattccccggcttgcaagggctgtccctacaaggggcaagccccttgtgtgggctactgtatcaagcagctaaaggaaacccaaaaatccgagccagaacggtaaaaggaggacaattctatgcagttagtaatcgcagaaaaaccgagcgtcgcccagagtatcgccgccgtgttgggcgcaaaggaaaagaaagacggctttatcgagggcggcggctaccttgtgtcatggtgtgtcgggcatttgatagggcttgcacaggctgacgcttacggggagcagtacaaaaaatggagctacgaagccttacctatcctgccccatgactggcagtacaccgttgccgccgacaagggaaagcaattcaaaatcctaaaagacctcatgcaccgcgccgacgtttccgaagtcgtcaacgcttgcgacgcggggcgcgagggagaactaattttccgctttgtctatgaagtggcgaagtgcaacaagcccatgcgccgcctttggatttcctcaatggaggacgacgcaatcagacagggctttgcttccctcaaagacgggaacgaatatgacgcgctctttgcgtccgcgctatgcagggcaaaggctgactggataatcggtatcaacgcgacccgccttttctcttgtctttatggcaagaccttgaatgttgggcgggtgcagacccccacgctgaaaatgcttgcagaccgggacgcggcaatcacttcattccagaaagaaaaatactatcatgtgtgccttgaccttgacgacgcggaagcggcaagcgggaagctcaccgcccccgaagaagcggaaacgcttaaaacagcttgtgaaacctcacaggcggtatgcgtttccgtcgcaaaagagagaaagaccgttgccccgccgaagctctttgaccttaccagtttgcagcgggaagcaaataaaatctacggctacaccgcgaagcagacccttgaccttgcacaagccctctatgaaaaacggctgctgacctatccacggacagacagccaattcctcaccgacgacatgggcgacacggcaatgaataccgccgccctgctttgcggcaagttgccgtttatggcgggcgcggacttcaccccggagattgcccgcacccttgacagcaaaaaggtatcagaccaccacgcaatcatacccaccgccgagcttgcaaagaccgacctttccgcgctgccggaaagtgaaaggaatatcctcacccttgccggggcgcgtctgctctttgccaccgccgagccgcacacctttgaagcggtcacggcggttttctcatgcgccgataccgagtttaccgcaaggggaaagacggtactatacgccgggtggaaagaccttgaacgacgctaccgggcgacgctgaaagcaaagcccgacccggaggacggggacggagaaaacaccctgccgccctttgccgaggggcagacctttgaacgccccgccgcaagggtgacggagcatgacacgacaccgccgaagccccacaccgaagcaagtttactgtctgctatggaacgcgccgggagcgcggaaaccgacccggacgcggaacgccgggggcttggcactcccgccacccgcgccgccgtcattgaaaagttagtgtctgccggatttgccgagcgcaggggcaagcagctacttcccaccaaagacgggaacaatcttgtttgtgtgctgcccgatacgctcacttccccgcagcttaccgcagaatgggaaaacgccctgacgcagatagcaaagggagccgccgacccggagggcttcatgcaggggattgaagaaatgacgcgggtacttgtggaaacctactctgccgttctggacgacaagaaagacctgttccgggaggaaaagcccgtacttggcaagtgtccccgttgcggcggcgacgtgtacgagggcaagaaaaactactattgcgggaaccgggattgcacttttgtcatgtggaagaacgaccgatttttcgaggaacggaaaaccgcctttaccccgaagattgccgccgccctgctgaaaagcggcaaggcgaacgtgaagaagctctattccccgaaaacgggcaaaacctacaacgggacagtgcttttagccgacacaggcgggaagtacgtcaactatcgcattgagctaccgaagaagaaataagttacgcagcaagcataggaaaggggtaccctttccgtaaaatccccgttttctctgaccgagaatgacggggatttttgcttgttgggaagtgtcccaaaccctctatgaaaccgaaccaaactgatttgagaaaggacgtgatgaaacctatgtcatattccagatacgaccgcgacaaactggaagccgccgataccatgaggatagaacgcacgatatactttaacagcgaaaatgcggatatttcctctttaactgccttgaccgtggaacagttacaggcattgcgcgaggaaagcgcggcggctgaacagacgatttttgaaactctgcaagcgcaagccgccgcatgggaggaacaggcgggcaagaccctgtttcttgacaaggcgattgaatacgcgaggacacccgccgccgcgcatacggcgaaccagtgggagcagccggacgaataccgccatgtacggagcaacatggtttacaaaatggattaccgcatttccgaaaacacccggtacgacaaggcggcggggcaatccattccctattcttacaccctgtcttggagcgtctacaccaacagcccggacggatataatcaagcgaaaatcgcgggacaggataggaaagtctttgcggacaaggcggctatggaaaagtatctgaacgggcgcattaaggcgtacagccatttatttacggagctgtccccgcctattccgccggagtacgcgcagcatttccgggtgaacggggtacttctccccggctacaccgtggagggcgaggaaccagagcagccggagcaggacaccagacaggcagacacagccccggcagaacaggcggcagagccggacaatcagccgcagccggacaccgggcagagaaaggagcatgaggaaatgaacaagccctttgaaatactgattgacagccgtacccgctttgaaacaggcgaaccgggcggcgtgtggcttcccatgcccgccacagcggagcagcttcacgacgctatgaaaagcgtcagtatttccgcagacaacccgcaggattttttcatacacggcttttcctgcccggaggacaaacaccttgctttgccctatgacatggtatgcagcgcgggcattgacgagctgaacttccttgcggcgcgtatcggggagcttgaccccgccgagctgacgaagctcaacgccttgtcacaagccccgcatggcttggaaactatcgggcagatgattgacttcacctataacgtggatttctatgttcatatcgaagcccgcacattcagcgaattaggggactactacctgaacaagtcgggcatggtgcaaatgccggaggaatggaaagcagggattgaccccggcgagtttggtaaaaacgccgcccaaaaggaacagggcgagtttaccgagtatggttatattgtggcaagcggcgaccagtgggaaccccactttgaggggcgggacgtgccggaggaataccgcattatgagctacccgcagcccccacagcgacccgacccggaaaagacagaccgggaagccacccccacaggacagaccgcagagccgccggagccgaagcctgtcaccccgattatgctaaacgcggagaaacccgccgaaaagctcaaagagattaccgaccgcttggagcagggcatttcagaactctttgaaagcgaccgttataaagagtatctaagcgtcatgtcgaagtttcataattacagcttcaacaacaccatacttatcgccatgcagaagccggacgcttcccttatcgcgggctttaacgcttggaaaaatcaattcgggcgaaacgtcaaaagaggtgaaaagggtatccgtatcattgccccgtcgccgttcaaggtgaaaaaggaaatggagaaaatcgacccccaaacgcaacgccccgttatcggcagggacgggaagcccgtcaccgaggaaagagaagtcactatccccgcctttaaggtggtatctgtctttgacgtgtcgcagaccgagggcagggagcttcccaaccttgccgtagacgcgctgacgggcgacgtggataagtataaggactttttcgccgcccttgaaaagacttcccccgttcccgttggctttgagaaaatcgagggcagcgcacatggatattatcatttggaggaagaacgcattgcgctgaacgagggcgaaagccagttgcagagccttaaaacattgatacatgaaatcgcccatgcgaagctgcacagcattgacttgaatatccctcttgacgagcagccgaaccgccccgaccgccgcacccgtgaagtcgaagcggaaagtatcgcctataccgtctgccaacactacgggctggacacgtcggactattcctttgggtacgtcgccgggtggagcagcggcaaggagcttacggaactgaaaaactcccttgaaacaatccgcagcaccgccgccgagattatcaacagcgtggacgggcattttgccgagcttcaaaagacgcagggcaaggagcagaccgccggacaggaaaaagccccggagcagaaaccgaccgccaacccggaatacatctacaaagtacacgccaacccccgcagcgacagccgggaaaatctctattttctgcaagcctatatcccgcaggaggacgggaaagcaaagataggcgacgttctgtatatcggaacgccggagaaatgccgggagcttatggggcaactgaacgccggggagctgacacaggggcaagtcaaggaactgtatgtaaaagcgcaggaacagccgaaagccccggaacagaccaccgagccggagccgccgacacaggaagccgagcaggacaaggacacctttaccatttatcagctaaagggcggcgacgaaacgcgggacttccgctttgagccttacgaccgcttacaggcggcggggcttgccgttgacccggcgaactacgccaacatttacaccgcgcccattgaaagcggcatgagcttggagggcatttttgagcgtttcaatatcgaccacccgaaagactttaagggacacagcctttccgtttctgacgtggtggtgcttcatcagaacgggcaggacaccgcccactatgtagacagttttggttttcagcaagtgccggagtttttacgggagcagcagaaagaacttgttcccgacaactatctgaccggggaaaaaatcacaacgccgaggggcagcttccacttaacttccatgagcagtgaacaaatggaagccgccggatatggctttcatcaccagtcggaggacgggaagcattatatcatggggaacggcacacaggcgtttgcagtcgccgcagagcagccggaaaactacttaaaaaccgccgagcagaccaccgaacaaagttatgacatgattgacgggcagataaacaacacgcccaccgtggacgaactggaagcaaaggtaaaagccggggagcagatttccttgaccgaccttgccgccgctatcaagacagaccgggagaaaggaaaggaagtggagccgggaaaaaagccctctatccgggcgcagctcaaagccgataaggaacgggcaaagaagaaacccacaaagagcaagtcacaggacttggaaaggagctgaccgcatgaacaagtttgaaaacgtggatatactcgcttcccttgacgctatcatgcggcagaacaccgcattttaccagagcgattttgagattgacaaagagattatccaaagggcggcggcaagccccgccgccgaggacaagcggattttgtggctgtcccgcccgtccgggacgtactgcttccgggaacgggacgtattcttgaaagacacaaggcagcacaacacatggaggttttacggggagcagacccgcgaccatatccttgcctatgccgtcaccatcacaggcacagagggcgggaaaattaagggcaacctttacgaactggactacccgcagcattttaagcacgtcgcagaacaggcattgcccgccgataccgtcaccctgcattatgagcatgggaaccggacacagcccacgacacagcgttttgacggctaccccgacccgcagcttggggaatttatacgcggcgaaacgcagcctaatgacccggacgctttgcgcttcctgcttcagcaggagcagcacgaacgggaacggctgaaaccgggcgacttcaaggagcataccgccgccctgcatgacagccggataaggcgggaagccgagcgcgttttatcgaagctgaaagaccttaaagagccgaacagcccggacaaggcacatttcatggtggagctgtcgccgcattttacagcgattgcgacaagcaaagacactgaccgcctgttatccatgctgccgtttaagaagctgtccctttccaacttgaaagagcgtcacggcatttatgcctttctcccaaaggacgaaaaccgggacaagagcttacacaagccccgccagtcaatccgggcgcagcttgccgcagacaaggaaaaagccgccccgaaaaaggcgacggcaaaatcaaaacatcacgatatggaggtatgagcatgaacagatttaccgttgaggaaatgaaccttttacacatctaccatgacagtagcagacaggagcttatcggaaacatcaacgccgcgctgccgttcatggagccggatatgcgggagcttgccgcccgcacccttgccaaaatcgacgcgctgaccgaagcggagtatgcggagcttgccgtttacgccgctgacgaggtatgaccgggataaggcggcttgcgccgccccagagccgcagggtgaacgcccttgtacgccgggagtgctgtaactacgattgcggcaactgtattcttctggacaacggcgacgagtgcgcctgtccgcagaccatttccttttccctgctttgcaagtggttccgcattgccgtactgccagcagacaaggaactgtatgcggagctttacgccccggaggacaggcggcgttgtgaagtgtgcggcgcgtcctttgcttcaagctcaaacagcgtcaaatactgcccggactgccggaagcgaatacagcgcagacaagccgcagaacgcaagcggaaacagcggctattgtcacgcaataggggcgaaaaagcccttgtataatggggctttccgagtgtgaaaattaagcggtaagggattgatacctttcccctcaaaatcagcgttctatcgcgtgacaggacgcaggaaacagcacccacaaaaagactgggcgcggtagtcagtgattggctaccgcgcccggttctttttattcgtccaacaaatcgcaatagcttacattcagcacctttgcgattgtttttagctcaatgtcggttacaaaccttttaccgctttcaattctctgaatggcatttttatctacatcaagccctgcaatttgcagcatatccgaaaattctttttgtgacggcttggtggacaaactttccctaaactgttttatttttcgtccgcatatattgtttgaaccgtcgcccgctttgtttttatacatatcggctctcctaatttgacatttactgattgtcatataggaaagtatatgttaaaatcgttcctgtattgacattcactaaatgtcaataaataatttcatgataggtggactacaaatgaagaaaaacatcaacgccgaacgtgcaatacaggaacttgcaatacaggaggggaaaaccgtggaatacatacgttcacagataaaacttgccatgctttccgggttatgcaatcccgacccgcaagtacaggaaaactggaaaagaataccctgcaaaggggaagtcccgaccccagaagaaatgataacttttttagctgtccatgtgaaagccgggacagacccctttgtttgacattacaaatgcggtgtttccttatctcgttccggctctctgtcctgccgtaaaatgctgtcaatgttcctcttgataacgtcgtattctccaacttgttttttcagcttgccgtaatcagcgtacagggcttcccgctgttcttggagctttgcatattcggcttgcagagcggcgacgcttgggaacttgccagatatgcccgccgctttcaacgcctttgctgctgcttcatgaagaatgatactgccctcatgggcggcgcggtactgtccttggttctttgccttacggtatgcgtcataaacgggctttgtcttttggtatgtcgtgatgttcttaatcagcaacgccatatcagcaagccgcttttccatgctctttagcgcgtcggcggtctgttcgcttgccgacgtgacttcctcaatccggctgactaaatccgcatactgttctatcttgttttccgtaaggaagttgagcgtctttgctgcctgtttcagattatggattttcgcccattgctcataaccccggctctcttgcgccttgatactgttttcaatatcaatcagcagggacacgccctttttctctgtccgtggagctttggcggcgcgtatacgcttgccgcttatccgttcggctatggcttcctctgtatagtccgcaccgagggttttcaagcgggtaaaccgttcctgtccgggagcgcggcaggatatgtatttcccccgtttgatttcatagcccgccgcttccaaccgccgcaataattcctcaaagtctgccacttggggaatgagcgcgtcaacggctgtctttagcttacctttccaactcgtccccgttttctctgcctgatactctgcatagctttttcccttgctgcctttgcccggaacaacgacggacaagccatgttcccggcacagcttgtcgcttatgtttcgtataccgtaatacgtccgtttgttggaattgtacttgtggtggtctacaaaattgacagcgcagaaaatgatgtggttatggatatgacctttatcaatgtgtgtcgtcaaaacgtattcatactgcccttttgttacagcgtcggcaagctgccgcccgattgcatgggcttgttccggcgttgtttcccccggctcaaaggactgtatgaggtggtgggctaaattgctgcccttatccaatgcttgcgaaagggtatattcaaactcaatgtctgccgtttcataggagcagccgaacgaggacacaagcattttgccgtctgtcttatccgggttttggatatagtcaagggctttgctcaacgtgcttttgataggtttaatctttgtaaccgccatatttccgcaagcacccccttgatttcctctatgtcctcttgatacacgctgcccgttgcgtttgcccgccgcgctatctggttgacgttgcccccgattttttgtatctctgccgtcattgccttaatgtcgctatggtctacttgaataatatacccgtcgattgcaattttccgcagatatgccgccatgtttcgggtgggtatctgcttcattttttcaagtattaaatcccgttccgcttccgtgacccggaatttgatttgtactgtccgtttcctgccgcccatgcgctcacgctcctttcttttttagagggtttgggacacttcccaacaagcatttttgccgacaagccgcagggcgcgggcgggcaaaaatacggaaagggtacccctttcctatgcttgctattcttctttccgtgtacttccacgtcaaagacggggaaatgccaatcaatccccggaaaaagaaagaacgccgcagcttgcgacgtttccaatagcggcacacatgaaaagaacgggggattttattcccccgtcacttcgttgtttgcttcctgtattccctttgcagttgccgtcataatcgttaaatcccggctgtccatatcggcaagcaaactatcaagctgccgccgttgcgtggatttgtccgtttcttcgttcgggaaaaagaactggtctactgacacatctaaaaaggtgacaagctcataaaagatttgtaggcttgggtgctgtccgctgttctcaatggacgcgatatagcgcggcgcaatgttcagcctgtccgctaactggttgcgtgatatgccctttgcctttcttgcttcttttattgcttgtccgaaagccttaaaatcatacttcactttatcctgcttcatatttttcaccctattacattttaccgttcacctttatgctttggatatgattacacgcttcatagtattgacaataatagagcatatatttttttgaatttcatattgacattcttcgatatgaggcatataatataaaatgaaaacagatagaaaggagaaccgggaatgaccgagaatgaaaaaaacgcaaggatattcaaagccttttgcgacgcaaatagattgacgattttaggtttgctgcaaagtggtgaaaagtgtgcgtgtaagctactggaagaactcaatatcggacagccgactttatcacatcacatgaaaatattgtgtgacgcagaaatagttattggacgtaaagaggggaaatggacgtactattctttcaatccagagggggttatccatgcaaaggaactccttaatcaaattacaatggtaacaagtgatacaaaatgtaattgtgcagactaataagccgcctaaacttacggcggcttacacatcaaatattatatcgacatattgcgatatataaatgaaatggaggtattttcttggaagctattaaattattttgggacttttttcaaaatcaaatattgggtatgaagtggctcaatgaagtaataggcggtttattatctgccgttggtcttaacattgaaagtagagtaggcgcaagtattcaatttttcctttatgacacaatcaaaattacagttctactttgtgttttgatttatctgatttcctatatccaaagttattttccacctgaacgaagcaagaggatattaggacgttttcatggtataggtgcaaatattgcggcggctttactcggaacagttaccccgttttgttcctgttcatctatccccttgtttattggttttacaagtgcgggcttgcctttaggcgtgacattttcttttcttatctcgtcccctatggttgacctcggctctcttgttctgctcatgagtatattcggttcaaaaatcgctattatctatgttctagtaggtttagttatcgctgttgtgggtggcacaattattgaaaagctacacatggaaaaatacgttgaacagtatataaagacagcgggaagtgtggatattgaagccccggatttgacaaaacgggataggctcaaatatgcgttggaacaagttactgctactttcaaaaaagtatttccgtatattctgataggtgtagggattggtgcttttattcataattggattccgcaaacatggattgaagccgcactcggaagcaataatccattctctgtaattttggctactcttgtcggcgtacctatgtatgcggatatttttggaacaatccctgttgccgaagccctatttgccaaaggcgcacagcttggtgcaattttatcatttatgatggcggttactactttgtctctgccctctctaattatgttacgaaaggcagtaaagccgaaattacttgccttgtttatagctatttgcacaggcggtataatcattgttggttatttgtttaatatattccattattttctcatataggagggcgaattatgacaaagcaaatttctattgaatatctttacttagacaataaaacgtgtagtcgctgtatggaaacggagggagttttagaaaacgtaatatctgttttaactcctgctttagaattggcgggctacgacgtaatattgcagaaagtggaaatagaaaatgaagaaatggcagtctcacatcatttcttatcttcaccaaccgttcgtgtaaatgggaaagatatttttcaatcaatcgaagaaaatagctgtggctgttgtagcgatataagcggaacagatgtagattgtcgcgcatacacctttaacggtgagacttacgaaactccaccggctgaaatgattgctcatgcaattatggattgtgtttttaacaaatcacaaattccatgttcgtgtgagaactattccattcccgaaaatcttaaaaccttttttgcaggaaaaaaggcgcgagtatcttgttcatgtaacggcgaatgttgttagcaaataaaaaaatcacatcaaaaaggagagtatcattatggcactattcggaaagaaaaacaaaaaagaagaaactacctcttgctgctgcggaggtaactgcaatgcggaaagtatggcgcaagcagaacaggcaaaaaaggagggcgcaagcgttaaaattttaggaagtggctgcgcgaaatgcaatcagcttgaagccgccacaaaagcggcgttagaacagcttaacatggatataactatcgaccatatcaccgactttacacagattgcggcttatggcgtaatgactacccccgcccttgtcgttgacggaaaagtggtatcttatggaaaggtactcaaggttgaagaagtagtaaaaattctacaaaaagttaggggatagtatcatggcgaaaaaatcccccggaattggtttttttgaaaagtatctgacattgtgggtagctctctgcatggtggcaggagtattgataggtaaatatttaccgggtataccagcctttttgagccgctttgaatatgcgaatgtttctattcctattgcagtcttaatatggctgatgatatatcctatgatgttaaaagtcgattttcaaagcataaaagatgttggcaaaaatccgaaagggttatttgtcacttgggttacaaattggctgataaagccttttacaatgtttggtatcgcgtggctgttcttctttgtgatttttaaggggctaatatcgccggaactggcgcgtgattatctcgcgggtgcggttttgcttggagccgccccatgtacggctatggtctttgtgtggagccacctatcaaacggaaatgctgcatatactgtcgtacaagtggcaaccaatgatttaattattcttgtcgcctttacacctattgttgcctttctgcttggtgtcggcggggttgctattccgtgggctacgttgattatatcggttgtgctattcgttgttattcctcttgttggaggtattcttacaaggaatatcatcacgaagcaaaagggcgcagagtattttcaaaacagatttataccgaagtttgataatgttactacaataggattgcttcttacgttggtattgatattctcgtttcaagggaatgtcatacttgaaaatcctctgcacattattttaattgcagtacctctaattgtgcagacgttcttaatttttttcattgcgtattttgcaagcaaagtcattaaattgccacatgatattgctgctcctgcgggaatgattggagcgtcaaacttttttgagctatctgttgccgtggcaatatctttgtttggaacgcaaagccccgttgctttagcaacgattgttggtgttcttgttgaagtcccagtcatgcttacgcttgtaaagattgcaaagaaaacaagggggtggtttgcaaaatgaaatgtccgaatgtaaaagaatgtgcttgtccaaaaaagacctgtccgaataacggaaaatgttgtgcttgcgtaattaagcacagggaaacggatagtttaccattctgcttgtttcttgataatgagggggataaaagccttaaaaattattatgaaaagctaaagcagagatttgaaaacgaataagtaaaatgaaactgccgttttaggcagattgaacggcggttttgaaataacaattcaaaccgccgttttcttttttcaaaaatagaaaaacggggggtgtattaaaatcgcccatttttaaggatacggcggtatcaaggaggtatcgccgtgtttcttttatatcgacttaattcgacaaactttttatcaaaaaaagcccgacccccgccacgggatatttcggttatatagatgaatacacatatcattataatgatgtttatatttcacttgcgcctgattgctttttgcagtcgggcgcattttgtttttctcaaaacttttttgaaaaagtttgctgttttgtttggcatattcccgcccttgtcgtggagggctgccgaaaggggataacactactccgacccccggattggaaagggggtgagaacatgaaccctgctcggtttgaatggcagacccggtgcgagtttaatgcgtactgcaagcgcacgttacgcaatgaactgattgacgcaagccgggaacgcaaacgtcggcaacgccgcgaagtgaccttttcagaccttaccccgcatgaggaaaaacagctttataccgttgacaaatattttgtcaatgaggataaagaagaagccttttgcgtggcagatttgaaaataaccgcgaagctgcttgccgaagccttgcactccttgccggaggataaacggcaagccgtgttgctgtactattttttcaacatgaccgacgttgagattgcggaagcaatgaaaattccccgcagcacagtacagtaccgccggacaagctcttttgaactgctaaaacgatatttggaggaacgcgctgatgaatggaacgagttgtaacgacgacgagcgcggcttattaccttacccggtcattttagccgcgtcagagggcgacccggacgctatgaaaattgtcttgcagcattaccagagctacatagcctatctgtccatgcagaaaatccgcgacgaaagcggtaacacctattggggcatagatgaggacttacgtcaacggctgcaagcaaagctcatgcgggctgtcctaaacttcaaggcagattattaaggacaaaggcgaagcgtccccctttccgcttttcctgtcccgtctgacctctccgtaccttgacaaagaaagcggcgcaagataacggcggcgcagcatagggcaaatcggatacgttctttttgtgccgagccatacggcgggtgcgccatgacttccccttgtcgggaacgagcgaccaacaccgcgccggggagcaagtgtagcagcttgcgggcgacgaccacacagaaaggataatgatactcccttgccgccacagtccgagcgttaaaagcgtcgcagacaatgggtagggctgcatgagaaccatgcaggggtgaaattcccgtggagctttgctgaaagccgtccgattaaagccttttttaacttgtcaacctttttattatagccatgaaagggggcttgacttatgactaatgctgatgtgcctatttgggaaaagtacacgctgacgattgaggaagcgtctaaatatttccgcattggagagaacaaactccgcaaactggcagaggaaaaccccaccgcaggttgggtaattatgaacggcaaccgaatacaaatcaagcggaaacagtttgaaaaaatcattgatactttggacgtaatatgatgtaatttttccttgaatatgctataatagatgtaggcatatcaaggctttttccgtcgtgacatgaaaggagcatgacgagagatgtcggaaaaaagacgagataacaaaaaccgtatcttacggacaggagaaagccagagaaaagacggaagatatgcttacaaatatacagatacctttggaaagccacaatttgtttatgcttggaagttagtacccacggacaagaccccggcaggaaagcgggacgatatttcattgagggaaaaagaaaaagaaatccagaaagaccttgacgacggtatcgaccccataggaaagcaaatgaccgtctgccagctctacgcgaagcagataagacaccgggcgaatgtacggcatggaaccaaacagcagcgcaaacagctcatgcggatattggaagaagatagtcttggagcttgcagcattgaaaacgtgaagctgtccgacgcgaaagaatgggcgttgcgaatgaaagaaaaaggctactcgttcaagaccatcaacaaccacaagcgttccctgaaagctgccttttacacagctatacaggacgattgtattcggaaaaatccgtttgacttccagttgaacacggtgttagaagataacacggaaccaaaggtgccattatcccctacgcaggaagcgtctttcctgtcctttgtgcagaatgatgttgtctatcagaagtattatgacgagattatcatactgttgggaacagggcttcgcatttctgaactttgcggactgactgaaaccgatatagactttgagaacaggctaatcaacatagaccaccaacttttgaaactatcgggtgttggttatcatgtcgaaacgccgaaaacgaaaagcggtatcagacaaatccgcatgagcgcagccgtatatgaagcgttggggcgtgtgctgaaaaacagagggcgggcaaagcctatcgttatcgacgggtacgggaaattccttttccttaaccgaaacggcttgccaaaggtggcggcaaactatgaaagtatgttccgggggcttgtgaagaagtacaacaagaaccatgaggaagcattaccgaatgtaacaacgccgcatactttacgtcatacgttctgtaccaatttggcaaacgccggaatgaacccgaaagcattacagtatatcatgggacattccaacatcaacatgacgctgaactattatgctcatgccacttctgacagtgcattagcggaaatggaacggctgattgcgtagtagtaaatagaggttttactactctttctactacctttgaacgcagaaacatgaggggatatgagaatatttaagaacatcttccgatatgaaaagtgccggaaagcctgtaaatacaggctataccggcatataagaacttctaaagagataatcaaaaagtatagtttgatttattaataaataattaggttattttgtaatcatgctaaatttattgttttttagatacaattattctcccctcgcctgtttaaagatactcttccaggatgatgattgatatggacatttacaagggtaaaaggataagttggattgtggcgccaatgctcctatagctgcggcaaaaaaagagacagcccaggctgtcccttaaaattcttaccacatataattcctatcctttaaaattcctatcccttaaaatccatttccgttgtaaattccttgccgcaatatggacaggtgacacgaaccacaggtccttctaatccgtttagggtttcgtacatctcctgtaagaatttcaaatcagaagcaaacaacttttctattgtttcaactgttaccagcggaagactgcccagttttataataacatgggataatataataattgccgcataatccgggttctgcattacccttgggtccctcattgctcttatttcgtccattgctgttgccaggcgcatgatcccattcttatgaagatttccttcctcatccatgtaccctttcggcaaagtgaattcgtattgtgtctgcagcataacctctcctctccttacatgttaatatttaaaatatactaatacttccaatataaaccatggggaataaaagaaaaaagcctggtacataccaggctctccacaagctgctgacgggaatcggacccgtgacctccgcactaccaatgcgacgctctaccgactgagccacagcagcttattctgttttggtgcgctctcgcgaaccttgtatatattatcatgtccgtatggttttgtcaacaataattttcaattttttcaaacaattcaccaacggttctttcttgccttctctttcttaccttctatccccgccagtacaaaccgctgctcccgcaagccttcccggcaatcatgagcagcagtctgtgcggcggcttcccaaaagattctaaaaaaatcgaatccccaatcaacccttttccatatatcagaaaatcccgtcatatccttcacgcagcgtatcacaggagcggcccagcttctccagctcctccggtgtcagggacaggggaaggaccctctgtaccccgttctggttgataatacagggaactccggcaaatacgtccatctgaccgtactctccccgcagcatggcggatacggtaagtacgctgtgctcatcccccagaatggccttggttattctggtaagggccatgccaatgccataataagtggcactcttggcctctatgattttgtaagcggccgtgcggacctcttcctcgatttcatcaaaccgctgccggcataccgcttccccgttttctccgcacagttccagtatgggcttggtggccagcagcgcctggctccacggcacaaactcgctgtccccatgctctcccatgacataggcatggacatttctgggatccgccttcagataatcgcctaacaggtatctgagcctggctgtgtccagggctgttcctgttcccagtacccgtctcggattaaagcctgacagggtacaggttatcctggtcatgatatcaaccggattggttgccaccagaaacagtccgttaaagcccgatgaggtaaccggttcaatgatggagcggaacacctcagcattccttttcagaagatccagccgggtttcaccctgcttctgggccacgccggcacatatgaccacaatatccgcgtcactgcagtcgtcatactcccctgcatatattgtcatgctggaattggcaaatgccaggccatggtttaaatccattgcctccccctcggccctcttcttatttacatcaatgagcaccagctcatcacacaccgattgattcagaaggcaataggcatagctcatgcccaccattccagttcctacgattaccactttcctcttatctgctctcacgtgctgctcctttcccaccgtcccggtctgctgttcataaccttagtatatctggaaaacctgcgtcttattccggcaggattcccaattggtttttccaggacctccggcaggtccggcggctacctggccagtttcttttccattaactcgctgttgctgctgtaagctatcgcattttcacgtgaaatcactccgtcacggtataatttaataaggctgttatccatggatatcataccttcctcctgggaggtggcaatgattccgtctatctggtgaatcttggattcccgtatcatattgcggattgcattgtttaaaaacataatttcaaaggctggctgcaccccgccgtctactgtaggtatgagctgctgggatataaccgcatccagcaccatggccagctgggtccttatctgctgctgctggtttggcggaaatgcatcgatcacacggtcaatggtattggctgctcccacagtatgaagggtggagagaatcaggtgccctgtctccgctgctgtcatggctatgctgatcgtctcataatctctcatttcacctaacagaataacatccggcgcctggcgcagggatgccctcaggcctgtgacgtagctgtccgtatccgtaacaatctccctctgggtcaccacgctctgtttatgcctgtgcaggtattcgatggggtcctccagtgtgatgacatgggcgtttctggtgctgttgatttcgtcaataatacaggccagggttgtgctcttaccgctgcctgcgggtccggtcaccaggaccattcccttggtaagcctggatacgccgatgatgctgtccggcagatggagctgtccggcatccggcagctcaaaacgcaccacccggatgattcctgccagggagcccctctggcggaacacactggccctgaaacgcgatacccccggtatggcaaaggaaaaatcatcatctccgtgggactggaccttatccatgccccggttctttgccaggccgtatatctcggtaatcatcttgtccatctcatcgggcatgatccggttgtcaccctgatagataatccggccgccaatcttataggagaagggcatgcctggtataagaaatatgtcagccgcattcttctccacggccgatgtaagcaattccatcacattcatctgttttgctccttttgcctctgttttattcctgggacggggctgctccgccccacacaggcatagaattatctatttcatactcatcactggcatatacataccatgactttatatcgtaatgcttttccccgcacatgagaaccagctcaatgcgcagagactgtcccctgtccatagggatgtctgtggaaataaggccggtttccctgttgtaaagctctcccagcctgcccttgatatccaggctgcactgggtggaatcctttccctcccccatttcctctgtcaggacctggtccacttccttaagccactgctgccccctgctgtccgcctcataataagcctggaccgcctccccattgcgcccggccagctttaaatcgccctgggcgctgcttaaggacagcagtccaaaggttgccatgcacagaacgatgaaaataagaatcagggacgacgcccctatattcactttattcctggatgcctctcctgccatctgtctttcctttccgtgtttcattttccctaaatacggcggtacacagttttaggggccggcataggtctctgtctgcagccggtacaacatctttcccttattggcccctctgccgtagcgcatgataagtatgtctgcccgctccatcttatccactgttccggtgtatataacccccaaaaaggcgggttcactgtcaggttcagtttcctcccagctgctgttccagtacatggtatggattccttcgtagccttcgctctgtaccagctcctggttccactgaacctgttcctggtttccctcatcggcatctgccaggtgttcccatatgtttcggtccggcagcatctctgaccaccgcagagcctgccccgccttaagctcttctgccagactctgcgccttaagcaccgcctgatttatgtcccgggcatctttgcttatgttgtcagccttcacaaacaccagaacacagatactggcgcagatgatgaaaaaccccaccaccaccagcatttccattaaaaatggccctgaaccggacccgctttttctattcatccgtctcaagtcctccgctccgcagagaaagctccaggcttccgccgccctctcccacggtctctatacgcagcagcctgccgtccttagaaaacttcaggccctggcattctaaaatctccagaccgtccgcaagccccagaccgctggaggtgtctgtaaacagttcccggatgcttccatcgtcccagtaaatccatgtgacgtattctgaatccccaatctcctgtttcatctccagcacctggatcccatccacatccgccacatttaccatcccggcccggtcgccctggcgcaccttgttggcaatgtagctgagggctgtgttgcctgtataattggcatcgctgcgcacattgatattttcatatacccggctgccaatcagcactgtgaaaagggcacacagcacaaataccagaaacaacagcatggtaaaaagcacgctaacggcattcccctttttgtctgttttccgattcataactgtatgccccctactcgtctatgggtatgatggttatttccggcatcacattggacgcgaaaccatcgtaaaacacattgtatttctttctgttaatctggaccgcgtaattctcctccagatattccacgctgggcggataacggccctcaatggcatagcactggaccgaagcccttgccactgcctttctgagagtctcctcctcccttgcgcctgtcctgcccgaaaaattcagcacagcggcagcaaataatgccaccatggccgccatggctgccagggacagtatgtaacccagtgcctggctcttctcttttttctcagacttaaccttcatttactgcctcctaactgttatccgatagcggacaatacgcccaccagaggaagcatgacggacaaaaggacaagtcccactgatacagccaggactgccacaatggtcggttcaaacctggcaatcatatcatcaatggcagtatcagccatctcctcataatcctgggatatctcatccataacgctgtccaggtggccgcttctggttcctactttaatcatttgtacataaaaaccggaaaacaggccggtatccttcatggcctggtagtagctctcacccacctggagctgttccgagcatttcccgatgcggactgccacgctttcattctcaaccagctcctttgccaggtccatccccttttccagctccataccgctctttaaggtcagggccagcacagcggtaaatcgccggttggccactgccagggcaatcttactgcgtcccttcacaaaattcacaaagcgctccaccagggcaaagcgtttgccgaatttggaggctgtccagatcccgcacaatgccagggccagcacagcccccgcaataagggctgcgccgcttaaccagcctcccagcctcatggccgaggctgccacaggcggcatctgggcccccagctgctcatataccttgttgaacacgggcatgaccttggaaaacagcacaaagaggaccaccaaaagcattaccaccatcatcacaggatatgtgaccgcattctttatggcccgcaggagccggtattccttctcatagtaatcggacagcgatttcatcatctggtccatggttcctgtctgctgtcccagcttggccatacgcaccacataagccgggaatacacccgtatcctccataactttgaagaagggatctcccagctccacgccctctgccatatacaaaagcatatccttctcgccctgcgaggctgcatcctcagccataatggccagcccttcctctaacggaacagctgcttccagcagcagagatatctgcagacagaatgccgacagctcctcataggaatacctgtaataagcctctccctttttcgccatctcttttgcctccccttaatagctgtattttgccctgtagttagagccgtttccaatgtactgcatgatttcctggctctgaccgctggaggacgcaaaggtggggtccatcagtttccagctgttgccgtcaaagtagatgatattatccacccatccctggccttccagatatacattaatccatgcgtgatacagattccccgtatagcccactaccagcttggtaggaatgtcctgggatctgagcatggctgtcataagggccgcgtagtcaaaacagattccctttttctgcgccagaaccacatccacattgggcagatatccggactggaccgaacttgccttggccgtatcataggtgacattgttgattacatagttatatacgttggacaccacttccaactggtccgttgcgctggcagccacggatgcgcctgtctgcaccgctgcgctggcagcattgaaattcacatactggttggggtacaggaatggtccgaactggttggttatagtggcatttacattctggctgaaggcctgggaatactggtttccctggatattttcaaacaccttcaccgagtagctgccgctgccctcagacagagggaacacctcgtatacgccgctgctgctcaaatcatatgtatatgtctcggaaccgctttttgtaatctggaccttaatcttgcccacgcttcccgtgtactttaccataatatacccctccgacacattggatgcgtccagggtagccttctcattgctgtatgtagtgactccggaagcaatgggagtcagtacatgacttccggcaggctttgtgtaggccagggccgtcaccggtacctggatactgctgacggcaaaaaaagccgctgccgctgccgctgcaagctttacaacaggtttatatgctgtcttcatatcgttatcactcctttttctctaaaaggactacatctccaggcgctgccttacaatctcataggccagcacgcctgccgcaaccgatgcgttcagggaatcaatatcccccttcatgggaatggacgcaaccatatcacagtgctcgcgcactagcttgccgaccccttccccctcatttcccaccaccagtccgatggaacctttcaggttcatcttatacatgagttctccgcccatgtcggcgcagacaaaccacatgccctttttcttcaaatcttccatggtggccgtcagatttgtgaccttggctaccggcgtatagtttaaggctcctgccgatgtctttgccacggtggctgtcagtcccacggcacggcgtttgggaataatgacgccgtgggcccctgccaagttggccgtacggatgatggctcccaggttgtggggatcctctatgccgtctaacagtataaggaagggcggctctcccttttcctctgccgctttcagcatatcctccacctcggcgtactcataggctgccgcataggcgatcacaccctgatgctttcctgtctcggatatctggtccagcctttcctttggcacgtagttgatgatggtatcgtatttcctggcttccctcaggatggtgcgcaccggaccgtcctggcagccgtccagcacgaacagcttgtcgatggtcttgccggaccggaatgcctccagcacggcattgcgcccctctatggtcagttcttcgtatctcatgtcttatctccttccgggtccggcatcctgcccagcttttcaagtccctggcttatcagatataccagcctgttgtattcctgcctcaggaacagccaccctaccagggcttccattcctgtggccatgcggtaatcaatgacagaagcgttcttggctgatgtggccgattttgcattgcgcccccgcttgaacacggcatgttcctcctgggtaagcatgtcctcgatggcctttataagctctgcctgtgtcccggcctttacaagctccgaactctgcttatgcattttattcacctgcatgctgccccggtttatcacctttgtgcgtatgatgacctcatacaccgaatctccaatataggccagaaccagtggcgagtaagaattctcatccactggttcaagcctcatgcactgtctataatatgtgagaaattcctgaatggttacgctctcttccactttacgccctctctggtgtcctctaatacaattcccatatccagaagctttccgcggatttcatccgccagcgcaaaattcttatctttcctggcctgctgtctggcttcaatcatctcttcgatctcgctgtccagcacttcttcctttttctccgtgataatgcccagtacatcgcacagttcttctatcattgtcttcatataagatacgaattccctggtacgggattcatctgcagtggtatttgccagctttaccagttcaaatatggctgaaatagcgtccgcggtgttgaagtcatcatccatggcttcctcatacttgctccgcagcttatctgcctcttccattgttgcctgatccccggcagtcttggagctgtcggaagcctttgcctccagatcccttaacttctccacacaggtcaggatacgctccaggccgttcttggaagcctccatcaggtcagcgctgaagttaagggggctgcggtaatgggcgctgagcatgaagaagcgcagtacctgcaggtcgtatttttcactgatttcccttactgtaaagaaattccccagggatttggacattttcttattatcaatattcaggaatgcgttgtgcatccagtatgtggcaaagttcttgtcgttggcgcactcactctgggcaatctcgttctcatggtgagggaatatcagatcctcgcctccggcatgaatatcaatctgctcgcccaggtagcgtttggacataacggagcactcaatatgccagcccggacgtccgtcgcaccacggcgactcccagaaaggctctccttcctttttaggcttccagagcacgaaatcgttggggtcttccttgccttcctcaccggtgaccttgatttcacggaatccggactgaagctcatccaggttcttatgggacagctttccgtattccttaaaggaacctgtcctgaagtacacggtcccgtccccggccacataggcgtggttcttgtcgataagggtctgtatcatctccagcatgccgcagatttcctgggttgcctgaggatggaccgtggcaggctttacattcatggctgccatgtcctttttgcactcctcaatgtaccggcgggacacagtgtcagcgtccacaccttcctcaattgccttttttatgattttgtcatccacatccgtgaaattggacacatagcgcacgtcgtaacccttatactcaaaatacctgcgtaccgtgtcaaatacaatcatgggcctggcatttcctatatggatgaaattatacaccgtagggccgcagacgtacatcttgacctcccccggggtcagcggaacgaattcctctttttttctgctcagtgtgttaaatatcttcatactcttattctcctcaaatgaatctcttgcggcatgtctggaacataccaggtcagctgtgtcagaatgtgttttatcctgtcttattcttccttcgcccggctgcagccaggacagcctccacagccgccttccattatcttactatcatagcagtaatctgctgtttccgtcaataaggtaattgcctgagaagagattccttctccagttcctgtaaatccaagcccttcttcagtagtggccttgacgcttaccctggacacgtccagatggagggcgtctgctatgtttgccgccatctgcggcctgtattgagccagcttgggacgctgggctatgatggtggcgtctatattctcaaccacgtaccctttcccgtccagaagttctcctaccttctttaacagttctatgctggaaatacctttatatgccggatccgtgtccggaaaatgctgtccgatgtctcccagggctgccgcccccaacagggcgtccatcaccgcgtggaccagaacgtccgcgtcggaatggcctaagaggcctttttcatatgggatattgacgccgcctaagattaggtcccggccttgtactaatttgtgaacatcgtatccttgtccgattctcattgtgtctccttttttactgcgtctgcgctactccgccatgcacaccgtgactgcgctgcgctcattgcccgcgtcatatcatcatccttaccttcctggctatgcagctggcttggatgtcggtctgaaagccgcagctttctccgtctgcatggacgggcagggctgcttccgtgtggatggatacttccctgcactcgtaggttctgacacctttgggccggcgccttcctatgagggctgacagcaggacgggtatcagctttgtcctggtaccgtggctcatgacgcagatgtttaattttccgtcgcttccgtctgccctgggggcaaagaggaagccgccgccctctgagggctgtatgtgacaggatatgaaaaggatgttgttgaactccaccttttttaccccgtccagtaaaatgtatcctttgcaggatttgcatttaaaaaactggtgtatacctatgagtatataagaaagtttccccatacccaaacgatttaaacgctggcggcatctggaggacagggcatcctgacagactgctgcgtcaaatccgattccggcgctgaccagaaaccggcgatgggatacctcctgatttccataggtaaggactccgtaatcaatcatggtgaaatgccggggggccagctgtttcttaagacactttatggtgcgtccgggcatgcgaaggctcctggccagatcgttgccggaaccggccgggatgtagcccagacttaaaggcccatggaaagacacaccgtccagaacctcgttcatggttccgtccccgcccacggcgatgatatatcttggctcatcatggctgtctgtcagccgcattgccgcggttcttgcgtccccaatgccttctgtcaggaaaacttcgtattcaatattatgactttccatataacgggctatggctttccagattttaagacccttgccggagcctgctttgggatttacaatgaagttatacatgaaggattcaggtcgtcctttctactattttactctgccttaaattatagcataataccctataaaacactaagaaaatttctataaaaaaagttgtaaaaaaagtcttgacaattaccacaatttatcatatactgtacaggcagtcgcgagtgagacacaaacgacggcaggatatggggtcttagctcagctgggagagcatctgccttacaagcagagggtcacaggttcgagccctgtaggccccactatctaccaaattaaatatggcggaatagctcagttggctagagcacacggttcatacccgtggtgtcgagagttcaagtctcccttccgctactcgagaagctttggattgtcaaggcttcttttgttttgtcgccgggtatttgcctgccagggcgttttatccgtctcaaatctgccagggaggacacaagcatcatggaaaaggaacaaatctttcaaagaaacgcaggatttctcgcgttttttctaagcggcatatgcgccatcagcagcggcgtggtcgtaagcatgctgcaggagacctacggctttgcatacggcatgacagggacactgctgtcccttatgagtattggtaatctgctggccggttttgcttccggcatgctgcctgcgaaaatcggaaccaagaaaaccgtggtgctcctgacagcaggctatggagccggatatctgatcatgggattttccggatggatgctggttcttatgctgggctttttcctggtgggcgttgccaaaggaagcaccatcaacacctgcaccatcctggtggctgataactccggcgaccgtacaaagggcatgaacattatgcacagctgttacgccctgggcgcgcttttgtgtccgttcttcatcggcgcggccatgaaggcagggaatgccgttcccatgctggtgttagcatcctgcggtttcctgctgtggctgaccttctgtgtgactcccgcggaaacaaaggccatgaaaaaggacaggagcatagataagggcttccttaaaagcaaaaaattctggttgctcaccggtctcctgttctgccagaatgcggcggaaaccagcgtaaccggctggatggttacatattttaaaggaaatggcatcatatcaggttccctcagtccttacaccgtgaccgtgatgtggggcgccaccctgattgcccgcctgctcatagcatttgtaattcctatcaaaaacagctattcttccatgattaagatgggtattggctgcatcattttctacctgggcctgatgatggccggtacccagaccgctgccatcctgctgctgttcgcctttgcctttgccatggccggcatgaatcccactgccgtggccagcgcaggccgtatgaccagtgcggccagcatgggaatcatgcttccggcggccagcagcggcgctattatcatgccctggattatcggcatggtggctgaacatgcaggcattgaaatcggaatggcttccaatatcattccctgcgcaggcatgcttctattcagcgtggctgtaaaacgtctgaaagaataggagctgtgaagccatgctctacgataaggatatacgggagcctctctttgattttctggaggagatgtacggaaaaatacgtattctggaagaaaaacagataggaaaatccagggcggatatcgtcatggttctgccggatctggtggcaggtatcgaaattaagagtgacgccgacacctatgcccgtctgaaacgccaggtaaaagactatgaccagttttacgacaggaattatgtggcggccggctccagccatgccctgcacatcgaagaacatgtccctgaatggtggggaatcatcaccgtggagcaggtggccggacaggcggacttttatcttctcagggaggccaggccaaatcccggggtaaatctcaggaaaaagctcagtatcctctggcggccggagctggcccatatccaggaattgaacgatatgcctaaatacaaggaaaagagcaagcaattcgtcattgataaaatcgcagaaaagatacctgaagaaatactgtcaaagcagataagcggcgccctgtttgaacgggattataacgaaattgaacatgtgatacaggaatttaaaaagacccggaccgctggcaccatgaaagggcgcgccgggcgcacccgaaaaggcagacgttcatgatacgcctgccttttcctgatccgcattttattggtctatattacctgttccacttttctattccgccttaccatccagataatccagtatctcctgggcattggtatccggctttgctttttcaaacaccttctcgatgacgccattctcatctattacataggtacttctcaccactcccatggaaaccttgccgtaaagctttttctccttccacacatcgtatgcctggatggcagtaagctctggatcggacagaaggatgaagggaagttcatgcttggcggcgaagttggcatgggacttctcactgtccctgctgacgcctatgacctccacgttcctctgtttaaatccaatgtacgcgcctgcaaaggcacatgcctccctggtgcatccgggcgtgttatcctttggatagaaatacaataccaccttgcggccaagaaaagaagacagtttaacttcctttccgtccttatcttttaatgtgaaatccggtgcctttatccctgcacttaacatgtcccgtatcctccttaagcaattggccaggctcacagaacgcgcactggcctatgagattatattattgcaggtattcgtgcttgtcaaggactcctctaacgcattatgatttccttgaatctgcggacaaattcctcagcctttatatcctttgcacactgcacattctgtctgctgtttcccacccctatcttccatgtattaaaggtggtgcctctggtatgctgtccgtgaagctccacatggatgtcttccccctgataggttatgatgtctttatcgtacaccgcaaaaacagccatgggatcgtgcaggaaggtgtggcgtccccggttctcgtaatagcatgtgagcaggtctgccagcagctccacttccggttttttgctgtttcggaacatggttaccaattggtcattcacctggcatctggtggtcacatccagtcctatggcccggatgggtacaccggaggaatagacgatatgggctgcttcagggtcgcagagaatgttccactcattgtaatgcatatagtatgcgccgcccatcatcacgatttccttgattttccccttaacctccgggtacttgcaaagcaggacccccacattggtcagcggacctatggtgaccagggttatgtccccctgtgacgcagacaggctcctgcgcagatattccaccccatccatgtccttccggtactccagctcttccattcctgccagaagctgtataggcaccgtctccacatccgcctctgccaccagcggatgccctatccctgcgtacaccggtatgtcggtcctgcccatgagctgcagaagccttaccgcaatctgcgccctggccgccgtgttccgaaatactgtggtgatgcccataacctccagttcttccgatttaagggccagacagatagccagggcgtcatctgcatcgtctcctatatccgtgtcaatgattatcttaatcttatccatattcttctcctttttcataacagtccacacagcacctattctttacaatcgtttcattccttcatacccgatgtactgattcccattttataatatttctgcagcggaaagaagaacattaacggcagcaccgtggtgaccacggaagctgcaaatatctccccccacagagttccgttttcctgctggaatacagacaaagccacctgtacaacccgcacctccggggcattggcagcaatcagaggccatacaaaggactgccattgatagaaaaatataagcaggcccgcgctcaccataatcggcttggtcaatggaatatagattttcgtaaacacagccagccagctggctccgtctatccgggccgactcagccaggctgtccggtatttcctcaaatgcatttttaaataaaaagatatatgtaccgttggcaacagccggaaggataagcgcgctcttggtgttcagcatgttaagctgatggcacagggaataaagcggtatggcaatggcctcaaagggtatcatcatggtaagtataaccataagaaacagcacatgcttgcccctgaacctgaattttgcaaatgcaaaccctgccagcgcattgagggccagccccaggacaacggttaccgcgcacaccaccactgtattaacaagcggcttcatgaactcataatcaacaaacagactccggaaggattccagggatatctgtctggggataaaggtggacagcgagaagggcgaagcatatttaaatatctcctcactgggcctgatagacgacataaaagagaaaaataccggcagcacaagaaatacggcataaaacagcatcagcccatactgcacggttccaaacagaacatgtttgacagtccgcttcttcatatttttcctcctctttcttaatgctttggcttcagaactttcatctctaccatgaccactgcaaatgacaccagaagaatcaaagtcacaatggcataggaacgcccgaagtctgcatagataaatcctgatttatacgcctcatacatcatcaggtttgtggacatctcagggcctcccagggtgatcatgtacatgggaacaaacatcagcaggtttgccaccgtgttagagacaaatacaaacatcatggaccgccgtatcagtggcagtataatatcccacactgtcctgaatccgttggccccgtcgattctggctgattcaatcaaggattcggatacctcctgaatgccggacaaaagataaagcatccagtaaccgcagcccttccagatacagataaggatgactgacatcatggactgtttcgggctggtaaaaaagggctgggccggcattccgaacatcatgagtatgctgttgaccacgccctgattgggattcagtaatatattccatatcatacaaccggaagaaagagctatggctatgggcatcatgaatacagaccggaacgcgctgttagccctgcccggtacgcgcaccgacaatgccagcagcagagaaatcagaatctgcaggggcgtggtaatgagattgaaaataagggtcaccttcagcgttttatagaaggtggggtctgtaaacagcgctgtgtaattatccaggcccgcaaaatacgtttccccccgcagaaaggattccgcaaaaaaacttccggcaaaggatatgatgatggggtaaatcttaaagatgaaaagcaggagcattgccggtgcaagaaacagatagggttcccatgctccgggccgttttttaagttttgctggctccatgggccgacctcctcctatttaaggagaacgtatccgttaggccggatacgttcttccaacgtcaacttatgccgttttagctactttgtgtactttttcaggatatcatcgatcctggccgcggatgtatccagagtggtctttacatctgctccgtttcttatatcctcaatggctgcatttacaacatccgaccactcgttgtatccgggagtctttggccttgatacagaataattctccaaatcgctggccagcagggcgtacacttcatggtccggggcagaagcgtccgtaatccgggcaatccgttccatattagccccgatattattctggctgtccaggaatatgccgctcccctctcccacggtaatatacttgatgaattcagccgcctcttccttgtgttttgaattggcattgatgcctatgtgccaggagtcgcaccccactgcgggcacgccgccttcaaaatagggcaccggacacacgcctacattgattccctttcccttggctctggcgtagcataccgggtctccccatgtaaatgccacctttcctgtctcgaacatttccctggcctcattggtgttcactcccttaggggaaaccccgtatttattaaacaggtcctggtaaaaggtcatggcttttacactggcctctgagttcagatatccggtggctgtcaggccatcttcgctgagccaggcagctccaagggaattagccaagggcattacattccatacgcggttaatctggtcaccgattatgccccagcatgtggtggtaccgttttccacctttgtaacctgccggcagatatccagacactcctcccaggtcatgcgcttatctgtctcataggcgggatacggaatattgttttcgtccagaatgtccttattatataccataatcatgccggactcccttttgggcgctgtcataacttttccgtcataagcagctgcattgagtcctgtctgggtaaaaaccttatccagttcatccctgctcatgtagttctcaaagggctccagatatccccttaccgaataggaggtcacaagaggcgcatccacattcagcacatcaaagtcgcttaacttggatttcatctttacttcaaccatctcgatcatctggtcaaagggatatgattctgtctttaccttgattccgggatgggattcctcaaacttctgtataatctccttacccacatccccctcccacacatctgcatgggaattcagatatacgatttccacaggttccccgccctgcgccttttcctggctgttctccggcatcttttccgcctgggcagcgctgctttctgtccgctggctctttgaagaacaccccgccgttgaaaaaaccatagctgttactaatccaaccgctgctaactgtttaaacttcataatatgtccccctagtcattgctgatccttctgtttatcacacactgctgcaaaatacgtcattgttcttttttataaattatgcataatttattttgactttatatattcattatatatattttgtcattcacaacaaccaggccaaattatgattttgtgtaatattttactatctccctgtttactcccatttccactgtacaattctaccctttattcctgtattccgtaggtgtcattcccacccttttcttaaacagattgctgaaatactgggaatcagaaaatcccaccatatacgccacatcatttaccctgtatcggatatccaaaagcagttccttggctctgtcaatccgatacgccgaaatataatccgtcagattcttattggtgtgtcgtttaaacagttcgcacagataattgggcgagatatacagttcatccgccatattctttagtgtgattttccggttatagtttgaggcaatatactcctgtgccttcgcgataagctgatttcccggctgcttgtccctggccggacctgttttcagggtccggcccagttttttctcaatctgcctgagcgtatctattaactccaaaggattggtaggttttgtcagatatctggtcactcccagctctatggcacgctgggcataggaaaagttagtgtatccgcttactatgattacatccacctcagcattaacctcccttatcttatatatcaaatccagacccgacatgcggggcatcttaatatcggtgataattacatccgcctgcccgcccttcagatattccatggcggctgcggcctcctcaaagctaccggccacggtccattcttccagcccttcgaccagcctgcacagtccgtttcttattttcggttcatcgtccacaacaatcgctctcatgtcattccctccctatgaattgccgggtatgcagaaacggatgaccgttccttcgcccaaccggctctctatcgtaagcccaaactcttccccatagtacagccgaattctcttatttacattttccacgcctatgcttctgtggtccatccgcatttctgtggtaccatccctcagccgcttcaattgttcttcatccatgccagccccgttatcgctgacctccagccagcatcccccatcctcctcacgttcatatacccttatgctcacctttcctcctgtttcaattccatggataatggcgttttccaccagaggctgtaaaatcagcctgggaacctgaacagattcatactggtgcggaatatcaatctcatattccagtttatcctccatccgctccttctgaatcaggagatagtttgatacatggcggatttcctccctgagggccacggtcctggaggacctgctgattgcatatttcatcatctcacccagggacaccacgataccgcttatctcatattcctttttttccagcagcatccaattgatggtatccagggtattatacaaaaaatggggattaatctgtgactgcagggcttccagctccgcatttttctgggccagtttttcctgatagacctcctttataagcatgtcaattttgaaaaccatgtagttgaatgtctccatgagacggcccatttcatccgagcgcttattgtctatgcggtaatcaaaatttccctgctgcacttccctcatggcttcaatcagcttcttcaccggggccgtgatggccagcgacactaccagaaggcagaccagaatcagcaggttgcacagaatgatgctgagcaggatggagtggttcaggctctgcacctgggctgagatatcagaatacggcaccaaggtataaatcttccacccggttgcctcattttcaataactgacagcgccatacgctcctgtcccaccatcagttcctttgattccccgccccggttctccatggcgcataccgcgtctatgacctgggaaaccgtcttttcatcccctgcaatcagtctttggttctggtccagcataaaggtcatctgatggggaaatgaggcattctccgtatgcaggatgtccagaaatgtatccgggttcaaatccatgatcagtacggcaatcacctcctgattgtaaaaatccgtaatgggttccaccatggtaaggaccttttccggtccggtgattccctccatataaaaaagcaggttgtcctgaagtccaagccataccggctggcctccgtgctctgaagccgcctcgtagtacttggaagacaccaggtcaaaatcctgcagcctgtaataatcataggtgctgtacaggatattggaacggtcgataatcatgatattattcagcggttcaaacgaaagaacaagggaggaaaaatactcagctatattgcgcttgctgcgccccacctgaaggtagtcctcaccgctgtggatattattccgcacaatctggctggtggccgtactctgtcccagctgtgtcatgtaggaaaccttatccgtgacactgatattgattttctccagcatattctccatctcatttttcttgttattaaaaataaggctccttgcatggctgtaggcaaaatagcccatgataccgccctgaagaatcccgatggttatgaatacaatcatgatttttgcacggaatgataactgtttcacgccctgtcccccctgtgaccatattttttctatcatatcatggatattttgggattacaaatcccgaggggggatatgatgtaccggcttttggacaaaaaaagcagccccggtcaaatcaaaccaggactgcatttttaatccaaactgcatttatactcttatattgttatgaccaaatactcccctgtcatctgcagcaccgcatatcttgttatccctctattgcgctgcgtttttcttaagcatccccagaatcacgcatccggccgctgctcccgcaaccaccgcagccagatacataaggggatttccaatggtgggaaggacgaagatacctccatgaggcgccctgagggtacagccaaatgccatggaaagccctcctgcaatcgcagaaccgatgatacaggaaggaatcacgcgcagcggatcctgggccgcaaagggaatggctccctctgtgataaaggacaggcccattatataattgacaataccggactggcgctccttttccgtaaacttcctcttaaagaaagtggtgcacagggcaatggcaataggaggcaccataccgcctgccatgacagcggccatgacctcaaagttgccctctgccagctgtgcggttccgaacacatacgctgccttgttaaacggaccgcccatatcaatggacatcatgccgcctaataccatccccaacacaatccggctggtgccgcccattccgttcaggaagtgggtgaggccatcgttaatcatacccatatatgggttgatgaatgtggttaccactgctgccaggaagataccgataaccggatagagaagcaccggcttgatgccttccagcgactttggcagctttgagaaaagcttccttaagcccaccacaatatatccgcctacaaaacctgcaaacagagcgcccagaaatcctgcgttcacatcgccgcctgccgggttgacaaaggtggatcccatcttggcaatcagtcctgccaccaggcccactgccaggccgggacggtccgcgatactcatggcgatgaagccggccaggataggaagcatcattccgaatgcctgctcgcccacggtcttaagataggctgccagaggcgtattcttaccgaagttggccggattgatggaataatcgtcaaacaggaatgccagggcgatcaggatacctccgccgataacaaagggaagcatgtgggatacgccgttcatcaggtgcttgtatatagtcctcccaatgctgtcattgccttccgacacggactctccccccgcggctcctgtgtgatggtataccggcaccgtgccgtccacagcccgtttgatcagttcctcggccttgtggatgccgtcggccacagggaccatgataacaggctttccgtcaaatctggccatctccacgttcttatccgctgcaatgataatggcatccgccgctgcaatttcttcccttgtgagcacattctgggctccgccggaaccgtcggtctcagctttcagggcaattcccagcttctttcccgtattctccaggttctcagccgccatgtaggtgtgggcaatgccggtgggacaggccgtaaccgccagaacacggtaaccggaggaggcgcctgcttctgcatccgcctttgcatccttggccgcctctccctcaggcgctccaaaacgctctgtctctgcctcatctatgatgcgtaaaaattcatccttatccgctgcccccataagcccttccttgaatccgggattcataagcagggttgacaggcgggataatgcctccaggtgtacgtctgctccctcagcaggcgccgcaatcataaacagaaggttggccagggagccgtcaaacgcgtcgtaatcaacgccctctggaaccaccatggccgccagtccgggcgcctttaccgcctctacctttgcgtgcggaatggcaattccctcaccgatggccgtgctgcccagggcttctcttgccagtatgccctccttatatccggcggtgtccttaagccttcctccggcatccatcagggataccagcctgtccacggcctcctccttatctgaaacctttacgcccagttcaatactctctttttttaataactctgtaatccgcataaatgcgcccctcctaaccggttaaagtgtgtttaagagtctcataatttcatcttttgttccaattccgtcggaaaatgccgtcgcgccgccgcaggctgttcccagcttcaaagcgtatgcataatcccctttttccaggtatccggctatgaatcctgccaccatggaatcccctgccccaacagaattctttaccgttcccctggcagcctgccggcggtgtacactgccgtcctctgctaccagtatggctccgtttcctgccatggataccagcacattcaccgctccctgttccttaagcttcctggcatggagaatgatttcctcctctgtctcaagctccagcccgaacatctgtcccaactcatgattattgggtttaatgagaaatggacggtactttaaaaccttcaggagcaaatccttctccgcatccactaccatgcggattcccctgccgtccaggcgttccatgattctctggtagatgtcactgtcaatggcagccggtatgcttccggaaaggaccagcacatcctccttttttagataggaaagcttctcaaaaagctggtccacatcgccggctgtaatctccggtcccattccgttgatctcgctttcctggtcggacttcagctttacattaatacgggacatgcccttctccacctggataaaatctgaatcaaatcccaggctcctgactccccgctctatctcccggcccgtaaaaccggcaatgaatcccagagccgtactcctgtatcccaggtttgccaaaagcgctgaaacattgatgcccttgcctccgtaaaagatgttttccctgatggtccggtttacacttcccaatgcaaaatgttctactttaaccacatagtccagtgccggattaaatgttaccgtgtaaatcatatatctccgcacctcctttttatgaaattttatttcttatgttgtctctatcataatacgatgctatattttcgtcaatagtattttgtaagaaaattcatttcatgcatttttttgtcgcaatatacaaacagacggcctgtttccgtaaaaagccgtctgttttttgtgcattattttctattttatcgttagtactgcgccgcgtaaataacagcgaaacacggttccattatttcttatccggcgatatggctttttcatgacgccgtatatgctccatggaccccttcataccagcccggagcagaaggtaaagtatctccatcactgccgtagccgtcaccctggaaaaccagaactcctctgtcagcagcttttccctggtggcagtgacaatcttgtaatcacatatcctggccaagggcgaatttccattattggtaatgagaatgaccgtgcatccgttttcctttgccccctctgccagggtctgaagacgcttggagcttcctgaattggatatgaccataaccacatcctcctggcccaggttaaaggtataggcagtctgggtttcccatatatcccctgccacagccggtattcccagctggttgaatttgaaggcgccgtccagagccacgggaatggtattgcccacggctgccagctgcaccattcgggcatgctccagcctgtccaaaatatgttccagattggccgggtccatcatgttcacggtctccgtcagctcagccaccttgttagccagtatattctgaagagactgccgcagatcgccgcggtcaatgtcattggacacattccggtccatttgttcttcttccagcacctccctggccaatgccagcttcaggctgtggaatcctttgaagccgcaccgtctgcaaaaccgggatacggtggcgtcgctggtcccgctggccctggccagctcgcccaccgtcatatccaccacttccgccttatgctccatcatgtaatccgctatctttttctctgcttcaaaaaattcgtcataggaggagcagatgactcccaacgcgcttcgtgtctctcccatatcatattccgcctgtctcatgtaaatttatttcatggtctaaatatagcacacaaaacttaaaaataaaagttgtttttcgtcatatattataatgctttatgaaactttattaacttttcgttactccccttgtttttccttttttactgtgctataatctctaaacgttaacatattattaacaatttgtttatatttagccgcatattatcaggtcttcaaatgtgagaaagaggctggtatcatgaaaaatattataacatttctttccaagtacaaacatgcatggctgctgtgttacggctttatttatcttccatggttctgttacctggaaaagacagtcacccgtcattaccatgtaatgcatgttgccctggacgacttcatacccttcaacgaatattttattattccctacatgatgtggtttttatacgtggcaggaaccatagttttcttccttttccgtaataaggaagactattacagaatttgtaccttcctgttctcaggtatgaccatcagcctgattatctgtacctttttccacaacggaacagatttcagaccggccattgacccgggtaagaatatattttccggcatggtcgccgccctgtaccagacggatacgcctaccaatgtattccccagcatccatgtgtacaactccatcggcacccacatcgccatcatgaagagcgagtcctttaagaaatatccctgggtgcgggccggttcagccatccttatggtttccatctgcctgtctaccgtattcttgaaacagcactcggttatcgacatggtgggagcagctatcatggcttatgtgatttacgggatcgtctacggatacaactggtctgccgaagacaagaaggtcacccagaaggcgctcagttaaaaggccggaatttagatgtttggaaattaaatgtttggaaatcaaatgttcgcaaaatcaaatgttcgcaaaatcaaaaccgctgtatgtcagtcattctgcaaactggcatacagcggttcttttatccctatgctttttatttctatacttctgttacatatctcccctaccgctcctctttatcctttggcagcagcaggttcaggagaatggaaacaactgccgctatgaccacaggcgtttttgcaaacaccacggtcatccaggagggaaaaccgcagagcgcgtcggatgcctgggtaacccctgctccaagagccaccgctataccaacgataaagccgcttctcaccgacaggccggtattgaatatcatgcggattccggtcactgtgatggcggcaaacacagtcagggtagctccgcccagcacacactggggaacactggtgagaaaggcggaaaactttggcagtattcccgcaatccccaatataatggctgccagagcagcgacccagcggttcaccaccttggtggtggtgacaatccccacattctggctgaatgtcacattgggaagtcccccaaaaaaggctcctatgatattgctcagcccgaatcccagaataccgccccgcagctccttatccgtggcttcccggtccattccgcccatggtggtggctgtcacatcccccatggcctgcagggaattgatggcaaacagcagaccgattgccacacaggatgaaacttcaaattcaattccaaaatgcattatctttggaagggcaaatatgcctgcatgtcccacagcgctgaaatcaaccattccaaacccaagggcaacgccgtatccaacgataattccgataagtacagaagccagctttatgattcccctgccataattattacagactatgaccacagtcagggtaagtgctgccaccagccagttctgccaggaaccataggactcactgccctgtcctcctgccatatagcgaatggcaatggggtatagggacaagccgatgcacaggatgacaatacctataatcagcggcggaaacagtgacttgatcttgttgtaggacagacctaccagtactgccacgattccgcctacaatctctgccccgaagatggtggctataccgtagccctccacaatggtggacatgcttgtgacataggcaaatccaaccccgacaatcaacggcagtcccgctccaaactgaaggctgcctttcctgaatccgactgggaatacctgcaaaagggtggccaaagcagataccacaagagccgcctggacaatgatgaccttatcttccccgcttaaaccggccacacccgcaatgatgatggcaggggtcacacatcccactatcatcgccacaatgtgttggaaagccaggggaagcgcctgtcccaaaggcggcatcccgccattcagttcaaaaactgactcttttttgtgtttgccttctttcattttacctccttttcatataaaaaggtcctatgaaagcaaacagaaagacagcctgattatagctatttttccattatacgttccatagaaccacttttttgtttgtatatatgaataattttttgacgttttatttatatcttattgtaaaataataccacaatgttaaatggttgtcaatctttgtttgtaaaaatgtcggagtataaaatgtcagagatatacactgattcactgacagcatttttgcaggacacgccgttcgtattccctgtcagcgcttatatagagtatgaaaataactgcgctcagcagcagatagaaataccaggccgcgacataggaaccggaagcatcgtatatccatgcagacatggatgtgcccaacgcaattcctgccatatttcctgcattgcatatcccgtatatggacgtaaattcccgtgtaccaaaaaaacgtgtcaccagacaggtggccggtatggactggatggcattggcaaggccaaacgcagcggcaaacagatatggtatgcccggcaaatctgccatgagcagaaatcccagggaagctgccagcgccagacatatgtaaacggaggctccctttatccccagacggtcatagagagttcccagtatgactttgcctgccatcaaaactcccatggacagggaatatataccagatgcatactgctgcccgtatcccatatctgtaagatatgctatcatatgctgctgaatccccatagccactgaaccggccagcaccagcgctgccagtatcagccagaaccgcctggtacccatggcctgggctctggtaagcccggtttttatattctggtctccggtttccgtgtctcccgttccccctcccccgaacttcccatcctccggcgattcctttataacaaagaggatgaccggtaccataagcagcaggtacaggctcccgataaagcggtatccgctcctccagccgtaatctgccaccatatgtgaaaggaccggcgtcaccaccatggccatgagtccggagcctgccaaggcaaaccccaccgccgtccccttcttttttgtgaaccagttagagagaatcttatttacgggaatcagattcgtaaatccaaatacaaggccgcatagaacggcatttgcataaaagaaccacaggcccggagcaaaggaatagcagaacaggcagattcccgcaatcacggaaccggaaaccatcagcttctttagactgtacttttccatcagcctcccctggaaaggggcagaaaacatgccaatcacagaaaatatgctggaatataaggcaatctggcttctggacacccccagctccatggaaacaggcttcaggaatactcccacggtattggacaggaccccaatattacacccgcataccactgcacagccaagcacaacggaccagccataaaataatctgttttcctgtttttccatcacgccgtcctttctccccggatatgaaacacataccgttccagccgcgacatggcttcctcgcagactgacataggacaggccagattaagccggacgtgcttcggcgccaggtaagaagcaccgtcatttccaagcacgccgcaatgctccatgtccttaagtatctgttcgaaatccagagaaggcgcagaacagtccagccatcccaggtatgtcccctccggcatctgcatcctgactccggaaaaccgggatgttacatagtcatgtacatattcctggttttttctgatataccggttgagctgttccacccactccccaccctcctggtatgctccaatcagcgcctcgcaggacagcacattgggattgttaaaatgggtcatgaccgcagccttctccatggcatcccgcagccacggtgcatacgccacagcataggcacagcgcagactggccagattaaaggtttttgtgggcgaatacaggcttatggtaatatcctttgccaggcccgataccatggcagtgggtatatgctgcttgccccccggcgtaaaatcggcccatatctcatctgaaatcaacagcacatggtattttccgcaaaggacagccacatcccttatctcatcctcatcccagaccctgcccgtaggattatggggggagcagaatataaatgctttcaccttgttatcgagaattttcctctccatatcctccagatccaggcgcattattccttcccggtccggcttcagcatactggggcagagcacccgccccagatccccaacggtacggatgaatcctgaataaacaggtccgctgcacagtaccctgtctcccggaagggtaaatgcctgaagcgctgctgcgattccccccagtactccattctgataaagtatgtgctctggccgcaggtcctcattgtgaaaatgcctcccatgccaattcatgattgcctcataaaaccggttatccagattaaaatagccgaacaacggatgctccatccgccgtctaaccgcctctatcacacagggtgcagtagcaaactccatgtcggcaattcccatgggtataatatccttcctcccctcatcagatgccttccattttatagttccggttcctgtacggttccacttttcatcaaatattgattgcatatccagttcctttctgtcgtccatcccctaccttcccgggtctgccggttactgccacagctccgggtctaacagcgcctggaccagatggctggccactgcctcccacaactgttcccccttttccctggtggcagcatagctgtttcccaggatgcctgtctctgtacgcgtctcaaaaggcaggaaggtgaaaggccggcccggacgtccatggggcgttcctttttgtacatttccacctttggcttccttataacaggggtccaccaggctctcatccagagcaagcataagggaggtctccacctcgtccgcatggaaaatattgctctgcgtatccagaatggcctcaaaatccccattgcatcccacataatacggaacccaggaaatatggatgccgtatctggtgacaatatccataacagccatgtcggtaggtgtcccattccctccgtgtccgttgacacagcatatatttctgaatccatgggatacgatacctctggctatgcttgtgagatagtccatatacagcctgggatccagggacaatgtccccggataacttccgtggtgcagtgagttggatatggtgacagtgggagctatcaccgcgtgacggcccatctcatccagcttttttgccgcaatatcacaggcagcctctgccagcatggaatccgtacccgcgggaaggtgcgggccatgctgctccgttgcccccaaaggtatgagtaccagggtgttttcttctgccagctttctcagttcttctctgttcaaattgtcccacctgtaaggatgtttcatcgctatctgcagtctcctttcctgtaactgttcctttcctcttatatccggaaggaacacttttcatagggcggcatctttctggcatttctggattccgtaaaatccttccagaatccttccaccaatcccgggttcttaagtatgtccagagcgctctgtgaaataatcttgctggtataaacagctgccttttccccgatagcagttccggctgccgcagtgacggtccagtggtgcgccctggttcctgctacttccccaaggccgctgagctgtatggtgggaagaatgtggctcacatctcccacatctgacgtgcctctgaaaaatggaatagaatcccagtccttaaccggagaagtcttgacgggaatcagcgcatccggctcctcaggcggttcctcttcaaagaaattccggtggagcttcctggcaaattcatagtcctccccgctgtacgtgagaggcggtatcttctttacctcttcgtatacataacggttcagggcaatggccgggaaattgcccctgcaataggtgcgcagggtcatcttaagcttcgtctccgtcataatggctgccccctgggcaactgccttgacccgttccaccaactccctgttctcctcatccctggagcggatataatagaaaacagatgcatgttcaggaaccacgttgggcatatccccgccgtcctcatagacatagtggatggaacattccggtgtcatgtgttccctgaggtaattcacgcctatgttcataagctcacaggcgtccagggcgcttcttccgttccatgcccttaccccatgggctgtctttccgaaatattcaaagagaatactggtcagagccatgttggtatagcccgcaaatttaagttcatgtccccccggatgccacatcaggcacacgtccatatcgtcaaaatatccccatttggccagccacaccttaccgtcgagagtctcctcagccggacagcccacatagatgatggtgccggacagctcctccctctccgctgcgaatttaagggatgaagcggcggctgccccgcagcccgcaatgagattgtgtccgcatccgtgtccgcagcctggaacaggactgtaatagggcacattttcctgtccaagaccctttaaggaatccagctctcccagtattccgataaccggcttcccgcttccccattttgcatatactgtattatgaggcgcggactgcgactgcggctccttggcattgaatgtacgcgtttcaaacccttgttccttcataaatccggccagacgcccggccgtgtagtattcttccatggcaaactccggatgctcccagatatcgtgcatcagtgttcttgcctctgtctcatattcgtcataccataactggatataatcgttcatcgtttatcccattcctttcgctgtggggtgacttagttctttcctgccccggactggtgcaggatgtatgcaaagatacaggttacggctatgtccgtcagcaggccgtacctggtaaatccggtatatctgcaaaccaggaataccacaaatgccagggggacatatttgatgctgcccttgaaattcgccataaggcgcatggtcagcatggatccgtacagacagggaagcacgtatcccagcgctttaagcaccggttccggcaccacctgaagcatggccgatcccaccaatataatcactgtcagcacaatcagactgaagaaaatggacatgcccacaccgataaccgttgccatctgtcccctgggactgctgttgtcagaatccgtggcgctctgcaccgccactgccaccggcacacgggtattgcccacgttgccggccagataagacatgtaggttccggctgcccccaggattggaaaatacgagataggttccgcaatccaccctcccacgccggctgcgcaggctgctgccgcgcaagccatgtaagcatccgccggggcagtgaatcccgcaacgaagtgcatatacaggacaggtgcaaacatcagtatgaatgcaatagccatggtagcccgtccaatcagatgcacctttttaacatatacattgctgtagtcttcctgaagctgttcctttgtcatcacgttattttcttccatgaccctacctcctataaacctgagtaataagccaccgtggcgcaaatcatacccgccagcatggcaatgctcattgtaaagtttccaagacttttcttgccggacttcttcacatattttgtcagtgcaaatgtacacaaggccgaagctgcgaaccccaccaggttaggtgaggacttggacgcgttattggcccccagatagaccaacagggccatcatagctgccagggagaaggcaggcaggaagctgcggctgctcttggcagcctttaccatggcgtcgtccataggcttgaccgtgataagagtattaataaggaagggcgcagagccaagtgtcatagtaaagaggcacaatgtcagggtgctctctgttatcccctctgttcccagtgtcacgcccaatgtggatgccgcaatctccgccatctgcgtttcataagcagctgaaccaatcactcccactctcataaatgacagcacaggtcctatcaggctgaccaggcccagggccaccacgataatggagcaggccggcgctatggcagatacacaaccaattttcataacagaacgcacttcatcttctgacaatacccggtgtttcttgttaaacatcagcgcattgcggatgaacaataccgcctggataattaccaggccaataattaaaaggcaaaacaaaaaacagattcggtttacagtgaccatggcttgactcatactcttttcttcctttctcgtttgtaaacttggtttacttattgtaaagttgctttactttatgtaaatattctataccttattttctccattgtcaatacgcaaaatacacttttctgattccctgaaatacggcccaagtgcggcccagggacgcacttcacataataatacaaaaaaagaaagcatctaaaaaagatgcttccggcttttcagataccttatacaattgactacttaaactcatccatctgcatatgataatcgctgtaggcctgcaggatttgaaatgcagactcaatctgctcttttgtgaagcgctgctccagataagagatgaacttgccaaaattttccgtgtcataagaccggtgcatttcatgaagctccagtcccttctcagtaggataatacaggaccttcttttcattataccgctcccgcccccggtagaggagtcctgagcgctccagcttcgtcagcatctgggtggctgccgcccgcgtcttattccagctgtgtgccagctcaatggcggatattcccggattctccaccacatatttcagaaagtggacctcagtggccgtatagctttcaccgttcccatactcatgggatgaattggatgcacggcagaaactggccgcacgatgcatgatatctgaagcctcaaatgttgtaaatgtatagtcatttcctccctgcgtcaatccctgttcctctctttttctattgtctcagataaaaatcttaattccattctatccagtttatgggcaaaagtcaacctttccctccgtaatatccccctcccgtccatccagtaaagataacaaaaaaatccgcagtcctcctgtccaacaggatttccgcggatttttcacttgattttttacctgagtatcggattgacaaatttcgcttggacttactgcccctttgaaaaaggattcagcattttgcttaccacttccgcctcagacgggccttcaaacagggtgcttccctggtccttggctggtatgccgtccaccctggagccgtcaattccgcccctcatctctacttcatgcttatagtcagccaggtatttttcgatggcgctgattttgtcctcaggcgcctccataccttccttagatagtcccatgatgtccatgaccgtatccagctcactggcatcccagtccttaagaactgtgtttgcgagaaactgaatccgctccctgattgaattgcacttcagaaattcttttaccatttttaagacctccaaacatatggaaatttcttgataccggctatactatactacttcgttaaaaagatgtcaattaaaaccgtaaaatttctgcgttattttatatcccagaatcaaaagttcccttccgcccttgccgggaaggttgcagccctgtcccagaaagcccattctgagccgcaggtaaaggggcagattctgctttttcaggtactgccacagctctttctttttctccaggttttcctctgttccggatttgatagccaggacagaacaaatggtcatcatgatttccaggtattgtatcatgtagtggcgcagcttcctgctgcttatcttcatggcatcataataacctaacatcagcttggtgacccgaatctgctggtcaatgcggccaatcatcacctcttcgttgacggactggtcctgccttccgatgtaatagcggtagaaattcacatccaggtaatagatatgcttcacatgaggcaggggctggtacacaaaaatattatccacataaaaggtatgtttgggaagctccagcccgcactggatcagcagacctgtcctgtaaataacagagtgcatcagtatatactgccctgtcatgaaaaacttcacgtcattccatccaaataccttgtcctttggaaatgccgtgtggtatttcatcacttttttccttctggccccttccttctcatagacaaagttggtaaccagcatgtccagggtctctcccccgtatacaaagcgcctcagggtatcaagaacctgtacatatgcctcctcattgacccagtcgtcgctgtccaccaccttaaagaaaatgcctgtggcatttttaagtcctgtgttcaccgcttccccatgcccgccgttttcctggtggatggcacggcagatagtgggatattcccgggcataccggtcagcaatttctcctgtcctgtctttggcggatccgtcatccacaatgatgatttccacttcctccccgcccgtaagcagggtgttgatacagtgctccatatagctttccgagttataacaggggattgccacagtcaataacttcacctttctacctcctcattatgagtacttagccaaacgctgccagggctgccagattggcggccccgtgcatcaatactgccatgggatacttgcggtattcgctgccttcatagccccatgccagcaccattcccaaaaggaatgcgtatgtgccttgaatccagtttccatgatatatcccaaaggccagggaggatatgaccgccgccggaagaaaggccatgaaacgcctcagccatccgtacagaaccaggcggaaggctccttcctccagaatgggagccaggaccaatgtcatccacagcagttccgctctccggtatatggccggaatcatggcctgctcataagatgataagagactgccgggccacggtataacattcaccagcagattgccggccagtgccgccgccgctgccgccagtacacgcttctgccaccctgggggcagaacctgttttccatccctcatacgcttcctgtccttctattcttattctgctgacagtatagcatggctccccgggttttgccaccatctttttactctttccattgcattttttcccatattaccctataataaacttaatttatatgacaattttaaagacaagcgaggtacggattatggcgaaaaaacgcatcgtaatggccatcggccacaaagatatgggaaccaatcttcctgaacaaaaggcagctgtggcaagaaccgccaaaatcatcgctgatttcatccaggagggatggcaggtagccattgtacacagcaacgctccccaggtaggcatgattcacacagccatgaatgaattcggcaaacagcatgacggttatagccaggctcccatgtctgtctgctccgccatgagccagggttatatcggatacgatcttcagaacggaatcagagctgaactcattaagagaggcatttacaaacctgtaagcactgtattgacccaggtgacagtggacccatacgatgaggccttctatacccccgtcaaagtcatcgggcgtgtgatgtccaaggaggaagcggacgccgaggaagcaaagggcaaccatgtaacagaagtggagggcggttaccgcagaatcgtagcatctccccatcctgttgccattgtggagatcgatgccgtcaaggctcttatggacgcagaccagattgtcattgcctgcggaggaggcggcattcctgtcatggaacagggctataacttaaggggcgccagcgccatcattgagaaggaccttgccaccggactgctggccaaggagatcgatgctgatgtgatgatgatactcaccagcgtggataatgttaccttaaactacggcacgccccaggaacagcccatcagccacatgaccatagaccaggccagggattatatcagccagggccagtttgaattcgcctccatgctgccaaaggtatctgcctccattgatttcctggagagcggaaaaggcagaaaggccatcatcaccaccctggataaggcaaaggacagcctgaaaggccatgcaggcacggtaattgaataaaaactttgatttaagcgctttgatttccataggaaaacagtaaaaaatccactaaccccaagtattttccaagggttaatggatttttttatataccttttatgcttctgccagcacccgctccgttatatagctgaccatctcatcctttttcatccccagagacagggccagttcggaatacagattatcctccgctgtcttaaaataccgctcgtccaaatccgtcatcttctttccctgctccaagcggtcctttctgcgcaggtacaatgcttttatcatgctgatccacacccggcagtcacaggtcttaagggcttccttataccgttcctcccgctgtttatcattggtcacctccatctccttcacatccgagattttgtcaatcagttcaagggcctcttctttggaaagaagcggcctggttatggttttctccgaatccacaggcgtcacaattttactgtcttgctgataatagggacggagtacataatacagccggtcctttggaccatcaggtctgtcgattgtgataatatccatcacctcgcagacgcccctgatgccgtatatgatatactgacctttctgatacataattttaccgcctacttcccttattttataatacttatattgtatcactaaaagggtgtcgatgtcagaagttttttggcgccgcctcaaattttgtaaaatatataccatggtgccgcctggttttttgtatacaataaccagttcattgttctttgcaggctcctgtccggtgtcagtcctcctttgcttccaccacagccagtatttcggtggcgctgccccccggaagctcattggctccaatggcaagtcttgccgcgattcccgcttctccatataaatcccggaacagccggctggccccgtctatgacctgcggctgatttccaaatcccttggcgcagcgcacatagctgataatctgtacaaactgttttactttatccaaatcgcccagttccgccttcagaacagacagaatattaagggcgcatatttgggcggacctctggccatcctctatggtcaaatcctcccccacaacgcccaccacctggcgcactccatggatgtccggcgtctgaccggcaatataaatcagattccccactcttcttgacggtgcatacaatccgttgggctttggcagctcaggaagttcaagtcccatttcccgcaatttctgttctactttcataaccttctccttatcatttttatattttctgcattctttatgcaaaggcgccgcatacagcagacgaaccaccatacccagcgccttcggcacaagccatttcgttaaacacgttcttctctatgatttccttttcattgccttacgcattctttaccgtagcaatgtcaatcagggtcagctccttggcccggttttccaggctggttaccagcgcattggccgtatccagggaggtcaggacattgacgcctgtttcgatggcattgcggcggatgatgaaaccgtcatggctgcgctctgcgccctgggccggaatgtcgataatcaggtcaatctgatgtcccagcaccaggtccaggatgttgggagattcctgctccagcttgcggatttcgtaagcctttacaccgttcttattcagtgtccgtgcagtacccctggtggcaaatatctgatatcccacagcagcaaacctgcgggcaatatccacggcctcctcctggtcgctgtggcgcacggacataatcattttcttgtattttggaagacggattcccgctccctcaaatgctttatagagcgcttcattgaacgtctttgcaatgcccagacactcgccggtggacttcatctcaggcccaaggctgatgtcagcgccccgaatcttctcaaaggagaacacaggcatcttgatggctatataatcagctgcgggctgcaatcccggtttatagcccagctcccggatggtatggccgcagataatccgggttgccagcggcacgatggggatgccggtaaccttgctgatatagggaaccgtccgcgaggaacggggattcacctcgatgatgtatacgtcgtcaccgtccacaatgaactgaatattaatcatgccctttacgtggagggctcttgccagcttctcagtgtagtccacaatggtgtcgatattgtgctgggtgatgtcctgggccggatacacggagatactgtcgccggagtggataccggtacgctctatatgctgcatgataccgggaatcaggatgtcggtgccgtcacagatggcatccacctctatttccttgcccatgatatacttgtcaaccagaatcggatgctcctgggctatctggttgataatgccgatgaattcgtcgatatcctcatcgcttatggcaatctgcataccctgtccgcccagcacgtaggatggcctcaccagcaccggatatccaagcttatgggctgcttcctttgcctcctcggccgtaaatacggtatgtcctgcgggccttggaatattgcactgctccaggatggcgtcaaagcgctccctgtcctctgccgcgtccacatcctctgcagccgtacccagaatgggaactcccatcttcatcagggcttccgtcagcttgatggctgtctgtccgccgaactgcaccactgcgccgtccggcttctcaatatccacgatgctctccacatcctccggggtaaggggttcaaaatacagcttatccgcaatatcaaagtccgtgctgacggtctccggattattgttgacaataatggtctcgtagccttccctgctgaatgcccaggtactgtggacagaacagaagtcaaattcaattccctgtccaatacggattgggccggaacccagaacaagcaccttcctgcgcccggtggtctgctcggcctcgttaaaacctccgaagcatgaataatagtaaggtgtctcggccgcaaactcagcggcgcaggtgtccaccatcttataaaccgcgcggataccattgtcatagcgcagcttctttatatcctcctgggaggttcccgtaagccttgcaattacattgtcgggatactcgattctcttggcctctgccagaagctctgccgtcagactcttttctcctgcgcccactgccttcagggcgtcctccatctccaccagaatggccagcttgtcaataaaccagaaatcaattttagtgatgtcgtgtatctgctcataggtgaatccgcggcgcagcgcctctgcaattctccagatgcgcatgtcatccaccctgtttaattcttcttccagtgtttcgtcggataggtccgtaaaatcataggacagcaggcagtccacatgctgttccagagaacggatggccttcatgagagcgccttcaaaattggtgcagatactcatgacctctcctgtggccttcatctgggtgcccagggtgcgctttgcgctgatgaatttgtcaaagggcagtcttggcatctttaccacgcagtagtccagcatgggctcaaagctggcatatgttttctttgtaaccgcatttctgatttcgtccagggtatatcccagggcgatcttggcagccaccttggcgatggggtatcccgttgccttgcttgccagggccgatgaacggcttacacggggatttacctcgataacacagtactcaaagctgtccggattcagggcgtactgcacgttgcagccgccggtgattcccagctcgctgatgatgttgagggcagaggtacggagcatctgatactccttgtcccccagggtctgggagggagccaccacaatgctgtctcctgtatggacgcctacagggtcaatgttctccatattacaaaccgtgattacattgcctgcgccgtcgcgcatcacctcgtactcgatttccttccatccggcgatgcagcgctccaccagcacctgtcccacacgggaaaggcgcagtccgttttccagtatttcagcgcactgttcaggattggcggcaataccgccgccggaaccgcccagagtgtatgcgggacgaagcactacaggatagccgattttttcggcaatctccagaccatgctttacatcctccacaatatcagagggagccacaggctcaccgattttctccatggtctccttgaacatctcgcggtcctcagccttcttgatggtcagggccgtggtgccgatcaagcgcacattgtgttctttaaagaaacctgcatcctccagctccatggccaggttaagacctgcctgtccgcccagggtgggcagcacgctgtccggcttctcttttaatataagctgctccaccacttccacggtaagaggctcgatatagacgcggtctgcgatgtccttgtctgtcatgatggttgccgggttggagttgagaagcacaacctcaattccctcttccttcagggaacggcaggcctgggtgcctgcgtaatcgaattctgccgcctgtccgatgataatggggccggatccaagcaccagtacttttttgatatcaggattctttggcatcagtcattcacctccatcattttaaggaaacggtcaaagaggtaaccggaatccaggggtccggggcatgcttccggatggtactgcaccgtgaagatattcttgcccacatactttaaaccctcgttggtgctgtcatttacattgacaaatgcggggactgccactgtcgggtccagattgtccgtatccaccacatagccatggttctgggaagaaatatatactcttcctgtctccaaatcctttacaggatggtttccgcctctgtgtccgtattttaatttatgggtatccatgccgttggccagggccatgagctggtgtcccagacagatggcaaagataggcacatctgattcataaagctttttcacttcccgtatgatggctgtattttcctttggatccccggggccgttgctgagcatgatgccgtcaggatttcctgccagcactttttctgcgggtgtgtcagccggataaaccgttacctcacatcccctctggttcagggaacgggcaatgtttctcttggcgccgtagtccagaagggcaacctttttaccgtttccgggaaggacgtatgtttctttagtggtggtcttaagcaccacgcctgtgacggtatactccttcatgcgcttaatgggctcgctaaaatcggtatattcctttgtagtaatcataccgttcatggtgcctttttctcttaatattttggtaagggctcttgtatcgataccgcagataccgggaatgtcgtgttcttttaagaagttttgaatggtatcctcgcttctgaaattgctggggattcttgataattctcttacaatatagccatccggccagggctttgctgactccatgtccttatggcagattccataattgccaataaggggatatgtcatgacaacggcctgtcctgcataggacggatcggtcagcacttccagataaccggtcattgacgtgttaaacacgatttcactgatgacttcacgttcagaaccaatgctggtcccggtgaacacagttccatcttccagtatgaggtatgctttcatatgggggtacctgtcctttcttatgtgtttgcttaagggccatgtgacctcagcccaaattgtaaagattatactgtatttcatatgaatttgcaatgactttaggagctaaatttttttgtgataatcaaatatttttttagtacaaagagggcagtatacagaccggacgaaacaagggccggaccaaaaatatgcgccctgcccttgtctctgatgtctgctttttatagggaatgtctgcctcccatccttcctccgcggcgccggtcctctgtcccgtgttctctgtctgctcccggaaaacctctcctgccaaaccggctgccacccccctgtccgcaggctcctccttcctccatccggggccagtgctccatcatcttctccaacagggaggacagctgctttttctcatcttctgtcagcccgtcaaacatggctctggctttcttcatatgttcttccctgaaattccgggctgcctccattcctgaatctgtcagttccagattcatctggcgcctgtccctttcattctgcctgcgcatgatataaccacacgtttctaccttattgagaatctcgctgagggaacctgactgcactcccagcatgtcctgaagctcccgctgtgtgatgattcccctttccgccagcatggccagtattctctgctggcctgtctttccgcccattccgtagcggaagaagtgggtacaggaacggaactggtacaaaaggatatcctccagggacatgtcttcccggttaagatgtccgggacatcttccatgaaacccatggccttgtccatgatgatgctcccgaaagtgttcaccctcgctgcggttttcctgaaagtaccgtgttccttttccgcattccagggcgtctgcctgacaatggttgggacagcatgggcagtagtcctgggtggtatcattattagaattactggtattgctggcattgctggcattgctgctattgccggcatgattggtattttccatcttgtccatttcatttctattctcgtccatatcgttctctccttatctcgctgatgccgccaatccatatcacaaccatctgattttttacttcatctgtcatcttagttattatctcaaatgccatccggttcctatatggtctgacggactaattaattagttaggtaccttgtgttttatagtttactcctgttttttctttttgtcaaggtaccttgttaattaattttaatttttcctgtccggtcatatccaccctcaccccgcccgcaaaaaaagcccgccgcaattaaaaacaagcccccggcagcaccgggggccatcatacctttcacttctttttcatcatgctgcaaaatcagattattacactaattccgcaatccgggtaattcccacataaatatgcgatattttataccatgtggcaaaatccaccactcctgtctggggcagtccgaagatagactggaattcccgcactgcgttcgctgttccggaaccgtatatcccgtcgggcgtcaccctgggaatggccgaataaaccgttgctatctcatccagctgttcctgcatctggcgcaccttatccccggagcttcctatggtcaggtcgctgccaggccaggaggccggtatcccggatatctgctccgctgtgtttacatagatgctgtccccgtaaaaatgtcgcagaatctcaatgggactgtagccctgctctccaagggagcatgacccccactgtgtcatccagttcggacactggacctggcgcccgtcacagtactgggtcaggataggctgtctcacacccggacgggacaggtagttatcaaatatctcatccacgatcaggctgatgctctcgaatatattccttccatatatccacttgtggtcaaaggcagtggaggacgtgatggtgaaatcatagccctggttcctgtaccactcagtgtatacccggttcagggtaaaggacatgattgccagcacattggctgttatggtggccctgggccaggtggaatatatttcgctggatgccacattttttatgtagtccctgtagggcacataatagtccttggccgtactgtccgttggcaccccgtcatggaccaccacggtttgaggcactaccacccggctgagtacgatttccccgctctcgttcactggttttatctctggttccgctatctttgggggataattcccgtacagggtatgatccggtatcaccaccgggtcttcgggaggtgtttccccgccaaccggtgtcatgactgccggctgtatggccgtggcctgggccagtatctcggtgcctgatatggccagaggctcaaagccctctgcctccaccatcaggttatattctgaatagggctggataatgcttggttccagactgtattccacagggggcgccggaagctgcacctgctctgtctggcctgaactgttggtggtcagctgctccaccgtgcggtccggttctcctttatagctgatagtgaccctggcgttctgtatgggaaaattattctgtatgttgattacgttaatctgcagcagtccactggatgtccgttctggattggttgccatgtaatacctcgcagtttcttttcattacctaaatataatactgcccagcctattatatgcatgtattttcccctaaacctgaaaagtgcagcttaggggcaggcaccggcacgctacagctcatattccttaatccgcaaataggcacgtatggcttccatggccccctctgttcccagggatgccgtgttcagcatcaggtcgtagttctccacattttcccaatcgcggcctgtgtagtaccggtggtaatccctccgctccctgtcaatgcgcttgatgttcttcctgatatccctgggctcataatagcccagatcgctgattcgcttttcccggtattccatatccgcgtacaggaatactcttaccagaccttccgcgccctccagcacatagtcggcacagcgccccatgataacacagctctcctccgccgccagctttcgtataacctcggactggaaccggaacagattgtccgccgacaccaggtcggagccaaaggaaggacttcccttttccggggtcaggctcttgacaatcttatacaaaagcttgtttcccgccttctcgtctgccagatagtaatagctctccttgataccgctttggtctgaattcatgcgcaggatattcttgtcatagaaatggattcccagttccttggccagcctggcgccgatttcactgccgccgctgccgtactgtctgccaatggtcacaatgagtttctttccttccttcatacgcccatcctcctgttctgacagcgcaggcccacgcctgcttccatggtttgttttcatggtttcattatagcacaatgcgccctgagatttaaccgttattccaaaaatccttcttgacataccgccgcacagtgcttataataacactcaattgaataatatcttcagggcagggtgcaattccctaccggtggtacagcccacgagccgcaaggcatgattcggtgaaactccgaagccgacagtacagtctggatgaaagaagatggaacgatgacatggacgcgcttatgcgctttttgtggctggttgaaagtgccctggaatgaactatcattccagggcttttgtgtacctcccacccccatgccctccatatggcacagaaactgtgccttgggttttatattttctgccttgaacgataccggttcaaggcattttttatagctgtttttacagctgtgaaccaggggacaggccatggctgcgccatgcgtgtcccaacatttgtaaaggaggcaccgcattgaacgattctgattacatgtccatcgcactgaaactggccagaaagggctgcaaaaaggtcagccccaatcccatggcgggtgctgtcattgtcagggagggccgtatcatcggacagggcagccacctttatttcggcgggccccatgcagagcggaatgcccttgcatccctgaccgaatctcccaggggcgcaaccctgtatgtaaccctggagccctgctgccatcacggcaagaccccgccctgcacggatgccatcatagaaagcggcatccgccgggtggtcataggcacaagggatcccaatcccatggtatccggcaagggcaccaaaatcttaataaccaacggcattgaagtgacagaaggtattctggaagaagaatgcagggaactcaaccacgtattcttccactacataaagaccggccggccccttgttatcatgaaatatgccatgacactggatggcaagacagccacctttgccgggcattcccgatggattaccggggagagagcgcgccgaagggtccatgaggacagaagcaggtattctgctgtcatgtgcggtgtgggaaccatactggccgatgattccctgcttacatgccgtctcccggataccaggaatccggtgcggattatctgcgattcacagcttcgcacaccgccggattcccaggtcgctgcaacctgctcccaggccaggaccatactggccacctgctgtcctgacagggaagcatggcttccctatgaagaaaagggctgtgaaatcctcctccttccgccccgtgagggacgcgtggatctgaatgccctcacagaacgcctgggacagatgggcattgacagcgtcctgctggaaggcggttccaccctcaactggtccgccctgaaccagggaatcgtaaacagagtgcaggcctatatttcccccggactctttggaggcgcaaccgccaaaacacctgtgggaggcagaggggcggaattcccataccagggcttttccctgggaaagaccaaaatcacggtcctggaccaggacattcttatcgaaggggagttgatgccatgttcacaggaatcatagaggaaaccggaatcctgatgtctgttaagggcggtttatccggttcccgcctggccgtcaaagcagacagagtcctggaggacattcaaaaaggagacagcattgccgtcaacggcgtctgccttaccgcatattcctttgattccggctgtttttatgcggatgtaatgcctgaaaccctgaagcgttccaatctcgcccgtcttcccgtgggaagtccccttaacctggaacgggccatgacggcaggcggcaggttcggcggacatattgtgtcaggccatattgacggcaccgggaccattgtgagtattgtccgggacggcaacgccctgtggtacaccgtccgctctgacccgtccatcctgcgccgcatcatcgaaaagggttccattgccatagacggagtcagcctgacggttgcccgggtaagggatcaggatttttgcgtatccctgattccccatacagccttctgtaccactctgggaaccctgaaaccaggctgcgtggtcaatctggaaaacgactgtgtggggaaatatatcgaaaaattcataaaaatccccccgccattccactgcacagaaggggcggatagcaaaagcacggggaccggcagccgaatcacgccggaactgctcaaacaatatggattttgagcggcgccagtaccggacagcaaataaacgaatcattaaaaacaggacacctgaattgtccccattaaaaacaaggaggatttatcgcaccatggaaggattcaacaccataaaaggattcagcaccatagaagaagtactggacgaactgcgccagggaaaaatcgtactggtgacagacgatgaaaacagggaaaatgagggcgattttatctgcgccgcccaacatgcaaccacggaaaacgtgaatttcatggcagtgcacggcaaaggccttatctgcatgcccatgagcccggaactgtgtacaaggcttaagcttccccagatggtatcccacaattccgacaaccacgagacagcctttactgtttccattgaccacataagtacctccaccggcatttccgcggccgaacggggcgtaacggccagacagtgtgtaaatgcccggtcccggcctgaggatttccggcgtcccggccacatgtttccgctggcagccagaaaaaacggagtgctggaacgggccggacataccgaagccaccgttgacctgatgcgcctggccggtctcagtgaatgcgggctctgctgtgaaatcatgaaggaggatggaaccatgatgcggatgccccagctccttaagctggccggacaatggaatatgaaaatcaccaccatcaaggccctccagaactaccgcaaacagcacgataagcttgtggaatgcgctgccgtcacccatatgccaacccgtttcggcacctttaaagcttacggctacaggaacctgctgaacggggaacatcatgtagctttggtaaaaggagagatcggggacggccgggacttgttatgccgggtccactcggaatgcctgaccggcgacgcctttggctccctgcgctgcgactgcggacagcagtttgccgctgccatggcccggattgagcaggaaggccggggagttctcctctacatgcgccaggaaggccggggcatcgggcttctcaataaactccgggcctatgaatttcaggaccagggcatggataccctggaagccaatctggctctgggttttccgggggatttgagggaatattttataggagcacagatattaagagacctgggagccaggagcctgcggcttctgaccaataacccggataaggtataccagctctcgggttttggcctggaaatcaaagaacgggtgcctatccggatggcgccaacggttcatgatctgttctatctaaagacaaaggagcagcgcatgggacatttaatgcactattaaaaacctgattcatgattgagaaacttcattattaagaaactgccatctatccagaataggagaatccgccatgtatatattagaaggaaaacttgttcctaaaaaaataagggtaggcattgtcgcctcccgtttcaacgaattcattacctccaggcttctgtccggcgccctggactgcctgcggcgccatgaggtgccggaggacgatatcaccgtggcttgggttccgggcgcctttgagataccgctcatcgcctcccgcatggctgccagcagacggtatgacgctgtcatatgcctgggcgccgtaatccgtggcagcaccagccactatgactatgtgtgcagcgaggtctccaagggcattgcccaggcatcccttgccgccaaaatcccggttatgttcggcgtgctgaccactgaaaacattgagcaggccattgaacgtgccgggaccaaagcaggcaacaagggctatgactgcgctgcgggagccatcgagatggtaaatctgatacatgaactggacaaaagaacggcggataacagcttatccgtcacgcccttcgtccaggaggaaccttgccgcccatagcacgctgattataaatgcttcttcagctcatccagcactgcctccatatccagaggcttcaccagataaccgttcatgcctgcctcataggccctggccttatcctcctcaaaggcattggccgtcatggccagtatgggaactctgtccgtgttctcatcctccatggcgcggatggttctggtggcctccagtccgtccatccggggcatgcgtatatccatgagcacagcggaaaaatatccggcccctctggacttatacaggttcactgcctcctggccgtcctctgcggtttccacctccatgccccgcatctccagaagggttctggcaatctcacggttcagctcgttgtcatctgccagcagcacccggcagcccgaaaagtcctcccgctccttttcagcacccttctcttctgatcggttcactgcccgggcaaaagcatcgtatatggtactcccaaacaacggctttgaaatgaaacagtttacccccgcatttctggcctcatcctcgatgcggctccagtcgtaggcggatatcataataatggtggtatccggcccaactaaagcccgaatgcgcctggctgtttccacaccgtccatatcaggcatcttccagtcgatcatggcaatatcgtaatgcctgttctcttccagcagacgctgtacctcctccacagccctgaaaccggaatccacccagagggattgggccccggccttctcaagtatggatgtggcctggctgcccaccagcgggtcgtcatccaccaccagcacggccaggccctgaagcagctcccgcttctttctctggcgctccatctcctggtcatcctccgccagtttaaagggcagtgtgaccgtaaatacggatcccttttctttctcactttccacctcaatgctgccgcccatgagctggaccagattatatacaatggaaagacccagaccgcttccaatgttgttgcgggctgtttccggcgcctcctgttcaaacggcatgaacaggcggctgcggaactccctggacatcccgattcctgtatccttcacctggaacctcagataggaaaatccatttgtccgcttctgctcctcaatctgaatctgaatccttcctcctgcccgtgtgaatttcagcgcattggacagcaggttcatgagaatctgtttcaggcgcagcggatctcctatataaaactgctccaaaggctcgctgtggtaaatcacatactcaatctgccgctcttccgactggggatatataatctgattcacctcgtccatcagctccgtaaaatcaaagtattcgtgggccagctccattttaccggtctcaatcttagacatatccaggatatcattaatcaaagagagcaggtacctggaggaagcgtcaattttacagaagcaatcctggacacttcttctgtcatctaacttcagctgcccgatggtgctcatacccacaatggcgttcatgggcgtgcggatgtcgtggctcattctggacagaaaatcggatttagcctggttagcagccttggccgatgccagggcatcccgcagcagctgctcctgccgggcctgctccgccctctggctgtccagcaccttcaccaattcaatggccagcacatcgtcgttaaagggattctccacataaataatctgcacagacagccagtggtacttgccgtccattcccatcttctgaaactccatgtagatgtcccgttctccggcggcaaacctggccaggacgttctctctggcaaaggccgtttcaaaatcctcccgataggatggatacacatcgggaatatccccctttatcatctccgtgtagcttccacagcgcccggacagacaagcgtcctggtcctctataaaacaattataaatatcctttgtcaggttcaggctcataatcaggggataggccgtacagatcgccgccctgagtgaacggttctctatgagctgctgcctttcctgctccaactccagctgttttatatccgtcacatccgtaaagacagcctgtataacctcctgaccgtccgcattgacaatacggcccatgatgacgctgatccatatctgcttcccatctctgctgaaggtatggcgtatataagatgccgtatccccattcagcgccagtccccctataatgccctcaatccactccttgtcttcatccagcaccatctgaaagggattctttacctcacgtctgtattcctcctcggagctatatccgtagagctcccaccccatccggttcacatttacaatccggtgcccttcccctctctcaaactgtataatgccgcagggcactgaattgtacagctggctcaggaaccgggcctgctgtatgtatttctgctcacgccggcgcagctccccctccagctccagataagtacgctttcctgattccgccggaaacagttcatcctcttgtatttcaccaaacggcatggagttgtggatatgaatggtctccagcgcctcacccttttcccggaaaataaaggtaattctctgctgtgtcctgatatacacgcctgttccctccctggactcaagctcactgacaccctcacaaagccacaggccggctcccatctccatgacttcgtactgctcatcaaacatattgcaggaagacagctcatcctttccttccctaaaccaggcggccacggcatcacgtccctctgccttctgcatctttccaccgcccagccatatgatatcatccgcaaatgtagatatgagaagttccacatcattctcacagaaatacgaagaaagaatgcgcctggcaaactcccttacttcttctgatgaccattttttcatttaaatcctcccctaatctgaagcatccggcatcctggaccagctgcggccccatatgaggattaccaaaaaagctgcccgctgatcaagaatgacccgaagggcagcaacgttcactctaatatatgatcctataacaaatccgaataaaatgcaaatccattcttaccttttctcttcaccgcatatgccgccttatccgctttctccaccagggcggcaatattagtcccatctgccggatacatggatatgccgatgctgcatgtaacgcagaagtcatggaaatccctgtccattacactgcggacagaggcacatatcctttggacacactgacgcacacccgccggtgagttgaccggatggagcagggcaaggaactcgtcccctccaacgcgcccgctcaggtccgacgctctcagtgttttcttaaggactcccgccacctcctgaagcagcaaatcccccttgatatggcccagggtgtcattgatcaccttaaaattatccaaatccataaacaggaccgcggctattccatcctccccttccagacgttccgcaatcatgtctttcaccgcctggttataaaggcctgtgagaggatcggtctgagcctgcataagagccctttggagaagcttgttctgacgcttctgttccagataaatgtccgtgacatcggtccttgtcatcagcaccatctggttctctttatcataataaagatactgcagcctctttcgggtataccccctctgagagtccataacgccgcagtaaaaacagtgttcccctgtccggtccagctcctccagcacgcggcttatacgcatttcacagattgccagctcctgatcctccggggctatgtatttcctcacatatgtctcaatggctttctcatagtcatcacagtgatcgggcggaagaagcgtaccgtcccctttgctgctgaacatgacataactgttattcctggcattgagataaatgaaataatcgcagtggctgtatacataccgctccacaattccctttaagaggtgctgctcgctggtatcccgcatggccagatataccttgtccggcatatcctcccgcctgaacagcatggcgtttacctctgcccacctgaaggtttccccatccgcggaataccggacctccagggacatgttcttctgcccgttcccccatacttcccgcatgtgtttaagggaaaaggttcctgcaaatatatccctgtccccgtgataaatgacgttgctgcataaatatcccaccatcctcccccactgaaaggagcgcagggccatatccggcatagggatacactgaataatggtcccgattcccaggtccagatccagctcagcaatccctatataggcatccaggaacacaccaaacaaatcacggttcatctgcataagcctggccgcattccggctttcaatatccacggtgtaaaacagagccttatccctgccgcaggcatcacatgaaaaaagggttcccctgacccagcgttcacgtcctccctgctgcatcctccggaattccccctgttttccgattttatgggcacatacctcatccagactctgacggctgaacagtgccaaaaaaccagccctgtcctcctcacagacaaataattctgccgctgcccggacatccatctcgcctgtcccgcaagccgcatccccctttaccggagtcaggaaaatgggcctgagaatcctttctgccacatccacttcaaagaattcatcgcaggcatccttaaggacaaatgcatatagatccattttcaccgggtccactaccacatggttcatattcattccctcccggcggccgtgtgcactgccgtttctaacgttctgtaatgtattatatgtattttatcatcatccccaccctccgtcaatgacccgccggcacggattggatgaaagaggaaccggacttcagggacaaaaaagatgtttcctccagggaatcatgcccggcggaaacatcctgtttcgcatacgctgcttcatttattacttcattatatattatttcataaatgtatggcctcatatatcatcattataataaacagtcccttcctccattacctgaaacaccccttgttccagggaaagaaccgtgactgcacagtttttctgaaccggccccttccagaacgcatccggggcaatcccgtctatgatgcacaccatttcccgtatcagggcgccgtgtccgcagaccagcacatggtccatctgttcctccagaggtttaagctcctgctccagaaactcccggcagcgctttctcaaatcatcataggtctccccgcccttagggggtacgtaggcggagggatgggaaaaataacggtgaagccgtaaaaacggcagtctgtgaatcaatgccagcagctggccctccctgtttccatagctgatttccaaaagcctggaatcctccatcaggggaagtccgcgctgtccgcttatgagctctgccgtgcgcctggcacgggacaatggactggtatagatccgtttaaatgggatatctttcattttctgtccggtgaggaaggccagggcctcccccttctcattgaggggaatatcggcctggccctgtatcttccccctgcggttccactccgtctctccatgtctaaccagataaaccttcaacctctcctcctgcctggttcattacatcctgataaccgccttgatcacctcatccttgtggttcaggctgtaatccactccctctatgacatccttaaaatcaaaggtatgggatacaatcttcttaagcggtataagtcccttgctgacagcactgatagcggacggatacaggttgcggtaacggtatacagagtaaatggttccctccatggcattcagcgtggctatatccagctccagtaccggctcaggcgaaacgcccacaagggtaatctttccggccctcttaatcagacggcatgtctgaagggtggtgatacggtttccggcgcactcatagacctggtccacgccgcctcccggaagcgttttcacaaactcctctatattctcatttctgctgttaaataccctggtagcccccagttccctggccttctccagacgcttatccagcacatccgccacatatatctcgctgactccccgtgcctttaaggacataagggtaacgaggccgatacacccagctcccagcaccactgccgtctctcccagctttgcattggacagctcacaagcgtgcatacccacggccagcggttccatgagaccgccctccatggtggagacattgtccggaagcttgaaggtcatgctggctgcatgggtacagtactctgaaaataccccgtccttctcgccgggaatagccataaaccgcacagacctgcagaggttataatgtcccttaaggcagtcctcacaatgaccgcagggaactcccggctccagggccaccctgtccccaatctcaaatccggtcacgccctctccgattgcgcttactactccgccaggctcatgtcccagcaccaggggaccgtccggcacccagttggccaggcgtccctctgaataaaagtgcaggtcggaaccgcacacgcctacatactccagtttaatctgcagttctcccggacctggctgtggaatctccctctcacaccactccattttcttttttcctgtcataaccgctactttcattgttccttccatatcaaagcccttctttcatttataatccaacggtttcctatatccttaaatattaagtactcctgttacgatctggtcagcacggtacctaccgcagccctccatccatcctgcttttgacgtctggcatcctggtccatggctggttcaaacactctccgcttcatctttccgaatatgcttctgtcaaagaatcccagggccagcccggccgcataggctgctccgataccagacagctcctccgcatccggtacaagaacccggatatcaagaatatcgctctgaaactgcatcagataccggttcctggtggggcctccgtccacccggagctcttcaatcctgactcccgcatcctggctcatggcctccaccacatccgcaatctgataggcaatacactccagtccggccttcaccagctccggtgttctggtcttgcgggtaatgccaacaatggctgccctggcctcgctgtcccagtaaggcgctccgatgcctgtaaaagcaggcaccagataggtggtatcatcctcattggcctgtctggcaagaccttctgtctcagaggcagacgcaatcagcttcaaatcatccttcagccaggtaatgaccgctcctgtataattgatatttccctccagtacataattcaccctgccgtccatgccccaggccagggaggttaccacaccgtgggtacttatgaccggcttttctccaatgttcatcataatggaagagcccgtgccgtatgtagtcttaatcatccccttttccaggcagccctggccaaacagggctccgtgggaatcccccagcacgccgtggataggtatgggattgttcaggtaaccctctaaatccgtatccccaaaccatgcattggaatcgcacacctgggccagggcatttgcaggaatcccaaacagactgcacagcccctcatcccattccaggctgtgtatgttgaacagctgagtcctggaagcattggaataatctgttttaaaggatgctcctccggtcagccggtagaccaggtagctgtctatggtccccaggcaaagagttccctcggacgctttttgcggcgcctcctttacgttctccatgaaccacgccagttttgaggccggaaagtagggagacagattgattcctgttgtacggcgcacccattccgccttcccggactcctccacccgcgcacagatatcctttgccctggaacactgccacacaatggcatctgccagcggatggccgtctgtcctgtcccagacagccgatgtctccctctggttgctgattcccagccccgccacctgttctctgcgaatccccgccttttcaatcacatccctcaccaccttaagggtgttggagtagatttcatttaaatcatgggatacccaccctgcatcgtttataatctgccggtggggccggtctcccctgcatatcaggtttccctcctggtcaaacagcagggccttggttccctgggtgctctggtcaactgataaaagatactgcttttccattgcttctcccttccttttagagctgtctcagattagagctgcctcagaagttcctgtacccttcgggcaattccctgcccggtcaggccgtagtattcaaacacctctgccgatgtgcccgtaatgacaggttcatccggaaggcttaagttcaccaccatccttggacaacaggcagataccacctggctcaccctggagcccagcccgccaaagggcgcgtgttcctccacagtcaccaccagcctggctgctccggctgccttttggaccgcctcctcatccagaggcttcacacagtacatatccaccacacctgcgctgattcctgattccccaagcagacgccctgcatccagcgcaggctttaccatctccccgcaggcaatgattgccacatcccctccccgggaaaggaccgtggccttatccatggaaaagggtacatttccctcctcatagatatcctccaccgcgttcctgcccacacggatataggcaggcttatcgtcctttaacagctccttcaccaggcaggctgtctggaaacggtcgcttggaagataaaccctcatattaggtatggcggacagggccgctatgtcctgggccgaatggtggctcatgcccagcgctccgtagctgacgcccccgctgatgccgatgagttttacattggtattggaatacgctgcatccaccttaatctgttcatagcttctggtgctgagaaagcaggccggggaagccgcaaagggttttttaccgcattttgccagtcctgccgacacgctgaccagattttgttcagcaatgcccatttccacaaactggtccgggcaggcatccgcaaaaggagtcagggatgcggaacccctggaatcactgcacagcaccacaatatctttatcctcctttacagcctccatcagcgtgtcacagatggccttcctgttgggtattttattcatgaagcagggcctcctttcttttttcaaaatcccggatgatttcactgtattcctgggctgtgggaaccttgtgatgccatgcagccttattctccatcacaggagagccgcacccctttactgtattggcgataagtacggtgggttttcctttcactgtcttggcttcctcgaaggctgcgtccagctggtctatgtcatttccgtccgccacgtcaatcacatgccatccaaagcttcggaaacgctcatgcaggtcatcgtggcccatgacatcctccgtacacccggaaatctgcagccggttcctgtccaccacggcgcacaggttatccaggcagtaatggctggctgccatagcgccttcccacacagagccctctgccagctccccgtcccccatgaccacatagacacggtagtccttccggtccatctttcccgccatggccattcccacacagaccggaagaccgtggcccagggaaccggaattcatctcgattcccggaagcttgttgttgggatgaccgatgaattttgagccgaattggctgaaagtggaaatgacctcctccatgggaaagaatccctttttcgccaataccgcataatagctttccacggaatggcctttgctgagcacaaagcggtcacggttgtccagatctttattttcagggcttatattcatctgtttcatatacagctccaccagaatctccatgatactcatgtcgcccccgatatgcccgccctttcccgcgataatcatatccaccacatgttttctcaagtcatacgaaaggaccttaagttcgttcattttttcctccttctctactttaccgacttcctgaaccggtcaagacccactgccagcagaaggaccacgcccatgcacacctgctgccagtatgtgtttacattcaggatggtaagcccattctggagtacggagataaagatggctccaatcagggtacccaccatgcttccgataccgccctttgtgaggctggctccgcctatgacggcagcagcgattgcgtacatctcataggactggcctgcgatgggctggcctgaattcagacgccccatatacacgatgccgctgagcgccgcacagaatccagacagcacaaaggcagccagtgtgaccctttttacattgatgccggaaagccttgccgactccgaattatcacccaccgcgcagaccttgcgccctgccgtggtcttttgcagggccacatgccctatcatatagacaatggcgatgagccagacgatatttggtatgtaaagtatacttcccatggcaaagctggtcattccctggggcagccccaccactgcctggcctcccgtatacaggtatgccattccccgaaacagccacatggtggaaagcgtcacgatgaagggcggaaagcccagataagccaccaggcttccgttaaacagtcccagcaggataccggtcagcagcacagccgccacgcccagtcccacattgccggttcccaccataagggtagcgcccacacaggaggacaatgccagggacgcgcccacggaaatatcaatgtttccggaaatgatgacataggtcatacccactgctatgatggcattggtaccgctctgaatcaggatgttcctgatattgctgggggtgagaaatatgttgctgagagcggtaaacaccactaccaggatgacaagccccagaacggttcccaggcttcctgtcaaaagttttttcaatgaaatattcttagctttatccactgcgcttaccttcccttcgtcgtaatgtgcctgagcacattgttctgttctatctcttccgcttccaattcaccggttatctagcctttggacataacgataatacggtcgctgaccgataccagctcgttgacctccgaggaaatgacgatggctgcctttccctcctgcgccgcaaaattcctgattaactggtgtatctcggcctttgcggccacgtcgatgccccttgtgggctcatcgaagatgagaaggttgcagcctgcgtggagccacttggcaatggccaccttctgctggtttcccccgcttagatttaccacctgggtggcggatgtgcctttggttttcagcatttttatgtaattgtccgatacctcccggacccttttccagttcatgaacccgcgtctgctgaccgccgtcatgtcacagtgaatggtattttcctcgatcttcagccccagggacagtccgtcctccttgcggttctcactcaggtatcccagccccgcatcaatggcctgtctggtattcgtaatccgcctggcctttccggaaacctttataacgccgccctttaaagggtccgcgccgcataccatccgggccagttctgtccgcttggaacctaccagtcccccgattcccagcacctccccctggtatacagtcaggttcaaatcctggatgaatccgccgtccgtaatatgctccagctccagaagaggaatgctttttgccttgtcccgtctggtgcgcccgcctcccattggctggctaagcacctttccgctcatcatcataatgacatcgtccggcgtgctggtcctgacatcggatgagcccaccagttttccgtctctcatgacgattgccctgtcgcatatcctgaatatctcatccagacggtgggatatgtatatggtggtgattcctctggcctttaaggtcccgataatttcaaagagctgttctgattcctcatgggtcagggaggtggtgggttcatccataatgagcaccttgcagtccacggccagggccttggctatctccaccatctgcttttccggcagggacaaatctcctacccggcccctggggtcaatgtgtcccgcattcagcttcgccagctgttcctttgtatccgcgtacattttcctgaaatcaatgaggtttcccaccttcctgggctcatgggacacatatacattttccatgacattcatctctgacataaggcttaattcctggtagatgatagccacaccgaatcccctggcctccagggtggaatactgtttgggaaggggacgtccgtccaggacgatgtcccctccatcccgcgtataggcaccgcttaaaattttcatcagcgtggacttgcccgcgccgttttcccccatgagggcgactacctcgccctcatagaagtccatggaaacatcgtccagggccctgacgcccggaaattccttcacaatatgcttaaactccaatataggtttggaatgttccatattttacttctccaatccgcccgttcccggggctgttcttcctggcagttccctgattttaatatcccttttcggtaagacctctgagcgggaaccgctctgcggcgtactcataaatggtctggtctgtcagcccgtccacaaactcgcctgtaaccagggtgcagtcataaagaatttccctgtcgtagtggtaatcactgttcataaccagagccgttgccagtttcacgcccatggcgccttcatccaggttaggaagtgacacaaacgcatccagatcaccgtccatggtcatgttcaccgcatccagaattccgtcatatcccaccagaatcaggtcatctgccttcttgcccgctgccttggccgcattgaccatgcccactgccatctggtcgttgcaggcaaatatggcttttacgttgggattcgctgtcaggatgttggtagtcacgtcagctgccttatcgctggaccactcggctccctgttccgcaaccaccttgatttccggatattccgcacaggcctgcatgaatccggcatgacggtcaacgcctgtggactgttccatcagtcctgtgatgatagcaacctcgccttccccgcccagctgctcgcatatgtacttacctgccttgtaggctccggccacatcgtcgccgcccacaaaagcgtcaatcacgcttgtatcgctgattcgcgtatcaaagttcactatttttattcctgcttccctggccttcttgatggccggaatcacgccgtccgagctggccgccgagaccacaatggcgtctgccttcttctcaatggcagcctcaatcatggatacctgcttctccaggtccacttcctcctggggaatggcaatggtcagatccacgcccagattatctgctgtctgctgcgcaaaatcagatacggaaatccaccagggattgttcaatgtctttcccacccagtaaacgctgataccctcttttttctcagttcccgcttccgcctccttggcattgtcattggtggcggatgccgcttccaatccattggacgtacaggctgccagactcaggaccgccagaccggttaacaggatgcttactactcttttcttcattgtgttcctccttttgatgtgagaaaaatggtttctgcacatatgccctgtgatttaactaaatttaattaagttattgttttgtgcattataaccatttattctctttgttaatgggtttccttgtgcttgttacacgtaatatagcaggttatacctttggtgtcaatagtttttcactaaattttaattaatttaattaaatcaaaaataaatttttaacgatatttacttaatataattaagttcacaagggttaaagacaaaaaaagagcatatacagcattaaatgccgtacatgcttctgcatatcttctgtttttgatttggtttaatccgttatttttttcacacttccgcgtttcaccaggctggttcctatctccaccttcagggactgttctctcccctggtccaggcgggaaatcagcagatccacggcagccggtccaaatatatcctttggcacgttaatcgtggtcagctgaggctccaccagggtactgatgggccggttgtcaaaccccaccacggaaatatcctccggtatccggtatccgcattcctgcatggccctgattgcgctgcatccaatcaggtcattttccgcaaagaaagccgtgggaaggcgtttgcggccctccaggtatttcttcacgtcccgcttcacatcctcctcggaataccccacgtcaaccacatactccttgttgaaaatgcctcccaggctcctgagcttgtgcttgaaggcattataccgctcgtcaaagctgttgatcctgaccttgctgcggatatatccaatctcccggtgccccatgccgcacagataggacaccgccttgctggtaccctgtacattgttgatggacaccgcatccacatcgttttcctgaaatgagttgtccaggatggcaaatggaatctgggattccttgaacagctggaggtcgtcataatacatttccaccgcaaagatgatgaggcctttatatccgcctgatttaatctggtgttcctgctccgtcctgggcatggttttattgatgtagaggaagttaagggtatatccgtaatggttgatacggttattgattccctccaggatatatgtgaaaaaaggggactcatccacgatgctcccctcacgtttatagaccacgaacccaatggaaccattattgattctctgttccttcagcatgtatccgcagtccatttcttttattttctgaatgatttcctgacggcgtttctcacccacccctggtttgttgtttaataccagagaaaccgtagccgtggacacccccagcatttccgctatatcttttgctctcagcgccatttgcagaccccctttgccatacaattaagttgattttactaaattattaactaaattgcaataccaaaaggcattccggatatgtccacgcatctccggacatatccgcaacagcactaaattcttccgctgcccatctccagcagcttcgcgctcccgctctcaagggtggccctaagattcagaatgcgctggttggacgatccccggaaggggaggctgatatccttaagggcctccacaaaccgcccgtccaccagcacgtcaatcatggacagcatccggtccgtatagccgcacctggcccggctgtccctcagaaggtcctgttccagggtatatcctgtataacaccacaggttcttctgcggatagcgctccctcaccttttccaaaaaaggcaccagcgccttctggttctccggctcaaagggttctccccccagaagggtgaggccctctatataatccggcgcaagggcgtccaggatttcctcctccgtctcccctgtaaagggtttcccgaagccgaaatcccacgcctcttcgttaaaacagcccggacagtggtgggtacaccctgacacaaacagggataccctcacgcctacgccgttggcaatatcgttcttcttgattgtaccgtaattcatcttataaatggagcaccctttccttgatttcctgggtcctgccctggttccagaactgagttccgatgtagccgcaggttctcctggccacattcagcttgttctcgtcccggttgccgcacttggggcattcccacaccagcttgccgctctcatccgtcacgatctgaatctcgccgtcaaatccgcactcctggcagaaatcgctcttggtatttaactctgcgtacatgatattgtcgtagatataccgtatgatccccagcacggccggaatattgttctgcatgttgggcacctccacgtagctgatggctccgcctgtggaaagagcctggaactgcgactcaaatttcagctttgagaaggcatctatttcctcggaaacatttacgtgatagctgttggtgatatagcttctgtccgtcacgccctctatgatgccgaaacgcttctggaggcatttggcaaacttataggtagtgctctctatgggcgatccatagatgctgaacccgatgttagtctcatccttccagcggttgcaggccttattcatgtactccatgacctccagggcaaagggagtagtctcctggtcggtatgggactttccggtcatgtacttcacgcactcatagagtcccgcatatcccagagaaatggtggaatagcctccgtaaaggagcctgtcaatggtttcgcccttcttaagccttgccagggcgccgttctgccagagaatgggcgccgcatcggacagcgtgcctctcagacggttgtggcggcacatcagtgcccggtagcaaagatccagcctctcgtcaaaaatcttccagaaagccttcatgtctccgccggaggacagggccacatccaccaggttaatggtcaccactccctggttgaaacggccgtagaatttataatttccattttcatccttccaggggcttaaggcgctgcggcatcccatgacagggaagcagttaccttcctttaattccatcatcttcttctcggaaatatagtcgggaacaaggcgcttggccgtacatttggcagccatctcggtcaggtaataatactcggttccctcgttgacattgtcctcctccagcacataaatcagcttgggaaatgccggagtaatccacacgcccgactcattcttcaccccctggtagcgctgcttcagagtctcctcgataatcatggccaggtcctttttctcccgctcgttcttagcctcattcaggtacatgaacacggtcaggaagggggcctgtccgttggtggtcatcagcgtgatgacctgatactggatggtctggacacccttggtaacctccttgcggagcctgttttccaccacttcgtgtatggcttcctcggaaggcatgcagccaaaggtcttaacctcctcctggacctccgcgtatattttctttctggatacgtccacaaagggagccagatgggccaggctgatgctctgcccgccatactggttgctggctacctgggcgataatctgagtggcgatgttgcaggccgtggaaaagctgtggggcttctcaatcctggtctcgctgataaccgtgccgttctgcagcatgtcctccaggttcaccaggtcgcagttgtgcatgtgctgggcaaaataatcggagtcatggaaatggatgatgccctccttgtcagcctccacgatgtcctggggaaggagcatcctcttggtcaggtccttgctgacctccccggccatgtaatccctctgcacactgttgaccgttggattcttgttggaattctcctgcttcacatcctcattattgcactcaatcagggacagaatgcggttatccgttgtattggccttgcgtataagggagcgctgatagcggtatctcacataatcctttgcaagctcaaatgcgcctgtagacatgatctggttctccaccatatcctggatctcctcaacggacacagccctgttaagctttacacacttgtactccacataatccgcaatgtccttaatctgctccagactcagcttgttttttccggcagccgtattggcctttgccacagccaccacgatcttattgttgtcaaaatcctcttccgcgccattcctcttaataatcttcatcgtcactacactccttttatcctaatgctctccctcgctgcctgtcttcaggtaaacggtttaaaggcatcttatcacagaatactggaaaaatctgttgcttgtgcaacagtataagattttaccactaaatgttgtgtttttcaagaggaagtatacgataagatgtatttcagaaaaataagacaattggctgaaatcccggccgaacctggtgatatgtctgacagcaaaaaggcgcccaggcagtcacctgcctgggatgtattatactgttccagtatctcaatcaccgcagaaccctccggctcccgcacagctctcccgctccaccatgtggtggggaacaatgattttcgttgccaccagctccggattttccacatggcttatcatctgggcggctgcctcgattcccagctggcaggcattcacatccacggatgtcaggggcggaaaggtgagtctggcgagaagggaattgttaaaggacaggatggacacatcccccggtatggacagccccagaccaatacatgccttctccagggccactgccagtatgtcgtcgctgaccagtacggccgtgggtctgtcctcccttgcgaacagggccgccagggcctggtcctgctcctccggcacagaaggcacctccacgcacagctggccgtcaaaaggaatcccccgctctgccagggccagcatataccccattttcctgtcgtggttataaagaagagaatggtccccggacaggcaggcaatccttacatggcccagatttaacaggtactccgccgcctccctgcccgcaagcacattgtcgttatccacatagatggtctggttcacattccggcacgcttttccaatgagcacatacagcagtccctcttcatagagataatccagaaccgggtcctgctccctggagtagagcacgataaatccctctgccaggccggttctcgccatggtctttatggcctggaggatctcatcctcattctgtcccgtaatcacggtattgatgtactgcttctggttgcagtactggctgattccccgtatcatctccaggtagaatggattctggtaagcctcccactccgacgggggcagaatgattcccacggtgcgggaattctgggtcgccagactgctggcctgaaaattcggttcatagcccagcttcgccatggcctgcctgaccttttccttggtctggcggctgatagagggatggtccttgcaagtacggcttacggtggatggcgacacccctgcaagggcagccacgtctttgattgtaacaggcataaacagcctccttaatatgcgtctcattttcatcgtcacagggatatatatgaacctatggtccggagccgctctcaggctccttccaccagttccatcaccgcagttcatacacgcccttcctatattgtaaagtttaatgcaatttttgtcaactcgtttgcgctctgtttgcgcaatcttcccctgactttttgcattccgctccggaaaaattgcacaaatacctgagagtatttttgtccaaaacgtagaaaacacaggattttgaaaatatctattgcattcttcatgcagccagactatatttaatgcaagcggttgcgcaaacagtgcaacaattaaactcaggaggttacatatgaacaagaacactgacggctgtattggaatcaggattctctcccctttaaccggaacagcggtccctttggaggaagtgccggaccctgtattctcacagaaaatcataggagacggcgttgctatcctgccccgggacggcaatctggtcagtcccattgacggggaggtggtttccatagcagagaccctccatgcctatggcctgcgttccgaggacggcatcgaggtcatggtccacttcggtctggagaccgtggccttaaagggagaatgcttccagtgctgtgtaaagatcggagataaggtgaaggccggcagccttctggcaaaggccgacttaaaagcccttgaagaaaaacaggtcaacaccatcacgcctgtccttatctgcggcggaatggaaggccgttccatgaatgccttcacaggtcctgtaaaggcaggagccgatactgtgataacggttttagaccattgcccgccggacgcagccgaagaagctgatgcagcctccccccataatccggacactgccccagctgcaaatacgtcttcccccgcagacgctgcggacaggaaagccggaaagcccaaaaaatccctgatcaattttgactttctccaaaagctgggcaaggtcctgatgacagtcattgccgtcatgcccgcagccggactgatgatcagcgtaggaaagctcatacagatggccggcggggatatgggagctgtccttacaatcggaagcaccatggagaccataggctgggccgtaatcaacaacctgcacattctgtttgctgttgccatcggcggctcctgggcaaaggaacgggccggcggcgcttttgcggctgtcattgcctttatcctcatcaatgttattaccggcgctctctttggtgtcagcagcgccgacttaaacgaccctgccgccgtgacccggaccctgctgggccaggaaatcctggtaaacggatacttcacctcggtcctgggagctcccgcgctgaacatgggcgtgttcgtgggcattatatcaggctttgcaggaggagttatttacaataaatattacaattacaggaagctgccggacgccctggccttctttaacggaaaacgctttgttcccatggtagtcatcctctggtccgtcatcatctcactggtgctggccattgtctggcctgtggttcagaccggcatcaactccttcggcgtgtggattgccaactcctcctccacctcgcctgtgctggccccctttatctacggaaccctggaaaggcttctcctccccttcggcctgcaccatatgctgaccatacccatgaattacacctccttcggaggcacgtacaccatcctcacgggcgtcaacgcaggttcccaggtttttggtcaggatccgctgtggctggcctgggcaacagaccttatcaaccttaaggacgcgggagacatggccgggtaccagaacctgctggccaccatcacccctgcccgtttcaaggtaggacagatgattggcgccactggccttcttctgggcattgccctggccatgtaccgccgcgtggacccggataagcgccgcaattaccgctccatgttcatctccactgtactggccgtatttctcacaggtgtcacagagcctctggaattcatgtttatgttctgcgcccttccgctgtatctggtatacgcagtgctgcagggatgcgcttttgccatggccggcctcatccacctcaggcttcattcctttggcaacctggaattcctgacgcgtgttcccatgtccatccgcgcaggacttggcggagacctggtaaacttcatcctctgtgtggctgtattctttgccgcaggatacgcaatcgcctattttatgataggaaggttccattttgccaccccgggcagactgggcaactataccgacgactctgtctcagagaacagccagggccgggccggttttgcatcatccggtgacagccaggccggacgcatcatctcccttctgggcggcagggataacattgtcctggtggacgcctgcatgacccgtctgcgcgtcacggtaaaggacgtggataaggttgccggactgccccaatggaaggcagagggcgccatgggtctgattaaaaaggacggcggcatccaggccatctacggaccgaaagcagatgtgctcaaatccgatatcaatgatatactgtaaacaggccgctgccatccacccaccgcagctgccttctgtaactgaaaaccaccggaggcaggtagtatgaaaataataacgcttaacacacacagtctggcggagccggaatatgaatccaagctcgccgcctttgccggatcccttgtccaaatcaaaccggatatcatagccctccaggaggtcaaccagtccaggagcgctccgcccgcagcctccggctggctgcgggaatccggctatgttccctgctgtgccaaagacttaaacacagtctccccctgcgcctcccgggcagtcatacgcgcagacaaccacgcccttaacctggcgttgctcctggcccgggccggtgtttcctaccagtggacctggaccccggccaaggtaggatacgggatatacgacgagggtctggccgtcctcagccgttcccccatactggggaccagccagttttacatcaccggcattcgggattatgaaaactggaaaacccgaaaaatacttggaatcaacacccggacagaatacggaaatgaatatttttacagtgtccacatgggttggtggaatgacagcgaagaaccctttgagggacaatggaaccgcataagcagcggcctgtcccccttagcagaagaacgtctgtggctcatgggggatttcaactcaccggcccacataaccggccagggacgggacctgattctggcctcaggctggtttgacgcatatgacctggctgcttccagggattcaggcgtcactgtggcaaatgccattgacggatggcgggaacagggagagataccgggaatgcgtattgattacatctggaccagccgcagggtgccggttatttcctcccgaaccatatacgacggcacatcctttcccgttgtatcagaccattttggaatcatcacagaatattaaacaggacaatgcctgcaaaaaggagcatatagatatgaaacgagaaagcggaatcttactatccatcaccagccttccctccaaatacggaatcggctgcttttcaaaggaggcctacgaattcgtggaccgtttaaaggaggccggccagtcctactggcagattctccccctggggcccaccagttacggggattccccctaccagtccttttccacctttgcaggcaatccctatttcattagtctggaggaccttatacaggaaggcgtccttacagaggaagaatgcagccgggctgacttcggcagccggccggattttgtggactatgcaaaggtctacgaagagcggtaccccctgctgagaaaagcctatgagaggagcagcataagcctggacccggagtttcggaaattcagggatgaaaacagatggtggctggaggattacgcccttttcatggcagtaaaggcccggttcaaaggaactgcctggacccggtgggcacaggacatccgcctgcgctggcagaacgccctggattactaccggagggagctatactacgacatagaattccatcaataccttcagttcaaattcagccagcagtggaaaaaactaaaatcctatgccaatgccaacggaatccgcatcataggggacattcccatctatgtggccatggacagcgccgacacatgggcccatcctgaactctttgagctggaccgggacaatataccgaccgcagttgcaggctgccctcctgacggcttttccgccacaggacagctctggggaaatcccctgtaccgctgggaataccaccgcagcacaggctatgaatggtggctggccaggctggcctactgctataaactgtatgatgtggtaaggattgaccatttccgcggatttgaccagtactactccattccggccggctccggcactgccgtcggaggccattgggagcagggaccgggaatcggcttcttccacaccgtgcgcagcgccctgggagaaaaggaaatcattgccgaggatctgggatacgtgacagactccgtcaggcagcttgtaaaggacagcggattcccgggcatgaaggtactggaattcgcctttgattccagggattccggctgcgccagcgattatcttccccataactaccctgaaaactgtgtggcctacaccggcacccatgacaatgaaaccatcaaaggatggtatgcctccatcacagcccaggaacggaagctggccagggattatctctgtgacagctgtacccccgccagccgtctgcacatgtcctttatcagcctgattatgcgcagccaggccagaatgtgcatcatcccccttcaggattatatgggcctggacaatgactgccgcatcaacaccccctccactgtgggcaccaactggagatggcgccttcttcccggccagatgtcggatccgttagtgaaaaccatttcctccgtcacactgcgctacgggcgctggaactggtgatatgtaaagctgccgcaggccaaatccatgagaatttggcctgcggcattaacctgtctatatttagaaattatttacaattaaattcatcagtatatggcccgttccctcaccagcacagtgggatatcccatgtttcttaagttcctctccatctgtaccgcatagtccatattgaggaaagcgccaacccttaccttgtacagtccgtcgtcgtaaaccaggaaggccggaaggccgctggcctggagttcattcaccagcctgtctgccggcatcctggtgcggaaggctcctacctggacctgataatattccggtctctgcgcctcctgctgccggatggtttccagcacaccgtctgctatggcctgggcaatggcatcaaaattctcatcaaaaaaccggttgtcatccggattatcaataaatcccgcttccaccagcacagcaggcatctgtgtctttcgcagcacgataagaccggggcgctcctgtactcccaggtccctgaaccctgtttccaccagattgcgctggatattatccgccagcatggccggcacacctgcatcctcatacaccagcgtcatggcgccgcttgcagttcccggtaccgggaatgcattccggtgaatggacacaaaataatcggcccctgactggtttgctatccgggctttctcaagaggcgtgtcgtatacatccgtggtccttgtatataccacatccaccccattattttccaatatccgtcctatggcaagagccagccgcagggtatcgtctttttcccggcgcccgtcgtacatggcgcccggctcttcgccgccgtggccggcatcaattatgactctcttaacatctgtcataccagattctccttcatatatgactctacattataccatatgtgaaagtaagacaaatgttgactgaacctggaactaaatttcgtccacatccactcctctgggaccaacatgggtggaaaatacgatttgtgtgcttgtcctgccgaatttctgcagctgtcctatgaacatatccagctccatggtactcttaaaggctacctttaacagcatggaaaatcctccggtgacacagctgcactccagtatatggggcacctcccgggcataggcatagaactgctccttgtcctcgggtatcacctccaggttaatgtatgccagtatgtgataccccagcttcaccgggtccacagaggcatggtagcctgttatgataccctccttttccaggcgttcaatcctggctgataccgccggagaggatagaaacgtattctctgcgatggtctttagggaaacccttgcattgtcctgtaaaagctttagtatcttgcggtcaatctcatccatattacccttttcctccctgttctcctgcccctgttacctcctgagggcctttatccgttttacagcctccaccgtattctcgtaggttccaaaggccgtcaggcggaaataaccctcgccgctgggcccgaagccgcttcccggtgttcccaccacattggcctgttccagaagatagtcaaaaaactcccagctgtccatcccgtcctccaccttaagccagatgtagggcgaattgattcccccaaatacggtgtagcccgcctccttaagcccttcatagataaccatggcattcctcttataatacgccacctgctccatgacctgccggctgccctcttcggaatatacggcctcaccggctctctgctcaatatagggggctccgttgaacttggtgccgtggcgtctggcccacagcgaatgcagcattacatccccgcactttaaatccttcggaaccacggtaaatcccagacgaacgcctgtgaacccggctttttttgagaaggaacggaactcaatggcacaggttctggctccctctatctcaaatatgctgtgaggcacatcctcctcggatatataagcctcgtaagcagcatcatagagaatcacggcccctgccctgtttgcatagtccacccacacctttaactggtccctggtcagcgtggtgcctgtggggttattgggcacacacaggtaaataagatccggcgtctcctgcggaagctccggcacaaaatgattctgcgccgtacagggcatgtagatcacattgctccacatgcccgtgtcagggtcatagctgcctgtacggcccgccatgacattggaatccacatacacgggatacacagggtcgcacaccgcaatgcggctgtcctcgctgaatatctcctggatattgccgcagtcgcttttggctccgtccgatacaaatatctcgtctgcctccacatggcagccccataacctgtaatccttttccacaatggtctcccgtaaaaaggcataacccaaatccggcgcatagccgtgaaatgtcttggcctgtcccatctcgtccgccgccttgtgaatggcttccacaatggccggggcaatgggaagtgtcacatccccgattcccagccgtataacctgcctgtccgggttagcctcttcatatgcagccacttttttcgcaatggcggaaaagagatagcttcccggcagcttcaaataattctcgttgatcttaaacatgtgtgcttcctcctggcctctgcctgtctgaaatatgaaaacacccccaaaaaccggatacgccctttgccgcaggatacagcgccatgtcttttccatgtccgccgccgtgccgcaaaaggtgtaccaggacgcgcgccgtcgcgcgtctggttcctgagagtgtatattgaacatttttcgctttaaagtattaactgataaaattcgccttatcaatcataatatatttcttcgggtatgtcaatagagccccggaacacctccacggccggccctgtcataaacagatggcccgactccctttcataccgtatcaccagttttcctccgcgcagagccacctccgcctcatcctccgtatatcccatgaggatggaggccatgacgctggccgtggcgcctgtgccgcacgcccaggtttcgccgcttccccgctcccacacccgcatctcaaggtgcttacggtccgccacatggataaactccgtattcacacggtcaggcgcgaaccgctcatggttctcaaaggccggtccaatccgctccaaatccagacagtccacctggtccacataatagattgcatggggatttcccacgttgattcctacaaaccggtattccttcccgtctaccgtgatatcctccggcagcctggatgtgagggctgcttcccccatgtccacggtaacggacactgcctttccatcctcaatttccagctccagcgtcttgatccctgccagtgtctccactgtgatggtccttttatccctatccaccagaccatggtcgtaaacgtatttacccacgcagcgcacaccgttgccgcacatgattccctgggacccgtccgcgttgtacatctccattctgcagtccgctgtccgggaggggcatatgagaatcaatccgtcggacccgatgccgaaatggcggtcgctcacatagatggctgtctttgccggatccctcaccgtctccttaaaacagtccacatacacataatcattacctgttccctgcatttttgtaaattccatatccgtctccatcctgccgtattaccggcattctaatcattctttcccttatccgtccccgtcacacatggatgaggctgattaccatctgtgctgtctccaccagattggtgccgctgtccatgctgcatttctgtatatatctgtgggcttccgactccgtcatattgttccgttccatcagcagcgtctttgcctctgttatgatatcctgctcctccctgctgcgctcctttggcctgcttcttctccttctgcggatcctctcctgggcctgcaccatcatctccagggtatttaagaggtcgtggaccttaaggggcatgggcaggcagataaccctgtccgggcactgtccgccccacctggcaggcgatgaaatcagaagcatgtcaaaatctcccggcaggcactggcgcagctcgtcgtacatcatatcctcaaaccggtaaccgctcaccacgattcccccgttcagacagtccgcagccgacagggcctgaccgcctgaggtgcagactgccactacctggaaaccgtttcggaccaatatgctctttatattcttcccgtcctccggcttggaaaacgctacgatgatgttagtcacatgtcccacctccaggtaaaaccttattcacaactgccggcgccatcagtatttatacagatactggctcacttcccaatccgttacctgagcccggaaatccctccattcctgctccttggcctccagatatttggtgtaaatgtgctctcccagcacctccttcataaaaacatccccgctgtatgcctcgatggcgtccccaagggtttcgggaatccgctccacgttgcgttccctcagttcctccggctccatggtgaacatatttccctccacacatgcaggaagtccggttttcttttcaattccgtccagtcccgccgacaggcaggccgccagggccagatacggattcatggcagaatccgggcaccgcagttcaatgcgcgtactctcccctctgggggatggtatacgaatcagggaactgcggttggaggtaggtgaccaggcaatataaatgggcgcatcgaatcccggaatcagccgtttataggaattcacaagcggatttgtcaggatggtcatggccttcatgtgcttaagaatgccggccatgaaataataggcgtccctgctcagcctcaaagcatcctggtcatccgcaaacaggttcctgccctccttgtctgacagcgacatattgatatgcatgccggatccgttcataccctctctgggcttcggcataaaggtggcatggagtccgtggcgctttgctatggtctttgccgccatcttaaaggtcatgatattgtccgcagcccgaagcgcgtccgtgtactggaaatcaatctcatgctgggccggcgcaatctcatgatggctggcctccacctgaaatcccatctcctccaggttcagcacaatatccctgcggacattttccgccaggtcaatgggagacacgtcaaaatatcccgccatctcatgtgtgctggtagtgggccttccctcctcgtccgtgtgaaagagaaagaattcacattccggacccacattgagcacatatcccatgtcctgcgcccgcttgacagcccgtttgagcacatacctcggatcgccggaaaacggggtcccgtccgggttatacacgtcgcagataaacctggccaccttgccctgctggggcctccacggaaagacctcaaaggtatccaaatccggatacaggtacatatccgactcgtcaatcctcacaaacccttcaatggcagatccgtcgaacatgcagcggttatccaacgccttttcaagctggctggcggtgatggccacattcttaagcattccgaagatatccgtaaactggaggcggataaactccacatcctcctcttccaccatacgcatgatgtcctctttactgtatttgctcataataatctccctctcttgcaaactgtgatacccacaaacacgcagaggcgggaacctattaccatgctcccgcctccttaaaatccaccgggcagggacagagcccccttaagacgccctcgtcatccttcccttacccctgctttttgttataaaaaatatatcagcagatatttcatttgtcaatgaatttcctctatttttttgatatcactttaacgcgcgaagctgttctgtgaaatggcttcccagtttgacggcacccacatatcccacatctccggtcatgtggaccacaccttccccgtcaatctccagctccagggtgcctcccggcatctgcacaaacatcttgggatccgtaagccccagacggtaggccgcagccgcagccgcacagcagccgctgccggaagccagtgtgtagcccgctccccgttcgtacacttcggtctggatatgggtccggtccagtaccttcatgatttgtgtgttgattttctccgggaactgcctggcgctctcagaataccttccaatcctgcacaccaaatcctttgaaatctcatccataaggataacgcagtggggattgccgatggacaggcaggtaacaggatagggaatccggccaaacaccatggtctcgttgatgatttccctgcggggtccctccaccggcacatcgtcgctccagaaggatacctttcccatggatgcctttaaccgggtgccctcctcgttcagataatgaatggacgcctcgccgccctgggaggaaatggtaaaatcttttttctgtacataccctgcgtcctttaaatatttggcaaaaatccggaccccgtttccgctcttttgcgccacactgccgtccggattccataccaccatggaaatctgctcaccgtccagaacaggtccctccagaatcccgtcggcacccaccccgaaattgcggttgcacataagctgtacattggaaggggtcagcttcagtttgtttttattggggtcgtataccagataatcatttcccagtccatgatatttttccactacaatcctcatatagatatcctccctgtctgcggtctgttttagcggtactcattgccggctcctgactcactccgccggctgttaactttaccattattttatcaagcattttttgataataatatagatatattgctattttatattgcaaataatgctgtatttattttatacttaaaatatccccacaaacaatgtttccatcacacggagacacggcatgcaaaaaggaggtaacggttccatgcccatcacagatgacgcccctgcgtttgagcgccagggattcctgaaagaggacttccggctgttccatttaaaagataaggtaagtccctgctatgaattccactatcacgatttcctgaaaatcatggtgctgctggagggaaaggtcaactatgtcatagaaggacgctcctattcccttcacccctttgatattgtgctggtggggcgggggcagatccaccggcccgaggtggacccggggcagccctatgagcggcagatcctttacctgtcccaggattttctggaccggcacagagaaaacgaagattccctggaccggtgttttgccacggcagcctaccgtcattctaatgttctcaggctgaagaaggaggtccgggcgaacatgctctcccttttaaagcagctggaacgctcccagaactggcagcaggaagagtttgccggtcccctcatgagccgccttttatgcctggaatttctggtggagctgaacagggcctccatggatgacaaggcccagtaccttcccacgggtgtcttaaactaccgggtctccggccttatatcctatataaatgaacatctggacgaggacctgagcatcgggacactgtcctccttaagctgcatcagcccgtaccatatgatgcgtattttcaaagaagaaacaggatgtaccataggaaattacatcaccgaaaagcgcctgatttatgccagggacctgctgggtgagggggtaaatgccacggacgcctgcttccgttccggcttcagccattactccacctttctcagggcctacaaaaatcacttccaacagctgccaaaacggaatcctggcactaaaatataaagtatttcctgaattttcttgaattttttctgatttctgttataatatactcattgttttcctattgaggacagttgtctttgtgaggtgaacacgcaaaacaaactggtccaggataaattcaatgaaacaggaggaatgtattatgagaatcagaaaagtagcagcagtgaccatggcggcatgcctggcagccagtgccctggcagggtgcggcagcaagaaatcagacgaaaaagtcatcaaaatcggcgtgttcgagccgaccaccggtgagaacggaggcggaggctatcaggaagtactgggtatccgctatgccaacgagatgcaccccaccgtcaacataggcggcgaagaatatgctgtcaggctggtggaggtagataacaaatccgataagaccgaggctgtgaacgcggcccagaagctggtaagcgaaaaggtcagcgtggtgctgggaagctacggctccggcgtgtccattgcagccggacagatcttcgcagacgccaagattccggccatcggctgttcctgtaccaacccacaggtaaccgagggaaatgattattatttccgtgtatgcttcatcgaccccttccagggcacggtcatggcgaattacgcattccagaacggcgcaaagagcgctgccgtgattacccagctgggcgatgactattcctctggtcttggatcctattttaaggaagcctttgcaaaattgggcggcaacattgtcagcgaggaacagttccagacaaaccagactgatttcaaggccatcctgaccaacataaaggcggctgaccccgacatcatctttgccccgtcctccatcaccactgccccgttaatcatcaagcaggccagggagctgggaatcacggctaccattgctgccggcgatacatgggagaactccaccatcatcgagaacgcgggcgccgactctgaaggagtcgtaatctccaccttctttgacgaggcggaaccggctaacgacgaggctgcggccttcatcaagggcttcaaggaatatctggtaaaggaaaagcaggaagacattatcccggctgtctccgccctgggttacgattcctacctggctgccatcaaggccatagaggacgcaggatccaccgataccaccgccatccgcgacgcccttaagaatgtagagattgacggcgtaacaggaaacatcacatttaatgagaccggcgatgccaacaaagatatcgcgttcattaagaccatcaaggacggcaggttccagttcctgaccaccactactgtggaatagggcatctggcgaattacatatggatacagggctgcaggtggcaaacgctgctgcctttagtcttaaccagccttggacgttccagggctggttgcatgttttaacggatttctggatacggaccttactataaaaacacaggaggcagactcatatgagtttaacaacatttcttcagcaatgcctgaccggcatctcccttggcggggcctatgcgctcattgccataggctataccctggtctacggcatcctccgcctcatcaatttcgctcacggcgatatcttcatgatggccggatactttatgatttttgcaatggcaagcctgccatggttcattgccattcccgtcaccctgattgtgaccattcttctgggcgtcaccatagagcgggtggcctaccgccccttgcgatccgcacccagaatgtctgttatgatttcagccatcggcgtttcctaccttttgcagaatctggccacctacctctttaccgccctgcccaaagggtatccggagattcctttcttaaagaaaatcttccggataggcggactgtccgcctcctttgtcaccttcctgacccctgtcctgaccctggtgctggtctatcttctcattctgctgattaaccacaccaaaataggcatggccatgagggcggtttccaaggattacgagacagcctcccttatgggcattaaaatcaataagaccatcacctttaccttcgcagtggggtccctgctggccggtatcggatccattttatattttacggaccgtatgaccgtattccccttctccggcgcccttccgggcttaaaatgctttgtggctgccgtgttcggaggaatcggcagcattcccggagctgtcatcggaggctttatcctggggcttggagagacagccctggtggccatgggacagtctaccttcagcgatgcatttacgtttatcctgttgattgtcatgcttctcatccgtcccacaggactctttggtgagaagacgaccgataaagtgtgaggtggcggacatgaagaatatgacaaagaacaagaacaaactatataccctcattgccctggtaataatcatcggtttccttgcattcctgcagtctgacactgccgaatacagctaccagatatccattctggagagaagcgccatctatgcggtggtggctgtttccatgaacctgctgaccggctttacgggcctgttctccctgggccaggcaggatttatggccatcggcgcctacgtggttgccatctttaccatcccggtgggatccagggccagcgtatactatgtaagcggcatatcaccggtcattgccaatatccagctgcccatccccgtggccctgctccttggcggactggcggcagcagccatggctgcccttatcggaatcccggtactgcgcttaaagagcgattatcttgccatcgcaacccttggcttttcggaaattatccgggcgttcattgcagcccccatgtttgacaccattaccaacggttcctacggtcttaagagtataccgggctttcccaatatctttgcggtattcggcctggccgccctgtgtattgccctgatggtgcttctcattaactcctcctacggcagggcatttaaatccatccgggaggacgaggtagctgcccagtccatgggaatcaacctctttcattacaaggagctttcctttgtgatttcctccttcttcacaggagtgggaggcggaatgctggccatgtttatgcgatccattgactccaaaaccttccaggtagcccttacatatgatatcctgctgattgtggtcttaggcggcatcggcagcgttacaggcagcgtggcaggcgcattcctggtcaccgcaggcagggagctgctgcgcttcttcgacgatccactgaccattgccggggtaagtgttcccctgttccgctccggattccgtatggtcattttctccatccttttgatggcggttgtgctcttctacagccgcggtatcatgggaaaccacgaattctcctgggacggactgttccggctcatacggggcattcccggcaagtttaagagaggcaggaaaaagccctcttccgccaagaagggaggcatccactgatgaacaacatggaaaacagcgtaaaaaatgtactgcatatggagagcatcaccatgcagttcggcggcgtcgtggcagtgaacggactgaccctggatgtaaatgaacacgaaatcgtggccctcatcgggcccaacggggcaggcaaaaccactgctttcaactgtgtcacaggtatttaccagcccacctttggttccgtatcctttaacggtgaggtcatactggccgatacgccccagggcaaaatgcggcgcctctatgagggcgatataacccccacggacctgactcccgtacgcaagacaccggaccaggttaccaagctgggcattgccaggaccttccagaacatccgtctcttcggcgccctgactgtctttgaaaacgtcctgattgccaaacatatgcgggcaaagcagaatgtgttttcagccacactgcgcctcaaccatgctgaggaaaaacgcatgcgcgaagagtccatggagcttctggaaatgcagggactggcccatttaaagaacgaaatcgcctcctccctgccctacggactccagcgccgtctggagattgccagagccctggccaccagtcccagcctgctccttctggatgaaccggcggccggcatgaatccacaggaaacccaggacctgactgattttatccacaaaatcagggacgattaccacctgaccatcttcatgatagagcaccacatggatttggtcatgcagatatcagaccgcatttacgtgctggatttcggcaagctcatagcccacggcacgcccgaccaggtccagaacaatccaaaagtaatagaagcatatctgggggtgagtgaagatgctgaagattaatgatttaagagtaaattacggcggtatcgaggctgtaaagggaatcagctttgaggtaccggagaaatccattgtcaccctcataggcgccaatggagcaggcaaaagcaccaccctgcgggccatcgcaggacttgtaaaagcctcggcaggctccatccagtttgacggtacagagctgttaggcatggatacccctgatattgtgtcaaagggcatcacccttgtccctgagggcaggcgggtgttcccggacatgaccgttatcgagaacataaaaatcggagcctatttgagaaccgattccctggaccaagatatagaatgggtctacagcctgttccccaggttaaaggagcgcagctggcagttagccggcactctgtcaggaggggagcagcagatgctggccgtggccagggcccttatgagccatccaaagctgatgatgatggatgagccgtcccttggcctggcccctctcattgtccaggatatattcaacatcataaaggaaatcaacaaacagggcgtgaccattcttctgattgagcagaacgccaacatggccctgcgtattgctgaccagggttatgtgctggaaacaggccggatttccctgtcaggcaccggcagggagctgctggcagatgagtctgtgaaggcggcttatctggggaagaaaaagaaataagacgtgtaaaggccgggaagcgatgctccccggcctttgatctatagttctatcacttatatcacagagtttcactacaaactggtatacccataagcattcaccaacgcatccagcttccgtccctgcttacacagagggcagtccctgtagtcataatacgtataatccggcaaatccttcctgccaaaaatagatgtaatcctgaatccgttgagctcctccaatgcgctgaaaatagcggtaatggctctcagattgccgccgtaataccggatggactcgattcccttgttcagtgccaggcctgtggtcacggacgcggtcaggatgatgacattcttatcccgaatcatgggaagtatgttctccttgaatatcatctggctgttgctgttgaactccggagtcacgatgtagatagtcttatgggcattcatggagagaacaccggcgctggtcagttcctcagccaggaaactgcccacgacctgggttccctcaagacacacaatggtatctaccaccgtgtcatagaggaacagccccgacaagctccttgctatctcctgggcctcgctgagcctggtctttaaggtggtcatatccagataataattgatatgggcatggttggtggcaaagtgtcccggtgtaaccttaagcggtgcattacagccggtggtatgtatcttaacatacttattatccataaaaacgcccccttttacaatggtacggacatcggtttctatatgtattattatactaaataatcctccccggtacaagggctatccggctgtcttaccattttctgctaaaaattacgaacatcctgcgatgttcccgcccttccctccatcctataaaacaggcgccggggctgcttccccgcagccccggcgcctgttgcttttatgattcaatgctacagatttctgtcatttccaggatgactccacactgtatcctcggttttcttctccggctcattgcctctgtctgaaacctccggtcctgactggtttcccggatttgactgtgtctgcggattggcctgttcctctggattcacctgctcctgcggattggcctgttcctctgggtttacctgctcctgcggattggcctgttctgcctgattctcccgctctccccggtcagcctgggtttccgggtttgcatgaagctcctgcgaagccgtgcctttgtcatcatcctcttttggttcctccggctcaggaatacccttaaccctgcggaatatcttcatgaattccttgccggtaattgtctccttgtcaatgaggaatgcggcaatctggtccatggcatccttgttatcgctcaggaggcgaatggcctcatcgtaggaatccttcagtatcttcatgacctcctggtcaatctcggctgccgttgcatcaccgcagtttaatacggcccggcctgtcaggtactggttctcctgggattcaagtcccataaggccgaatttatcagacataccgtactgggtaaccatggccctggccaggttggtggcctgctggatatcgttggccgctcccgtggtaactgtctcaaatacgatttcctcggcggcacggccggccatcagctctaccagcctggcctccagctccttcttcgtgttgaggtacttctcctcctcaggcacattcataacatatccgagagcgcccatggtcctcggcacaatggtaatcttctgcaccggctccgaatgcttctggagcgcgcttacaagagcgtggcccacctcatgataggatacaatgcggcgctcttccttgctcatgatacggtccttcttttctttacccacaagaaccacttccaccgcctcaaacaaatccttctgggacactgcgttgcgcccgtgcttaaccgcattgatggctgcctcgttcatcatgttggcaaggtcggcgcccactgcgcctgatgtggccagggctatctccttaaagtctacggattcgtccagaagcacatccttggaatgtaccttcagtatattgatacggccgttcaggtccggcttatccaccaccacgcggcggtcaaagcgtccgggacgaagaagggccggatccaggacctcaggacggttggtggcgcccagcaccagaagtcccttggtggaatcaaatccgtccatctcggaaagaagctggttcagggtctgttcacgctcgtcgttgccgcccatacggctgtcacggctgcgtccaatggcgtcaatctcatcaataaagataatacatggagcattctcagtggcgttcttaaacaaatcacggacacgggacgcgcccacgcccacgaacatttccacaaagtcagaaccggaaagggaataaaaaggcacatgggcttcgcctgccactgccttggcaagcagggtcttaccagttccgggagggcccactaggagggcgcccttgggcagcttggcaccaatctttgtgtatttgcccggattgtggaggaaatccacgatttctgtcagcgactccttggcctcgtcctcaccggccacatccttgaaggtgatgccggtttccttctggacgtacatcttggcattggacttgcccacgcccatgattccgccgccgcccatgcgcttcatggtgaagttcataaggaacagcaggaacaggaatgggacagcgtaattcagcaggaccagaagaagggtgctgctgtcgctcttctcacggttggtaaccacgttattatccagtatcctgttgacgaaatcataatccccttccagtctcaccacataataatccagattctgggaatacttagtattacccttcttagggatgaccgtgatttccgtgctgcccaccttgatggagtccacctcgccggcttccaccatctggacgaactcattataggacaactcctgacgtttcttggaattcagatagttgttcatactgctgaccacgataaatgtaagtatggcagcaaccaccagcatggttatggtctgccagttacttttcatattcgggtcctgtttgttattattatccatattgtacaaattctccctctgaatgggtcatctatcaatttccagcaaaaacccattctctaccattatagtgtcagtctccccataaatcaagaaaagaacaattaattttcttaaatttttacaaaaagtcctagatttattctcaatgaggatgtataatgtttcagttatttttttgatactatatcaaacaagtcacacactatccacaacaagaaaaggaggtatccccatcatgccagtcaaatacgtattcgtaaccggcggcgtagtctccggcctgggaaaaggcatcactgcggcatcgctcggccgcctgttaaaggccagaggctacaaagtgaccatgcagaagttcgacccctacatcaacatcgaccccggcaccatgaacccggtccagcacggagaagtcttcgtgacggatgacggcgccgagacagacctggacttaggccactatgagcgttttatcgacgaaagccttaccaggaattccaacgtcaccacgggcaaggtctactggacggtcctgcagaaggaacgccgcggagactttggcggcggaaccgtacaggtaatcccccatattaccaacgaaatcaaaagccgtttccaccgcaactacacggaaaacgagacggaaatcgccatcatcgaggtcggcggcacggtcggcgacatcgaaagccagccattcttagaggccatccgccagttccagcatgaggcaggcccaggcaacacctgcatcatccatgtcactctcataccttacctgaaagcctcagaggagcttaagaccaagccgactcaggccagtgtaaaagaccttcagggaatgggcattcagcccgatatcctagtctgccgcagcgaactccccctggacgacggcatcaagacgaaaatcgcccaattctgcaatgttcccaaacatcacgtactccagaacctggatgtggacgtgctctatgaagtaccccttgtaatggaggaagagcatctggcccagtccgcctgtgaatgcctggatctgccctgtccggagcctgagctggcagactggagggccatgatagaggcctggaagcatccaaagcaggatgtgaccgtggccctggtaggcaaatacatccagcttcacgacgcctacatttccgtggtggaagccctgaagcacgccggggtggccaaccgtgccgcggtccacatcaaatgggtggattccgagacagtcacgccggaaaatgcccccgaaatcttcaaagatgtgagcggtatcctggtccccggcggctttggcgaccgcggcattgacggaaagattcacgccatccagtatgcccgggaacaccgcataccattccttggactttgtctgggaatgcagctgtccattgtggagtttgccagaaatgcggccggatacgcggatgcccacagcgtggagctgaatcctgccaccacccatcctgtcatccatctgatgccggaacaaaacggagtggaggacatcggcggcaccttaaggctgggttcctacccctgcgtcctggacaagacctccaaagcttatggcctgtacggcgaagccactatttatgagcgccacaggcaccgatacgaggtcaacaacgactaccgcgccgtgcttacaaaatgcggcatgatgctctccggcctgtcccccgacggacggattgtggaaatgatagagctccccggccatccctggttcattgccacccaggcccatccggagcttaaatccaggcccaaccggccccatcccctgtttaaaggtttcatagaggccgctataaaagaaaaaaatgtaaaaaataatatatgacaaaaatggctgccctgcttttgatctgccagtatgaatcatccgcctttgcgcaaactatggttaagattcaatcataagcgcatcacaaggaggtgaatcccaaatggatcacaaggaaaaagacgattttgacgttgacatacaagcctgctccaccatggactgtaccggcctgattccttccctgccccaggacgaggcagagaaggaggcctatgaggacctctatccatatgtcaccaaggctgtttcatcggacagggaataatgacagggcagcccaaatgaaaaaaacggagccgagacccctaagcctttgctccgttttattttatgcatcgttttatacatcgttttttgcatcgttctatgcatcatcttacacattatcttactttcctggttctgcggtccatagggactccctgctgccggccgcggccagccagcctccgtcacccatgcataaatctgcttaaaaactcctgggtctgaagctgtttcggcgcaccaaatatctgtgagggctcgccctcctccacaatcacgccgcctgccataaatgccacatggctggacacatccctggcaaaggccatttcatgtgtgacgataatcatggtaaggccctctccggccagcttgcgcatgacctccagcacctctcccaccatctgcgggtccagtgccgatgtgggctcatcgaacagcagcacctcaggctccatggccaatgccctggcaatggccaccctctgtttttgtccgccagaaagctgtctgggcttggcgttgatatagggagccattcccaccttttccaggtaatacatggcattcttgtgggcatctgtcttattcttcttaagcaccttgacctgtccgatcatacagttctccaaaacagtcatgttgttaaacagattaaagctctggaacaccattcccaccttggagcggtactggggcgcattgaccttcttatcggcaatattggttccatggtacataatttcgcctgtggtaggcgtttccaaaagattcagacatctgagcagtgtggattttccggaacccgacgcgccgatgatgcaggtcacatccccgctgctgactgaaaagtcaatatccttaagcacaggattggtaccgaaggttttgctcaaatgacggatttctaatatcctgtctcctttcatcgcgcatcctccttcttcttatccttttcatccggaaaccggtacataccgctggtatgggccagggtgtcggtggtggccaggtcgtagctgtccgcgccgtccatcctgttttcccaccatcgaaggattctggagcaggtgaatgtcatgatgaaatatataatcatggtgatggtatatgcctcgaaattcatgtacagggctcccgcagcagcctttgtcttatacagcagctccgtaacgccgataacagagagcacgcagctgtccttgatattgataatcaggttattgccaatctgaggcatgatattcctcagagcctggggcagaatcacatagagcatggtctgtacatgggtcatgccgatggcctttgctccctctgtctggcccgggtcaatggaaaggattccgccgcggactgtctcagccatgtaagcgcctgtattgatggaaagaatgaaataggcggcgccccacatagacatattaattcctaacatgggcagaagcccgtaataaatgaacatggcctgggccatcatgggcgttccgcggaaaaactccacataggcgttcagaatcagtttcacagcccagagcacggcccttttaaccgggttgtccccccgctcacttggtatggtctggacaatacccacggcaaagcctatgatacagcccaccagggtacctaccagggcaatcttaaggcttacgcctgcgccctggagcatcgacataccgtatcggttgaatacgaccataacacggccgaaaaaatctgttggcatatcccttctccttactctttcacgtactttcgcctgacggcagcttagtttgccagaggctgaacagagatagcttcatccatcatcttggagaagtcatcctttgtcatctttgtgagaacgctgttaatggcatcctttaactctgtattccccttctttaaggaaataccgatattgatatcttcatccgtcacctggaaatcagcatcgccgccgccaaactcaatcatcttgaaattaggataagcgatgagagcgcccttgcctgtaggctggtctgtaacaaccaggtcgcacttgtcagcgtttaaggacatcagcatatcgggagcgctggcagtggccgccaggacattggcatcctgaatctgaggcagacaggtgttgtaccagatggtgctctgctgggaagtacaggtggctcctgcaagatccgccacgctcttggcatccgcgtacttgctgccttcctttacaagggtaacgatggttgcatagtaatatggctcagtgaaatccactgcctgaagacgctcagaagtaatggactgtcctgcgataacacagtcaacctgacctgtggtaacagccggaatcagggaatcccagtccagacgtacgatttccaggtcatagcccagttcctcgcaaatcttctttgccatcatgacatcatatccgtaagcaaattcattgctgtccgcaatggcaaccgcgccgttggaatcatcgggctgggtccagttgtaaggcgcatatgcacactccatggccacgcgcagcgtctttttctctccgctgtctgctgctgtggtgtctgcagcggcatcactctctgccttggcatcgccggctgcggttgttgcctctgcctttgtgtctgctgttgttgccgctgtgccgcctccgccgcatgctgtcaaagaaccggcagcaaggacgccggccagaaccaggcctaaaactttctttgcactcattttcataataatctctcctcttaaaaatattccaggctttactgtctaagaaaaaagccacacccatcctcacaggtatgactccactgtcatctgatgaccggcaatcccaaacagctaaaaccttgccctattaaacatggcgcactttactttcttaagcatatatgcgcctaacgtgctaagtataacataactcgttctgttttccaatacccaaatacgtttttttatgcaggaaaaaggtataaataattgtaaaaacagccataaatcctttaactgggaattcatggctgtcatatataatcatttcctgctattggctttcctttgccctgtccgctgtttcctgaacggtttccccggctgtctcctgtgccttgtcacccatcagatcatccatgcgctgtaagaatacatcatcaggctggatttggtttccgtcctcatccacctccacggcaaacaggaaggttctggcatcattgatttcgtagctgcatgtaaccagggtgtacagggtcctggccggatatgtaatctcgacgccgtagctgcacggcttcaccatctcatgcacaaaggcgtcaaaggattcctgggatttgaacctggtcttccgcacaataggctgggcctccccgtagtaggcggccactgcctttaacctgatttcccggtcaggggtgtagatgctgaaaaactggtgctccttaaaatacgcctcgtccttgtaccggttcacgtccttgaacatgcttccgttcttcatattatggccgtacagcacattattgcgtcccacaaaatctccctggctctcaaaatccaggtaaatggcccccgcaatattctccttgccgtaaaaatcatgattcagatagaaatcgttgtcctctccctgaacaatggggtaatcaatgttggtatccggcacccggatccatccgatggtatccggattctccttcatcagctcttcaaaattgatgggagatacatagggctctgtctccggttcctctgtcccgggctctgtcactgcttccgtggacggctgcgcagtagtctccctggccagttcggccagccgctcatattcctccctggtcctcttgtcctctatccagctgtggatgctcatggcaccgcttaccagcatcacggccagtaaaaccaggatgatgacgccccgtatcctgctttttccttttttctgatccataaatgattatgtgtcctttcctgctgtcatcccatatggccggaggccgctttgagctcttcgttccatccttcgctgtcagccactgcctcctgcatcagaagcagcatctccaggaagctgcggaaactaatctgtctgcgcttttccttccagcagatggttccctgccaggtagcgttccttctgaacatgacccttataacaaaggtcatggggccaaagccccctgcattgaccaaaacgcttctgggactgataatggttccttcctccccgccatccgcaagaggtagaataaaacgctccacttcatccctgagttcaaactcactggcaaattcccggcggtccgccacggccggatgagatacgtccccgcccaggacgaaatggctggaattgcgcacagacacctcgcacatccgcttgcccaggccgtgcataatatcacttccgtgtccgagagaacggtccagatactccatcagatccaaaaagctttcaaaagaataggtgccgccgtttctcaggtccattatatcaccctgccacgtggaatgaaacctgtatttcacatgaaggcagaactcggccagttttccctgaagccgcttctttcctgcctccactccacaccttaaggatgaactgccatgttttattcccacaaaggacctatggtccacactcttcatgggatagcggagctcatcgaacagtttttccagacaaatagccatctccgatatacagccaaaggggatttcctcctccagactgtcatggtagagccttccctgtaacaggcggccatcaaagctgtcaatggctatatttacatatttgtacgaatccggtagggtccctgtttttgcaatcgacatatattcacctgcatttctctaataaattgacatagtaatcccattaaacctgttaccattataacagcctccggttacaatccggttacaaaagaacacctggccgcttttttatgtattttttttctggacaattatggctctggttagtatacttatcttagaatgaccccgttttgcaaaggagagcagacatgaatgcatccgttatggaagataaacctactatttatataaaaaccctgggcggtttttccctcagggttggcgataaagagataactgacaacagcaaccagtcaaaaaaaccctggtgccttctggaatacctggtggtattccaaaagaaatccatcagccccggtgaacttatcaacatcgtatgggctgacgaccccggcgtcaacccgggcggtgccctgaaaaccctgatgttccgcagccgcaagctgttagagcccctgggaattcctccccagaagctgttagtccagcagagaggttcctattgctggacccaggactatttatccgtcctggacatcgaccagttcgagtccatctgtaccagggtcctgaaccatgacatggatgaggacgaggcccttaacctttgccttgaggggctggaactgtacaaaggtgatttccttcccaaatccgaatatgaatcctgggttatccccatcagtacatactaccattccctgtaccagaaactggtttataagacggtagagctgcttactagaaaggaggatttttccagaataacatccatctgccagacagcagtagggatagagccttttgatgaagaattccactaccacctggtatactccctctacagggacggccacaccagtcaggcgattgaagaatacaaccataccctggacctgttttataacgaattctccatttctccgtcggaccattttaaggatttatacaaatccatccgcagcaaggagcagggtatcaatacaaacctggattccatccaggagacgcttaaggaggaagcctcagggggggctttttactgtgaatatcctgtattccacgacctgttccagttggaacgcagggccatcgagcgtacaggggactccatctatctgtgtctgctcaccatcggtgacctggacggacatgccccgaagacaacggtcctcaacaaggccatggagcatctgaaccatgccatccgtgactccctgcgctgcagcgacgtgtacacccgttacagcatcagccagtacatcgtccttcttcccaccgtgaccatggaaaagggtgagatggtcatgaagcggatactgaacaacttccgcaggctctacagccgcaaggacctgattgtggactacaagcttcagccggtgctcccctgggaacgctctcctgcaggccttggtgaataaaaagagttttggaaaataacaaatttgtggtattcatgaatcagaaaagctgcggcattatccttcattggattttctcccgcagcttctttattttgctttcccaatcattcagcagtgtctgtagctgtggccctgctccttccataaaaaagatggttcaggttcttcatcacatggcggtaagccggtatgagaaacagatccgcggcaatccaggccaccgggctggcgatgcacaccgctatatatccaaacacaggcaccaggcaaaagcccacaaaggagcgcgctgccatctcgcataccccggcaataatggccagcctggaatacccaagtccctgtatcatgaaccgcaccgcattgacaaagacaagcggaatatagaacaggctgttgccgatgaggaacagacgcgtgttcctcaggatttccccttcccccttatccacaaacatgagggcaatccactgcccgaagatacagagcactgcaaaggctatgacggcatagacgcagcccatgacagccccagctttcaggccctggtcaatacggtccagcttcctggccccaacattctgtccgccgaaggtggccatggtggatcccaaggcgtcaaaggggcagcagaaaaacatgctgattttgctgcctgccgtcaccgcggccactgccatggagcccagggaattgactgcggtctgcaggattacacttcctatggcggtgatggaatactgcagacccatgggaattcccatgttgcacagaatcttcatataatgggcatccggcctccactcgtcatcattcatcttaagaatggcaaatttctttttcatgtacagcaggcacaggattcctgacacagcctgggccgtgatggtggcccaggcagctcctgacacgcccatcttaaggaccagaatcgtaaagaaatccagagccacatttaccacagatgagaacaccagaaaaataagaggggtggtgctgtcgcccagggaacgtatggtacaggacagaaggttatagagataggtggccgggatacccaggaagattacgaagatatagctgtaggccccatcaataatatcctccggcgtctgcatcagctccaggatattgcggcataacaggcacacggtcacagtcataaccgctgaaaacaggattgccagccacgcgctgttggccacaaaccgtctgagggccttctcgttcttttccccgaatttctgggccaccggaatggcaaaaccactgcacacccccaggcagaaaccgataatcataaagttgacggagccggtggatcccaccgctgccagggccttaacccccaggcacttgcccacgatgatggtatccgccatattgtacagctgctggaacagcagcccgcacagcatagggataaaaaatcccagtatcagttttaccggggagccttccgtcatatcctttgtcacatttgcggccatgtatgtattcctctctgtttccatgaatttcatcccaataatgtactctcttaacctgcaatttgcaagtagaaaatatcactggaatccgggactgggacatacattttacacaatgggccgggaacagattcccggcccatcatgcctgttattggtagcagagtacaggcattcccttataaatcaagtcatagagcacgctggctttttccggcggaaggttgatgcagccatggcttccgctggtctggaagatggtgccgccgaatttgcttctccatgtggcgtcatggaaaccaatgcctccgttaaagggcatccagtaatccacatggctctcgtactcataggttccgtccgccttcttggctcccctcagtatcctgtccttttccttgtaggtcaggctgtagatgcctgggggcgtgtcgtaattcttggatatgtttcccgtgacgcagggtgcatcccacaccaggtttccttcctggaacatatatacatgctgtcctgtcaggtccacctccgcatatgtggtgccccagtcaggagccgtgcggctggctgccgtcatggcgtatacgggttcccggtccacaggaccagctgccggaccggcctgaatcagggctgccagggcctggacctcgcccgccacatctatcttccagccgtaggggcctgtcagctccacatctttgcctgtggctgtatggaatacgcgggcagttccggccgtatcccttctggacgccatctctgtcacaaaggccgtgattttctccagatcaaccgtcggcaccccgtcctggcttcctgttatccaggtggctatggtctcaccgccaagggtctccttctcactgccaaacacataattaacgctcatgtcccggtactggttcatgcggctgcacagagctataagattctcatctgtctcccatatattaacctggtaataacagcctgcgctgtccacatccactgagttctgccctgcttttacggcggcggtaatcacctccgttgttttggcctcgtccacattattgccctggacagccggtataatggaaaaaggctgtccctcctcataggaggatatgcgggcatcggaagtgacggtgatgccggagccgcttatcagggtcagagccttaatccttgcccccagggcctcctggctgtaggtcactgtcatggccatggtatgggagttatccgcatccggtcctgagacacgtccggctgcgttctgcgcatccagtatggccttaagtccctcgggaacctccaccttgtaaccgatgtccgtacctgctatggtttcctggcgtccgcctctctccctgatggtgagattgtattcaccggcataaaaaccctcgattctggccttggcctcatccacggtcagtccgcccactcccacgccgttgacttttgtaccggatacaaaacgggttgtatccccgctctcatccgccagggacacaaacgcccctgccagcacaagcacagccgctgccattaccgctgcggccagccttcccatccatgtcctcttccttaacttctgcataaacaatcctgccctgccttttattgatatttactgcatttttttcctctcctgcctgaaaacggcaggacgccttcttaacataacagcccttcaccatattttcaatatgaaaatcaaaaatgtaagaattcttcataaaaatataaaatccggggtcccaaaaacagggaaacccggattctttcgtaaaccagtacctttatcagtccactacctctatgctctcaatgacaggctggttgtcctttgccacggaaccgttgttgtcttccacctttgtatccttgcagatggcatccactacctccatgccctctgtgacatatccgaaacaggcgtaatccccgtccaggaatgtgctgtcctcatgtacaatgaagaactgggaactggcgctgtcctttatctgggaacgcgccatggaaatcgctcccctggtgtgggacagtgggttctccactccgttgttggaaaactcgcctttgatttcctggtcagaaccgcccatgcccgtgcccagggggtcgccgccctgaatcatgaaaccgcttatgatgcggtggaaggtaagtccgtcatagaaaccgtcctttgccagcttcaggaagttagccactgtgatgggggcctcgtccccgtaaagctccacggaaatggtgccgtagtcttttacgttaatctttacatggtgtttgcctgccgctgccgcaatttcctctgaggctgtatcctgggctttctctaaagcctctgctgtcttggctgtctcctttttttccgtctccgccttggctgcatctgtcgtggccgcctcggtctgcgccgccgttgttgcggcccctgcgctggtgctgcacccggtcagggctgaaactgccagtactgctgccgcacatatacacatccattttttcatttattccgctcctcttcttatgggaaaaccagtccgccgtctttctgtccggccattttcccgtaatagacatccgggcgttatgtcacccggactgccagagcatattgtaacacctgcaatgccttcccgtaaaggactttatagaaatatcatacttttgtcacattttcccgtccgggcagtgcgcagcaggcagacatcaccctgcggcacaccacgcacagaaccacggtgaccgccatgtcgggaagggtgcttcccacaggtgtatccacccgcatcagtatgcggtagattacaaaaccagccagccagatcagcaggttcggcagattggcctcctccgcctcatggtcctgcctgatgataaaataatccgcaatctgaatggcaatcataggggcaaacacagatccaatcagataaaggaaatccgtaatattatccatggggtataccatggctgcggcggtgccggcaagggtcactgccactgccgcccatttttcctttatccggtgtgtgatggacacgctggatacaccggcagagtaggcgtccaggaatgtggtggtcacggtggacagcacaataatgagaagccctgctgctcccagtcctgccttgaccatgataacagatatatcatattcgcccgtgtagatggctgctcccattccgatgacatacataaagcagctcaccaggccgtagaccagggcgctggcagccgttgccctgaagggtttctcggcctcccttgtataatcgcttattaagggcagccaggacagcggcatggccaccgataattcaactgcggccccaaagctcagggaactgtctgcctccatggacggctccccgctgccggcaaatataaccctgcacaggatgagagtcagcacaaacagcgctgccatggctgccgtattgatttttcccaggttcctgattccaattaaaagccacaccagaatcagaccgccaatcaccaggcaccagacccacaggcctgcgttaaaaatgccgttggcagccagcccgccgtcataaatcatgatggaggtccagcccaccagctgcaggacattaagcccgcaaaacagcaggcttcctttctgcccaaagctcatcttcactgtttccatggagctgcgcctggtatatccgccgatgagtcctgccatgaacagcagggcgcagccaatcacatggcccagcacaatggctgccagcccctttccaaatcccagcggcgccagatatgtgcctgtcagtatctcagctatggatacccctgccccaaaccatataaggctgttggcagacacggaggtccctttttcctttatacttatcttttccttcatgctcattcccccttaatactcgccccggatggcaaatccatgattcattggtccgcttccctttcccaggtccagctgggcttccagcgcgcctgagagatataccttggcccgctccacggccaggtccatatccatgcccttggccaggttggaggcaatggcgctggacagggtacagcctgtcccatgggtattgggattgtcaatccgcctgcccttaaaccatttcagcttcttgtcccggtacagcagatcgttggcatcattgagctggtggccgcccttaagaagcacggcgcatccgtagccctccccgatggccctggctgccgtctccatgtcgccgggattatgtatctccattcctgacagcacctctgcctccgggatattgggagtcagcaggttagccatgggaagaaggacttccttcagcgcctctatggcctcactgctgatcagacgggaaccgctggtggataccataaccggatccaccaccacattggcagccctgtaaaatgccagcctgtccccgatggcctctatcaggccgccggaggaaaccatcccgatttttactgcatccgggaagatatccgtaaatatgtcgtctaactgttcctttaaaaaagatggagttacctccatgattcctgttacgccggttgtattctgggcagttagtgccgttatggcgctcatggcatataccccgtgagcggtcatggtcttgatgtctgcctggataccggcgcctccgctggaatcgcttccagcgattgttaatgctgttttcattgtcattctccttttcgcattaattttataaagcggcggaaggtggtgcccccaatccgccgccgggaagctccggcgcccatgcctgataccacacagaatcgttccgcatatcaaaaaagcggaacaccaaaacaggtgctccgccggcaatcgtccgttatggtccctacgttggcattatccaaatcaggtaatgggtctaagcatgaacagcttactctcagcccacttaagtgagctccccgtttatttacaactaccattatacatggtttcaggaagattgcaatgcttttatcttgtcctgagccggaaatgagccggaaagtacatcctatcccagggccctgtccacgattttcaccatggccgtaaaggtggtgtcattgtaatccacatcaaactcatcccccagctggttcagtatgcgctttatgctcagtatgcccagaccgccgtcccgtttgctggacagtatcctgcttccgttcttcttaatctgcccgttgtaggaattttccaccagcatcataaggtggtcgtccagccacctggcctggaccaggatgaaacgcggtcctgtcaggcggcggcatgcttccagggcgttttccagcaggttgccggtgacaatgcacaaggtcaaatcgtccaccggcacatgggcggataaatccaccctggcagtgaactccaccccatcctgccttgccctggcggcatactcctgcaaaagcccgtttacggcctggttctggcagaacaccatctcagccgtcatgtccagctccctcttcagattcatcaggtaattggtccgctctcccctgtccatgttcagaagggcatggatgtgatggcggaaatcatgcttgatgatgcgcacctgttcaatgtaatccagggtctggttataatgctccctctgctggctgataagctgcctggcaaactgcagctcctcctctgtcctgcggcggcacatgatttccagggtgctgctcagaataagcacatagagcaccagtatcatgatgcacagcgccagatagaacagcacgtcctccagtccccgctcagccagggaacgcgatgagaatatggtgttgttcccgataaaaaggatgaacagggagacagaagggtatgtcagcagcagggaacaggatcgcctggataactggtcaaaaagccggtttaccttatccctcagccaaaaccgcacaaacacataaaacccgcaggcccacagcagggataccgccacacagatttgtccgtatgtcagggacacatgcccctttaatatccaggcagcaaactcgttcagcgatgcggacaggaccgcgaacagccacgcggatatgtacaggaatcctttcttaagcagggttcctttaaaaaagacaaggagcaccagaaagtaaagacaggaaaatatgccccggaacacaaaaaagacctgggggctgatatggaatatggattccatggatatcatgatgacccacaggtaggcggaaatggctgctatgttctccctgtaactgtgttttggatccaggcatacaaaaatgggcatcatacgcacagccaggttaatcagattcataaagacagtacatgccgcgtcgttcataggtacctcatttcagacggtaatggtaataggcattcttgctcagtttataaaagttcctggatatgggaatcatctgtccgtcccgcatgtaaaaacaggaatcctccagcttgtccacatagtccagattcacaaggtaactctgatggcagcgcaggaactgggcatgaggttccagaaccagctgcagttcagacagcttctggttgacggacagtacttccccatccgtcagcttcacaaaaacacggtgaagccggttctcaaaccaggccaggcgctccaggggaagctccacattcacccggttatggaccacggacaaaacagccttcttcactcccagcctgcgcctcaccacacgctccatggtagaccaaaagctctcttcctccacaggctttaaaataaatcccgctgcctccacgcggtatccctccacagctgattccagggacgatgtgataaataccaccaccggatgatccttgtcttccgccagggcctgtgcggtgtcaatgccgctcattccgggcatcagcacatccagaagatacaaatcatactccctgcccgactccagaagctcccttccggcggcatatgtatctatacgcacctcaatgccttcccgttcaaaaaaacggccggcatattctgctgcctgaaggcgttcctcttctgtatcgtcacagacagccacattatacatacccgggccccccttctctcacaaaactgctgtacggcgcacagcctatcctatattttattggcatttatgccataagtcaagttcccctgcaaagtatcataatcggtatattttctgcagaaatggtccttattccacccaggctcctatggtagaataaaggtaagaaaaacattttaacaggaggggttttatgggttcaaatgtaattgtaacaatcatcgtaatcgtctacctgcttttcatgctgtggattggctggtactcatccaccaagatatccaccaacaccgacttcatggtggccggacgccgtctgggaccgcttctcatggccggtaccctggcagccacggaaatcggcggcggaagctccctgggcgtggtacagaacggtatgtcaggcttcggactcagcgcgtcctggtatataaccaccatgggtatcgcctttatcatcctcagcttcgtggctcccaaattcagggcagccacggtcaagacggttcctgaatatttccgcaggcgttacggaaaatcctgcggaattataacagccgtcatcatgcttcttcccctggtggggcttaccgccggacagttcattgcttctgccgtcatcctgtccaccatgctgaatattgactaccaggtggctgttatcattgtagctgttgttgttacggtctactccatcatgggcggtctctggagcgttacactgacagactttgtccaggtattcctgattgtcatcggcatgattatcgcagttccctttgccatgaattacgcggggggctgggacaatgttgcatccaacataccaaagggcacattgagcctgttccagggctatgatctgtttggaattatctcccttgtaatcatgtatacagccactttctccgtagggcaggaggctgtgtcgcgattctacgctgccagggacgaaaaggcagccaagggcggcgcctggctggcagccctggtaaactttatctacgcctttattcccaccatcctgggcatcatcacgctggccctaatcaatatgggcaaattcagctccacgcagtttgagtcagtgggcgcgcgttacgccctgccggtccttgccatcaacaccatgccggcccttatatgcggacttctgttcgcaggcatcatctccgccaccatgtccagctctgactccgatctccttggcgcaggctccatctttgccaatgacatctataaggcagtgctgaagccggatgcatccagccagtccgtcatgaaggttacaaaaatcgtcatgtgtctggtgggcctggcctccatgttcatcgctctctttaacacacagagcattgtatccatcctgatgttctgcttcacattaagagcagccggttccttcttcccatatgtcatgggacattactggaaaaaggcgtccacggcaggcaccatcgcctccctgatcgccggcaccatcgtggtggtatatctggaacacatttcaaaggggatgcttttcggcatcaagttcagccagcccatcattccgggtctggcggctgccttcatctgctttattatcttctccctggccatgccgcctgagaaggagaccacggagctggctcctgaggaagatgattaattattaaccattacagggactgtctgttgccggtgtatggccggcgaaaacagtccctgtctgctattgatactcctggttcttaggatgctttatgatctgctcttcctccaatcctccaccacctgcgcggccattttcccggccgtgtccctgtttaaaggcatgacccggccatgatagggaaaatataccaggttggaccacagcacctcgtatcctcccttatcatactcttctgcggtgggcagatagctgctgcatccgttggtatagccgttgaaaaacagaagcggtgcctctgcctccttccaaatatcaatggcgatccggcacatggcctcattgggaacaccgcagagacagccctggttgacaaaaagatactgaatctctatgtcagcatactgcttttgtatgccttcatccagaaggcgcttcacctccttcagccacatcctcccgtcaatttcgccttccctctccgcctcctctgcaatttcctctgccctttccatgtccggcacatcagccgcaaaccggcagaaggaagatcggatttccacgcgctccaggggcatcagcaccaatgaggcatacacagcgtccacggaccggaacatatcttccgccatctgttccagggcccggcggctctggggcacatatttttgcctgtattcctgtgaaaatcctttccgggccatctcccagcagtgaatctccacatattccatgttgtcctgatgatatctgggacggatatccccggcagctccctgtaccatcatcaccgggcagccgtatgcttcctccagccgtttccttgcggcccccatataatctgcggagataaaataattatccccggacagtacatttgcatgggctgtcacgcgaataagaaggacctccggttcctttccgtcccgggccgccagctttaaaatgcctaaccgcccgtccatctgctccggttcattcctccggttcacccccacagtgttttccccaatcccccaggccgcctccatggatttcatttttcccgcggccttccggacagccgtatctgcctgccggcataccatttcaaagtaatccggttcctccgctgcatttggcgcactgtgagtatgggaaaagcataccataatccgctcccttcccgtgtgaagcgcagcagcagccctgtcccgcaggacattggacagctccactgtaaagcccaggctgtcaatgacaataaggccgcccatgacgccgtcagcctcccataccaatgcctggagccttaaggaatccctcacgcccctggaacggttatccggacggtaaaatcccaccatctcagacggattatccggcgtgatgtccgcctctccatatccggcctgcaccatattacatgtctgcatgataaaacacctcttttcttaatttctgttttcttatttctgtttccttatttccggtgactctatcctatctcccgggaaacggatatgcaatctactgttttcttctgtagaattctgtattatggtttccgcatcagcctgatatacgccactcaaacctgccgaaaaagggagccgcgcactgcggctccccatggtttacttctgatatacaatttttcgtatggcgtggacagaaagacagtacttatcccccagctcctccagggataccccctgccggtaagcatccacgattccggcgttccgctccgccagctccctgcggcagccgctttgctcaccccaggccctgtgccggtcttccctggccgggatatagatatatccggcctgtatgtattcctgcagttcctccaccaggtgataggggaggactgcctttgcattgacatatttcatgtcggctcactccttatcttcatcactcttaaggaagcaaagccagcattcatctcagcggcacatattactccatgcaggcgccgctgagcttacaggctttgcatggagccagacattgttgtttttctttttattcctgcacatgattctctccttccaaaccatcctcatcccttaaccaggcctgataacggtatctctgaatcactacggcccaactgttaccggaactcccagaggacagtattcccacagaatatccatcacatcatttgtaaccgcgatgcagccggaggttcctcctccctggtccccgtgtatctcaatggccccgcctaaaggagtattccagggcggctgtatgcctgccttgtttgcctccacaatggcattatactgttcctcattaatcaggccgtctctcaggccccgctctgcatcctcggcattgggataggataatcccagagccagatagcatatgctctggtcatttcttgtgcacacatagaacgatccggagggcgtgatttcgtctccctcctgcaccttgtcccctgtctcggaccgccgtcccagctttacgggccaggttcctatggtctgggcatactgtttcagcgtcagcgtatttcccatcttgctgacatagatgttcaccccattgacagaaggctggtaagctgcccccggtcctgcattctgcccggccagggcgctcagaggaccggccgccgccaggcacagtgccagcactccggcagcagcacattttctgaatttcatcctgttccatctccttacgcttatttctatttggtttagtataccatataatcccaaattctaaaccaatgtaagaaaatcgaaaggaaaatatatctattcttctgttttctcctccccataccccagctggggcagcacattcatgggatggtccaatatcaccagattggcgtccttatccagatagtgctcctgcttatgtatgattaccatgctcctcccggcaaaatactgtatgtactggcagaacacctcggaagccagggtagtccccaacagcagcagggtatctgcctttgttatctcctccgtggtcttagtcatgttctggctgtccaccatctctccaatcagggaaatcatgggccgtatgggaacattgcagtccctgcagattggcacccgcttcgcacccgccatatatccgataggatactttttcttacatctggggcactggttctggtaaatacttccgtgaaggtttatgacatgacggcagccgcccctgcgggccttgtcatagatgttgctgtctatgatgcattggagctttccggccctctccatggcagccagggccgggccggaagcagtgtcccctggcgcgttgtgaagcatctcctttttgtagaactcgaaaaactgctccggacgggtattataaaatgcactggtatacatttcctcaacaccgtagccataccggttctcaatgtcataggccttatcctgcttcttaataccgatgaaaccgccctcttccatcataccggaaccacagagagccacagtataggtactatcatccagaatctttcttaactgagctattttttcattcatagtgatacccccttccagtccaacccagcaaatgcctcccgggaggttacaactgttacttattatcactattatataattttttccagataatttccaccttttttggcagttttatcttactattttccttttaaaacgtcattttctttcttttccacctgagaataaaggagaacgcccccgattgtcaccacaccccctgctatctgcaggggcgcgggtacttccctgaacagaaaaagcgcaaagacagcagcagccacaggctcgcacagcttggaggcagatacaaaggaaggggaaaagaatttcaggcaccagctgaaaatactgtgccccaaaagagtggagcacacgctgagaagcaggcccacaaccacggacctcactccgtatcccgtaaaggccagtccgctaaaagcagttgccagccccagggccagggcgcagaacacatagacaatgtaggtataaatcgtggtggacatataacccctggcctgacgcccaatgagggtgtatacggcgcagaatacagccgcggcaagggccagcacatccccgtacaaatggtttcccccggcggagtagtcagaaaaggcaatcagaaggcttccgcccaccgtcacaaggatacttacgccggcaggcacagatatcttccccttcatgaacagacagtatcccagcgccacccatataacctccgtgcacacaatggcagtggaactggccactgaagtctggttcagcgactcgaaccatgccgtaaaatgcagggccaggaatactccgctggccccgcacagcaggactgtctttctgtccgtttccctcagttcccgcctgcagtccttccgtcccaaaaccacaggcgtcatcagcgccacggtccacatcaggcggtaaagggctgtgaccacagacggagcctgggaatatttaacaaaaatagccgataatgatataccggctattcctatgattatcatgaccaatggatgtttttccatcaatttcatcttatgtatcctcgcttatgtgattggttgccaaactgctgtagaaattctatcacaccaatgctcctgcgtccagatactttcttgaataactcccgctgattgcccggctgccgcctatggaatcagcctgctggttcccagccggtctgcgcccagctctatgaaacgctgtgcatcttcaatggatgcgattccgccggctgccttgaccttgacctcggggcctgagtacttcctcataagggccacgtcctccggcgttgcgccggctgtggaaaatccggtggaagtcttgatgaaatccgcccctgactccgttaccacacggcacatttccttcttctcttcctctgtcagaaggcaggtctcgataatgaccttcaggcatctgccgccgcaggcagccttaatctgtctgatttcatccaggacctggtcgtaatgccccgcctttacaaggccgatgttgatgaccatatcaatttcgtccgcaccgttcttcaccgcgtcctctgtctcgaacaccttcaccgcggtggtcatgttgccgttgggaaatccgattacggtgcagacagccagcttatcccccacaaaatcctttgcctgcttcacataacagggaggaatgcacacagaggcggcggcgtattccaagccttccctgcacagcttttctatctgctcccaggtagctgtctgctttaacagcgtgtggtctaccctgcttaaaatgtccttcttatccattattttctatcctttctatccgtcagtcagctgcccccggggaaaaatccaagaggcattcttccaaattacaattcgttcagaaccgaagtccctatggtgccttccggcatcttcaccccaaagttgtcagcaaccgtggctccgatgactgcaaatgtatctgcgctgcccaggtcctttccgccctccatggagggagaataggcgatgaacggcacctgttccctggtgtggtccgtgcctgtataggtggggtcgtttccatggtccgcggtgagaatcagaagatcgtcctcccccagaagcggaagcagctctcccaacttttcatcaaagcgctccagctccctgccgtacccttccggattgcggcggtgtccccacagggcgtcaaaatccaccaggttcacaaaacaaagcccgttgaaatccgttttagcatactggatggtctgctccatgccgtggacagacgagttggaatggttggactgagtcagaccctcgccgtcaaaaatatcgtatatcttgccaatggacaccacatcatatcctgcgtccttaagggcgttgagggcagtccttccatatggcttcagcgcgtaatcatggcggttggaggtgcgcctgaactcgcccttcttcatgccggtatagggcctggcaatgacacgtcccaccttccactcatcccgcagggtcagttccctggcaatctcgcagtagtgatacaggttgtcaagtcccatggtctcctcgttgccgcatatctgaagcacggaatcagcggaagtatacacgatcagatggccttcccgaatctcctcctccgccagttcatccaggatttccgttccgctggcgctcttgttgccgatgattttacgtccggtccgcttctccagctcgtctatcagttccttcggaaaaccgtggctggtaaatgtctggaagggcgtggtcacaagaagccccatcatctcccagtgtcccgtcatggtgtccttgccacggcttctctccttcagacgcatgtaacgtcccaaggggtgttctgccggctccataccctctaaggggtgcaggttgaccatgcccagctttttcagattcggaatcttaagccccggaacctcccgggcaatatgtcccagggtgtccacccccacgtctccatattccggtgaatcctccactgccccgattccaagtgaatccaggaccacaacaaagatacgtttatattttcccatcttacgacctccttaaaataatgtgaccaggcccaccaccatggcgctgagcaggcttaccgccacaccgcctaacatggccttgaacaccaggcgggcaagggtgcttttcttttcagggcacaggaccgcgatgcctgaaacgcagattccaaggctggagaaattggcaaacccgcacagggaaatggcgcatatcatccctgtcctgtaatccatggaagatatcatggagcccagctgctggaacgccacgaattcattgaggaccagcttgcttcccaggagatttccttccagaagtatttccgaagggtccaggcccataaagaagccgaagggagcaaatacataggaaaatacctgctgaaggctgatgccgcagatgcctaacagcttattcaccgctgccaccagcgccaccatggccaccagggacgcgccgatggacagcgccatctgcatgccggtgacagctccctctgcaactgcctctatcacgttggtattattccccttattgtccatcttaacgcttcccacttcccggacctcctctgtctggggcagaagcatcttggccaccataatgctgcccaccggcaccagtgtgctggcaatcagaagatactccatgggaatgcccagggccgtataaccgcccaatatggacacggacatactgcccatgccggaaaccaggaccaccataacctcgctgtccgtcatctggcccaggtacttgctcaccagaatggggctgtcggtctgtcccaggaacatgttggcaaccgccacaaagctttccacctcggaggtgcccataagcttacccactgctttaccaatccattttaccacaaatcccagaattccgatatagtaaagaagacttaccagggcagacaggaatacaatgttgcccaggacctgtatggcaaaaacggatccggtggcagccgtgctgtctgccagtgaaccgaacacaaagcttaaaccatcctgaccgcagttgatgacgctggtcactgcatccgataccctggacaccacgtaacggccggccggaacctttaccagaatcaccgcaatcaggaactgggcaatcactgccttgaccagcattttgacggatatgtttttcttcttccaggaaatcagatacataatggccagtaccaaaaggatacctgtaaggtttaataatatcttcatttgtccccaccccttacctttctccttaagcctgcttatctgcctgaatcagtctgcggacggcttccaccgccaccttgatggctgcctccgtatcgtggacaataggattatccagtcctgcctcctggcgctcctggttacccaccaccaggaaatcagaaccgcagcgcacccttaggtggctggctgcaataaacagggcagcggattccatctcagacgccttgcagcccatgcgcttccatgcctcccacttgtttaacagctcatagcttaccggcatgcgtttgggctcatgctgcccgtaaaacgcatccttgcactgcaccactcccgcgtgatacgtatatcccagcgcctttgccgaggaaaccagggcattggtcacatccaggtcagccacggccggaaactcgatgggtgcgtattccctgctggtgccctccattcggatggcgcctgtggcgaccacgatatccccgcccttcacgtccatgtccataccgccgcaggttcccacgcggataaatgtatcagccccgcacagcaccaattcctccatggcaatggatgcagacggtccgccgatgcccgtggaggtcacgcttaccttttccccgtccagataaccggtgtatgtaacatactccctgctgtccgccaccagtaccgcgttgtcaaaatgctttgcgatcttttcacagcgcttcgggtctccgggcatgatgacataccgtcccacgtctcccttcctgatctgtaaatgatactgtaatccttcttctcctgaatagttctgcataataattaccctctcttttaattgattttttgtttgcgcctttacctgaatctgcttgcattcctgccggcatctgcgcttttgtttttgtttgtttatttatttgtctgtttattgcttgcttgtataatatcatttaacttgtataatttctagatggaatattttacaattatcatagtcaatttttgtatatattgacaataaatatgcggtttttcatggtgttttactggttttagtctgttgtacaactagacatgtctattttgttgacaaatcagcctttgggaattatgatgttgaataaggacttgtatatttttgtgatacagccagaattgtgacacagccagacaggaagggtgaacctatggacgcagacgtattatctgagaaagcaaagaaattaaaacatgtaaaagtatataaccgcctgtattccatgatacaggacggcgtgtatcctccgggcagccagcttccctccgaaccggagctggccctgcagatggatgtaagccgcatgaccctgcgcagggctctggctctgctgcaggaggacaatctggtcatcaacatacgcggtaagggaaacttcatcagcgaacgcaatcccggcgccagtatgccgggcctggaggtcacacagcacccggtccgctgtactctgtccggatccattgacgagacagagatggaatttcgcatagaacctcccacagaatccatcagtcagaacctgaagcggaaaactgccgtggtggtgatcgcagaccgctggtataaaagcgccggaaaggcgtgcgcctacagcctcagcttcattcccatcgaggttatatccgggaaacagatagatttaagggagaaagaagatttattccaatacctggagcatggtgtatatgaggatgccgtcagcagcacctgccagctctcctacaccaccacgggcaatttcacagccgtcaagtacatgctctcccagcacgcctcctttattctggtccaggagacactatatgatgaaaacagccgggtactggtatccagcaagcactatataccggtggaatccttcaaaacccaggtcaatgctgtggccggacgcgcctgaagggccatttttattcatccagattatgcttgactgcaaatacagccagctgggtccggtcctttagcttaagcttttccagcagacgggagatgttgttgcgcaccgtcccctctgccaggaatagcgcccccgcaatctccctgttgtccattccccgggcaaccagccgcatgatatcccgttccctgggcgtcaaatccccggccatgtctgcctttgttttgccgggcgccatctgacggcgcatcccctcaaatacgcttcctccaaaaacccgtatcccggcgcatacagccttgacggactggatgaccttgtcatcctccatctcctttaagatatacccgtcagcaccgcttcccacggctgcatccacggtttccctgtcatcaaaggtagtgagcaccagcacctttatatccggatagtcctccttgattctggtaatcccatagctgccatcgtattccggcatgcgcatatccataagcaccacgtccggtctgtgcttcctgcacagctgccacgcttcccggccgtcagcggccagccccaccacccgtatgtctttgtcctgctccagtatggccctgagcccctgtctcaatatctggatatcatcggcaatcactgcttttatcatatggttctgctcctttttcctctatcccttatctgccggcacacggcacacgacgccctcagcttccgtacggcaggcatatatatatctgaaatccttccccggattcggatatgaaccggactgttccccctgcctgctctgttctctggcgtataccgcggattccgtttccctcctctatatggaggcatccctttccgttatcaaacatatacagactcaggctgtctgcgccgaatttaagtatcacatccatgtgggttgcatgggcatacttatggcagttagtaatggcctccctgaggcagtcataaaccaccggagacaaatgggaatattcctgcctgtcctctccctgtatctccacctccacctcaaattccatcacactgccggttagctggtatactccctgggagataagtccataggaggcggactgcctgagattattgatggaacaccgcagctcccggatcccgctgccggccagctcctgggcctggatcaggtactcctctatgcgcttgtcctgttcctgtcctctctcctccttatatccaatccgtatgagcctgagcagcgaatttatcatggtcagcgtatgtccggcggtgtcatgcacctcctgggcaatgcggttgcgctctttttcaatggcaagactctgattggtcacagccagttccctgccctgctccaaaagctggtaatatcttcccacatctgtgagcataatggttcccgcaaccatatcccccttcttatccctgtggatatactgcctgacctccagccttctcctttcaccattgtcttccagcgtaaatacaggtgtctgagaatccgcacaatctgcttttgcgcccttttcccccaggattcgcctgagcggttccatatcatctccggtttgcagccccagccaatgtacggcagccccgttgcagtaggtaatcttatcacgcctgttatacaccaccacgccctctgcaatggaatcaaatattttatcaaaggccatggtattgacatccaggaaatcataccggaacacagccagcagcatgagaacgctggtcagggaaaaagcaggaggcgtcaggtcaaagcctgttctcacaagccccgtcatatagagcaggttaaaagccagaggcactgctgcagccagcaatatgacggcaatatgcgccagcgccacacggttctttttaaaagccgccagcaccacagccatgccggccaggacgcagatataggtataggccatatgaatgtaaaatacaggcccgtacaccacctgagccacctcgaaactggtatagaataaatggtggtattcatttgtcaggagaaccgaatagttaacagccgaaataccgaataaaaacagttccgccccatgccccagttttctcctgctgtagagaaacgcaaactccagccatgccggtccgatgaagctgattcctatgtaggaaataccatatgccagatacttcatcccctttgtcatgggcaaagccgaaaacagctgtggcatacaccaaataatgataaggagctgacaggctgccaaagctcctgtggtcctggttttatctgccttcatcagcagccagcctgatgtgtaaagagacaggccaatggcggatagataggcaatcctaagcatgatatcaagcatatcccaaacctcctccgggcagttttcccgttactttcacctataaggcaaaacagggcgcaggcatggcctgtacccttgattatagccgctctgccgctgtgtgtcaaaagaattgcagacggttactttccctaccgctgcttaccctaccgctgcttcctctaccgcagcttcctctatcaccgcttcctctatcaccgcttcccgtcaacgcttcttcatttcgttcaccgctgcaaagacaatgagtcccagtccggctgccagcagatagacccaccatgacaagctgagccagaaatcttttgtcatgtaaagcgccaccagtatcatgatgatgccggaaatccgaatccatctcagacattttctcatatgcgccaggaggaacacagccagattgacagcctccagtatcagcgcatcccatacggctcctgtagataaggcatccgatgccatggcccccaggcacaggcagtagagaaccgtctgcaaatttgttatctcttttctgtccccccatatgcggcccagactccagataaaaccagcagccggaatcagctgtatctccaggcttagcatctccggccaccggataaacggctggcgccagaatgccgccgctgccagagctgctgccagcgtaaacgccgcccttttccagtgttccagcactgcaaactgaagtacatacagagctgtcaaaagaatatacgcgcactgccatccgcggcctgcctcccatgccatgggtatcaggacaaagatgaccagaatgtggaaccagtccacgtcccatcctccgctctccccttcacggcgtaccataacaggtctgaaccgccggaacagaatccccgaaaggatgagcagcgccgccgtggcgccatatacctggttttcgttcaaaccataccttgccgttgctatcatgggaagggggagtacagcggctgcggctgccagatgcagccagctgcagccgctccggtaaagcatcacatagatgactgcaaataccgccatgcagagaatcatattccagagcgccagagatggatcgctgtaaaatgcccccatcatcatcaggaatactgtcatacctgtacaattccagaacctatccctgattttgctgcggtcatgcaggataaccgatgcatattccagaccgtataccgccgctgtccacaccatccggagcacgccgtttgcggtcgcaccttctgccagaagatacacgcctgccagggaatacagacaactgcccctgatgaaccgttcccgcgccgtcccctccctgccaaaggatttcaccagcaggtaaacagacagaagaaggaaaaaagaaagagtctcctgattctccagccgggcaagcgcctgcgcagccgtgccaatggccagtatgggaatacagaatctgtctttcttcatcatatcccatatggacacaatcagcacatacccccatacaaccacatcgtatcccacatccatgcccaatgttctattaaaaacctcccatccggtcagggtaagggcaaagagcactgccgcaacgctgccgcgaagtaccgggtaccgtctgccccactccgccatgaccgccgccagaagaattaccactgcggatgctgccagctgatttcccagactgtccctggaaaacagcatatccagcagcagtaccgccatatcaattgccagaacagcggaaaaaacacatccgcccgccagattattaagaggatttttaaaccttctctcagccagaaaccataccgcggtcatggctgcccccaaaaatacctgatatgtaaaatccacggggatacagaagcctgcatactgaaagaaaatcatcatggtcagactgtgaagcatcttcatttccgggctcctgcgccgcagcgccacaagggcggtcccggctgccatcagcccaaatgccagggtatcccagaatgtaacttcccaaattcccagaaacagtattcctattatgaatccaatcccgcctgccacagctttataagccatcattccgcttattatccagaactggagcgctgcaaaaaggccgaattcacccataaattcgtctataaaccgatctgccggggcgttcatgctgccttgcaaacctgattttctcctgtaaacctcatttcccccaatcaaaagaaaggagtaatacatcataccattcatgcaatccggccattcaagctttaacgctcccatcaaaaagcacatgctgaccgtcattccccacaggcaggcctgggtatagaccttgttatgaaatctcctgattttggaaaaaagagctatctccgtggctatactgcctgccagcaggacacggtaacggttttctccctttaaaataaactccggacccagcagcccgaaatatccagccgccaatatggtaagaaataaaaatacgctgcccagaatataaaaggcctgtcccgtccgctcaatcttaaaatatttttcagctgcccagcttgccccgaaaaacaaaccggacccccccaggaccataatcaccttgcagacactgggcagcacatgccatgccgtggtggcgaaaatcaatccggccagtaccacaaatatcactccgatcaccagtgctgccgtcccctggaagaaccccccatctattttcggcgccctgaccagagctgtctgcttgtgaggtatttccggcacccgacaggcagactcagctttctcaaagtcctctggtactacaattgcttgcccaggcccataccatgccgctgacttttcatgctgtgtcactgcatccgccggcctctcatgctgtatctctgtatccgccggtccttcatgctgtatctttatatccgccggcctctcacgctgtatctctatatccgccagtctctcatactgtatctctgtatccgccggcccttcatgctgcatctttatatccgccggtctttcatgctgtatctctatatccgccggccctttatcctgcattcccgtatccgccttgccagttccccttgtcagttcccatatccttctcttataccggctgttggcaacagccaaaactattatggcagccagttcagcaaaaggagccaccagccatattaacaaaatgataaaccactccatacccattcccctttctatccgtctttccgataccgtctatacatattttcttttcatgttttcattataaaatataatccagtccggttatagatgctgtccgtcattacagcagtgacatttgtcactgatatttgattctgtataggg

SEQ ID NO: 3186 - DNA, 55647 bp, Unknown
  gut microbiota DNA sequence
ccatatataaatttttcagttaaccattctcaccaagaatacgctccagctgccggaccatttcctcatatggaaccgtacatccatggccgcctatggagatagacggctttgtctttccgtgataatcacttccgcaggtaatcatcctgaatctgccgcgcgcagccttatgataaaaccccgcctgttcctcagagtggtagctgctgaatgcctctattccatccactcctgcctccagtatgggatccagcaattccccgcagtcttttaaattaacccccggatgtgccagcaccgcatatcccccgttcctgtgtatgatatcaaccgcctgctccagttttggatattccattctaacataacagcattttccctgagaataaaaatcccagtaaaaattcacataagggttatcgcctcttgccccgccttccctgtaaggaagaagcaggggatggtccttgtattcctcccggccaaggagcacctctgcaaacatttccccggtccaccggtccttcccgtagtaatctccggccagttcctccatatcctcctctgttacgtcaaatcccattttcctggttacgcaaagcatctgcctggatgccgtcgctgcctgactgcttatattgtcttcgatgtcggcaaaatcatcactggtatcgtcaaatccataccccagtacatgaaggttcacacctctgaacgtgcagtctatctctatgccggaaacatacctgattccggccctcctggccgcctgtctgcccgcgtcgtttgcccgcacactgttgtggtccgcaatggacatgacgcggatgccgctcatggcgcactgtctcaccagctcctcaggactgaattcgccgtcatcactgtaatagctgtgcatgtgtaagtccattaacttttccattctgaaccctccccatcctttctgtcatcccaatcatcaatacaacaaataagaccagacacacgggatacagcgttacgctgatacgctctgccgccaccccaaacagcggaggcataaatgtggatcccacataagcgcaggccatctgcatgcccatcatggactgggaatactgcaccccaaagttatccggcgtttcatgaagcaggctgggatagatgggagcacagcccagtcccaccatgataagtcctgttagtaccgctccgtcaccggccggaaggagcagtatcacagttccggcaaaggcagtcagctgcccgcagcgcaccatgttcctgtctcccagccggtccgtgacaaaaccgctggccagtctgcccagggtaatccccagataaaaaaacgaagcccacttggccgctgtctggggagcaatccccttatgcagcaccatataactgctggcccacagaccggctgtagcctcaagggcgcagtaacagaaaaatgcagtcagcaccgcctttgcccccggaagccgcagcccctctctcagggtaatctgcctgtggggggtatcctgtccgctgtttccatctttctttaccttccacagaggaagcgacagcacaagacaggccaccagcgcaatctgaatcacacccaccaccatataaccggaattccacttaaagccgcgtgtcagacacaggcccatgatatagggtcctgccgttgcgccgataccccagaagcagtgaagccagctcatgtggcgggatttatagtggagcgccacaaagttattcagtcccgcatccacgctgcctgctcccaggccatagggaacagcccaaacacacagctgcaggaaggaatgggaagaggaaaagccaaacagggctgctgccgtcattgcaacacttacaaccgttacctttcctgtcccaaaattcctgataagcctgtcactgaaaaggctggaaattatggtgccgccggcaataatcatgctgataatgcctgcataggacaccgaagctcccagctcccggtacatggacggccatgctgaacccagaagcgcgtccggaagtcccagactgataaacgccagataaataatcacaagtaataattgaaacatctcatcctcctgttactgagcactcggaacccccgatacggcctcctgagcgcaaagcatataaaacatataataaatacacaccaaaagaatatcgtcttttccttcttgattcaacccaaatcccgacttataatataagaaaaacgaccaatcggaggactgacatggcattacaggactgtaccctgaatttaaaccgcacaggaagggaactgcagccccatgggacgccggactttccctgtgcaggatattcttctgtatatacagacagtgccggggatgtggttccctggcactggcatgaggatttggaaattatttatgttgagtccggacatctgagactgcaggttccgggtaagacccttcatctaaaacagggggaaggcgctgtcgtcaattccaatatactgcattttgccgcggctgagcccctttgcgaactccactctctggtctttcaccctcttttggtaaccggagaaaaggattccgtgttttccaggaggtacgtggcaccgcttcttcagtgcagaagttttgacatctgtccatttgactatcttgccggagacttaagagccggaaatcctgcggccgtgttcaccgctgcctttgatgcattttgcggcgaaccattgggatacgagtttgtggtccgtgaaaaactgtcttgtatatgctgctgcctgtatatgtactattcccctgccatggattccagcaaaccaatgccggatacggataatatacgtatccaaaaaatgataagttttatccatgaacattttcaagaaaacctggacctggcccagattgccagggctgcggatatcggagagcgtgagtgcctgcggtgtttcaaacgcgccatccagacctctcccctgcagtatctgctgaaatacagagtaacccagggggcttctatgctccttcgcagcccccacagcagcatatcctccatagcaggcatgtgcggattcaacagtcccagtaatttttcccagatgtttgtgcgcttcttcaagtgtacgcccagggaatacaggaaagccagctgcccgccttctattttcccataaagcctccgtcaaccggaatcaccgcgccggaaatataggccgatgcatcggatgccagaaagaccgccaatccttgcagatcctccatcctgccccagcgccccgcgggaatccggctggtgatttcttcatattgctttggatttacttcctttatattggcagttagttcagtggccatataccccggtgcaattgcgttaacattcacgccctgaccggcccattcattggatagtgcctttgttatttgtgccaccccgcctttactggcactgtatgccggaatcaacacactggcaaaaaatgcggtcatggaagctatattgattatcttaccatatttttgcaccagcattgttttgccggccagctgcgacatataaaataccgcattcatattaagggcaataattttctcccagcggtcatgcggaaaatcaacagccggagccctaaactgtatgccagctccattcagcaatatgtccaccctgcctcccagcttctccaaacattcattatatatattctccagctcttctgttttggtcaggtcgccccttaccgcatgtaccatgggacctttttttgccatctccccggcggaatctccaaccatatccaaaatatccagcagaaccacctcggcccctgcatcatggagcgcctgtgccattccattacacagcccctttgcaccgccggtcacaattgccttcttacccgccaagctaaatttatctataaaattactcatattaaatatccttttctgtttttgtttccacagcatatcttaactgcgatacaatccgtaacctaattctttgcttatctggctaccatattttttcatgcataatgtatatttcttaatggttgcctcagtaatctgctccttgggagcagaaataccgatgcagcagctgacattgccgctgtaattgaaaaccggtactgccaggcatctcacccccaacgtgcgttcctcgtcatccagggcatagccctgctccctaatcttctttaactctttttctaaattctgataggttgtaatcgtattggatgtataatgttcaaaatcatagtagcggaagatgtcttcaataaatgacggaggtttgtaagccagaacacattttcccacagcggaacaatgccacgcttcaatcattccgatctgggccgaaagattgtattccctctggctccgtacctgatctacaatatacattttgcgatttcccattgccgccagatggacactttctttggtatcatcacaaattttgtataggtagggccgcgctacaatagccacattgaaattttttttaactccttcgctaaggtacagattccgaaatcctagccggtatttcttactgaccgggtcaatacttaccatatcatagtgcatcagcgttgccatcaggcgggaaaccgtacttttgtccaccccaagaacggatgccacctccacaattgtcgcacttcctctttcttgaatgattgataaaatctcaattcctctcgccaatgactgtaccatataatacctctcttacctgttttcccccagtaattcaaggactgcctttgccttttcaccgccatccgccaagaccttcataaaatctttacttcccgcaattgcttttaatatttccggatccgaagcttttagaatatctgtaaaatctttgtgggaaagctttgagatactggctagtgtctggcggctcattgcctgactcttcgctctttccttagggtaacctgccccggccgggtctgcaaacaatttttcaaaaatatactccagatttatgctgcccgcccagccatatcctttattaagcggcagggacacgcagttgcctccgtttatttgtgaaaagagccaggcgtctaacggttccacgatcaaaccgcacaccacccccgggaattgcagtacaccatttaaaaaaccctgtccggtgccgcatcccccaataacgaagtcgcagctgccggtatttaaaagaacagccgccatataactggtgtgaatatacgttaaagacggggtttgttccggattcttcatccccacattcagtacctctgcattggtggtcttatgtaatgcgttgacaatatcttcatttctgattgaagcacttacttcattgataaccgcgattttcatgttccctttcctcctttcgccataaccagattgccttctgcttcttagtacaatcctgttaacagtccaacgccgtacataacgacagccacgattacacaggacacaatcgacatcaggactcctgcctttgcaaaatctttgattgaaaaataccccgctgaatatgcaattacgtttgtcggagtagatgtaattaaaataaacgccagcgaagatgccaatgccgccggaaatgctatggccaacgtggatatcccaagattaatagacagctctataataataggaataacaatacttgcagataccgtggcgctggaaagcgtaatattcatcagcgatacacttaataccaccacaaaaatcatcagaatggggcttaatccgcccagatttcctaacagccccagcgcgatccagtttgcaactcctgtctggtagagcaccattcccagggatacgccggaaagtactaaaatgatactgctccaggacatttccttctctatttctttatatttcgttttgctgacacccgggaagaaaaacagcattgtggttaaaataaccggcaaagcaattggaatatcaacgcccaacagatctgaaagctgtgaggaaaacacccatagcgcaaccgttgcaacaaaaagaattaaagtaaccttttcatcccgggatagcctgggctgatttttgaattcattcctaatctcctgatttgtccttttaagatacttcatttcaggcttgaatgccaataagagcagcccccatgcaatgggaatatgaatcagtgaaatcggaaccccgtatatcatccagtccagaaatgaaacatcaattccggccatatccttcataaagccaatggccaatggattggggccgtttcctgcaggagttccaaatccgccgattaagctgccccaggccacagaaatgagcaatgccttaccgaagttgctttccagcggctttaatccctcctcatccagaagagacttggccagcggcataagcatggcagcaacagccatgttggaaatccacattgacaacagcacgcccaccaccaggaagcctaatataacatatttagtgctgtttccggtgattgaaaggcatacattaacaagcctttttccaagccctgatttattgatgaacgcacttaagataaatacgccgataaagaatataacattaatgttgccaaaaccggttttaacaatgcctccaaaggaatcgacaccgaacagggccaacagcgccattgccagcagacctgtaaagtggaacggaatcgcttctgttatccagagcagaagggcaaaaatcaaaacagccagtgcattctgtccttccggtgtcagcgttgcatcttttatcgtagcaattgatgccggaaagctgacattcttaataaataccaacacaataaggctaatacatatataaatccatctttttgcatttactgataaaccacccgatgtacccgatacattatttatattactcataatcaattttctccattttatctgataatctgactgcgcggtgagaaacgaagatgattattcagacatttcatttaagatcttttccggtgtagccggaagtgaagtgacccgtacccccacggcatcataaatggcattcacaattgccggtattgtgggcagaggagccggctctccaattccctttgcgccaaggggactaaaaggatccctgttttcaaccagactggtgcaaaacatcggcacatccacgctggtaggcagaatatattttgcaaagttcctgtttacaggcacaccttcatataatacaaaattttccataatggcctgtcctatgctctgaacagcgccgccttcgatctgcccttcaatcccctgaggattgattgctcttccaacatcatgggaagcccagatgccaagaacatgaacctctcctgtaaacgtatcaacggcaacctccgcaatctggcttccaaacacatacgcctgccagggattgccttctccgctcaccggatccaaggcttcatgatgagctgtatacgtgcctgaacccaaaggaacatagcccctaacctttttacaaatatcaacggcctctttaagagaaagatcataacgggagtggccctgcacaaaaattcttctgttcctcatacagattgaggaagaatcaacattccagtaggctgcaatttcccttataaatttctcttttacatccctgcatgcatttaataccgcattgccaatcatatacgactgtctgctggcaccggcatgggcggcttcaggagatcttgctgtatcgttatccccgatggtaatatcttccggatacattccaagttcatccgccacaatctgtgttaaaacggtcagaataccttcgccaatctcagtaacaccggttaatatcatagcagtgccgccgtcgtcaatttcgacaaatgctccggccttatcaaccgttgcgcagcgtcctattccgtaccaccctgttccgacaccgcgcccgtatttaaatcttgctttacaaagttcaacagcagcaggtgccttgaactcactgcctggtatgtaaggctgtacagtctggctgccctttacatcttttctcacccggcctcttacattagacggccccggttcccatgcggccatccgtgcacattgcttcagtgtttcacaatagctcacactccccagtacctgcccggtatgggtaacagctccgtcccttactccgtttattaaacgcagttcaattggatcaattcccaaacgttcagagcagatatccatcgttgattcgattgcaaaggtcggctgtaagattccgaacgttctcattgccccggaaggcgtattgtttgtatagtaaccttttgagataaccctgacgttctctatttcgtaaggtcccgctcccaatatggctgatttagccactgttccttttgtggaaaaacaataggctcccccatctgattttaaatctatttcaactgcttgtattttgccgtctttcctcaatccgattttatggtgaattaaaacaggatgacgtttacagcttccaatcatggaatcatttctggaaaagaccagctttacaggccgttttgttttaagcgcggcaatggctaaaataccctgataaatcatatcctccttgccgccaaagccgccgcccacaggcgtcatgataaccctgattttattgatgggcatgtcaagaattttcgccaaaagcatgcggtgatgagtgatatcctgatcacatgattttaccaccaatactccgtcaggatcgcaatacgcaagacctgcttccgtttcaagataggcatgatccacacattgtgtagaataatcctgttcaacaataatatcgctgtttctaaaaccgttttcaacatcgccttttataacagatgtgaaagaaaccacgttgtccgggtaatcatcatgaaccactgatttacagccaattgcatcggcaataccagagacaacaggaagcttcctgtatgtaatctcaattaatttttcagcttcttccgcctcttctaacgtttcagctacaatagctgcaaccggttctccataaaaacgtattttaccctttgccagaacgggctgatcatgatagtagacgccaaacccatcttcgcccggcacatctttactggtaataaccgtttcaacccccggcatcgtaagtgccttttcataatcaatcttcagtatctcagcatgaacctcccggcttctgacaaggtggacatgaagcattctgggcatcgtcatgtcggccgcatattccagtgcgcccgcagccttccccttggcgtccactctctctatccgtgaaccgatgattttgcctgtatccggaacaatggaatccagacaatcagcgctttggtcatgattcaggatatcccgtgccaattctatggcttcaactattttgacgtagcctgtgcatctgcatatatttccgccgagacgtcttctaatttcgactttatcaggatgcctgttttcttttaatatggttgtcgctgccataatcatacccggagtacaataaccgcattgaacagccccggcttttatgaaacatctttgtataatactcaacccgtcagttccaatgccttctatggtcagaatctcacagtgattggctttgataaccggtatcatacagctctttttcagtacgccgttaatcaaaacagaacaagttccgcactctcctgcattgcagcccttttttgttccaatcaaatgaagctcttctctcaaaaaatccgcaagtctcattgacggagcaacatatttacaaacttttttgccatttacttttaattctatctttacaagttctgcattcataattttccactcttttaagatgcatttttgcgtcttcggcatttggtcaacacggtacaatattaatttctgcaagtgattcataaagaccggccagcaaaaagtttctgatgactgtctttctatactctcttctgcttctggacttaacaatatctccgggaatacattcggccatcttcagaatcatatcctttgaaatacggtttcccttcaaattgtcctcgatttcatttaatcttacaggagccggtccgattcctccaaacgcaattctgacatccttaaaatattgattcgtttcatcggcctttactaaaaaggcagagttcacggttgaaatacacaaagagcgtctaagcccgacttttttaaaggcacacccgtaatctttcaatatggggcatgtaactgactggataacctctccttccgacaacgaagttttgccaacccctttaataaaatcagatagcggtacatcactcatgcaaatatcgttatcgttttgcctaatcgtatgaaccgttgcattcatggccaataaaggcggtatcaaatcagcgcagggagatgcgtttgccaggttgcctccaactgttgcaatctcccgtatctgctgatctgcaaagtaactggctgcatgcctcaaaacaggcacagtgtcaattaattccggttcttctaaaaactgttgtattctggtatttgccccaattgttataaacccgcatttagattcaattatggaaaaatcttcaatgctgctgatatcaattgcagagtcctgaccgttaaaaggagtcctttcttctgcaaacagatcggttcctccggaaataatatcaaaggaatgagcattatgttccatcaaacggaaaagttcttcctttgatttcggcatataatattttttgtattgaagcatacaattactctcctagcccggaatcttcacaactactttgattgcgtcgtctattctttcttttgaatatttcagggctgtaagcagatccccaaagccaaatgtatgagtatgaatcaaggaggcgtcaaagcgcttttcgctaatcagggaagccgctctgtgaacagcgcttctgccttcgcctctgatgccaaagagagaaatgttattgcggaccaaagctgccacatcaacctcaacaggctttgacggaaaagcggccagacagattcttccgccccttttgaccatattggctgcttcattgacagcatttggggcgccggagcattccattacatagtgaacaccttcaccatttgtaatttctttaaccgccttgacaacatcctggtttctgacatttacagtgtaatctgcccccagttttttaccaagctcaagtctgttatctcttgtaccggtcaaaattaccggattggcgcccaaagccttagcgaccgcaaccgccatcagaccaatggggcctggtccggttacaaccaccgactgacctgcaatcaaaccgccaagggtatctaaaccatacattgcagttccggccgtcacaatcagggttgcctcttcatcagtaacattgtcgcccacatggcacaacgtatttacattgttgatagcgtattccgcaaagcctccgtccgttgtaaaaccattggctctgtggcctttatcgttgccttcgtagtttttgccataattcaggcacgaagtatacatgccctcgcggcagcgctcacagctggaacagccggcatggatttccactgccactctgtcgccaactttatactcatcaacaccatctcccagcttaacaacggttcccatatactcatgtccgggcgtaaagcccttattaaaaggcagaccgccttgaatcatagcgggtggtccgttttcaatgatttccaaatcagtggcgcaaatagccaccgcatcaatttttacaagtacctctgactttttaggccgcggaaccggtttctcttccaacgtaagtactccaggatctcccaagacccatgctttcattgtttctggaatttcataattcatagaatatttcctccttttttattgtacatttttttaagtcatccgttttcacaacaacacatgaccgtttcctcagataatgcagtgctcttaaagggcctaaaagccaatcgtgtgtttcagtttctggaccctttcacaccaatttccaacattccagtccccaaaagaaccaaggccggacagctcgtctctgccgtaatatacggggacatgcaccagggacagaccatcatactcatatgcctggcttaatgctttttcaaattcctcggccgtagctccgccatagaatcccttcacccctttgactgcttctgccatttgaacgtaatctactataactgaatcatcggttttatactctacgtcatattgagagtgctgcagactggtaatagcccccatacgccggttatcaaacaaaacaatcatgcctctgagtccatgctgaaccccgtcaattaatatctggggattcatcataaagcttccgtcaccggtaaaggccacagggtaatcttttcctcctgccagtgcaaaagcaagcatggaggatactgcaaatcccatataggatgagcctgtgtctgttattgtttgtcccggtttttcatctgttacaatctggaacccgtttgcctgaacatcccccgcgtcaaatatttttacgcagccatgcatatccgcaaagtccactgcctttttgatggctgctggctctgtcagaatggactctcccctcttttcatccaacaagacaggattgtcatatcttagctgcttataggtctcccactccattctcttatccgtacattctttcagccactcagggtcagatgttttattttcagtttttttcagcagctcaattatttttaagagtacttcttctgcatcaccctgtatgcgcacagaattattatattgggccaggtcatcgtaatcgcaattgatatttataattttcttagccttacgaaacgaggttcctgaactgtcccattgacaaacgcctcttgctccaatggcaatcattaaatcacattcgttcatagcgtaatttccgcatattgaacccttggaaccgccaacactcatattgcgcttttttgaatatggatataagcccggtacctgcggtccgtgtacatatacagcatctgtcagttctaaaaattcctccagtacttcggccgtgacatctgctgctccgcctccaactttgactgtaatcctggacgaatcgaggatagcctccagtgcggcgttgaaaacgctcatatctgtgcttataacttttgactcctctgatttttcagtaaactcaagcagattgcagctttccattaatttgggctggatattcatgggaagaagcatgtaaaatggtgtacgttttgctctaccatggactgccgcatctcctcttttcaacgctgtaaacactgcttccggcgtatgcagcgaatatgcaggcccaaatgttgacaggagccgcagaaacagttcctgctctcttttggggatttgctgcatgttaggcccttcactgtggctggtttcatcacccatcaaataatagacgccaaggccattggccaacggaaccagcgatccggcagcggcctgtaaggcacccggtccaatggaagtaaaaaccgccggaacctcattatatttccatctgagcattgccgccacatgggaagcttctacttcgttccggacattaaccgtcttaacagcactttcttcttcatatatacgcagcacttcaccgacatcagtcattccatgaccgaaaatacccacaaaggtcttcacaccctgatttattaaccctaacacaactgcctcgctgaggctgatgtcctgatattgttccaggctgcccgcttccacagctttacgaattgtgccgtgtgttttaatctctttcgcacgttttcttctctgttccatcatttcattcataattattcctctatatccttcttaatttcatgtgcttccatcttccccgcctctttctagacatttgcttccatttaaacttacttcctccttctggtaatcagttcggttaaaattaccgctttcttggatttgattatatcataacgagaatatgttacaatacacaatcgggaactcgattgcgcattatgcaaccatgggtaattttgtcttttttcaacaaataaataaggtatttatagtcatatttgccaaagtagtgttaatgtaagatatatgttataatgagagaaatccatatggggtgggggattcgatccaaaactgttggggaaatcggtagataacataaaaaatattgatgccggaattgataccggcaaggattcttataggagcgataaaatgatacaatctcttgatcgagcaatgacaattctgtcaattcttgaacagaaaaacacggcaagcgttacagaaattgcggaagaattaggtgtaaataaaagcactgtctcccggttaatggagactctgaaaaaacatgatatggtgcaggcagatcctgcaacaaaaaagtatggcctgggctttaaaatcttatatttgggagaaggcgtaaaacgtaatattaatatcataacaattgcccgtccctttttgacaaaactttatgatgaactggatgaaagtgtacatttatgtgccttcaataacgatgcagcctatgtagtagatcaagtccagtcaaataaggtatataacctgtccgctactgtcggcatggcggagccgctgcatagttcctctgtcggaaaatgcatccttgctttccgcgcccctttcgctgctgtgcgtttgttaaaggactaccccctgacagcttatactccgaaaacaattacagacatggacattctgatggaacagctggcaatcatacgcagccagggctatgcagtggacgacgaagagatagctttaggcgtcagatgtatcgccgcccctatttatgattatcgcggcgaagtaaattacagtctgggcgtctcaggaacaaccaacaatataaaaccagctgccatggaccggtatctctcagcactgctgtctgccagcagccaaatcagttctgcgctgggttataaatgcggcagacaacgcccggaagttcaaccacccgttccgtatggagatagcggccgggaagaataaaacagctgagagtacagaaaagcgggctccgaagagtccgccatccatggtatgccgcatttatcaactgtttttatcccctttattgtttctgtcatggtaaatgtaattgcccgttacatatgcaggggttagacagaaataaggacgacaactaactcaaatgaaaccctcaggaattgcggtcctgagggtttccctttgtgcttcaaataaatataatctcttttgcctgtttatattatatcaagcactgattacaaaatcacttaatagttttagcgtaaaccacgatgttacttattgttcaacgccgcctgtgctgctgccagacgtgcaatcggaacacggaatggtgagcaggatacatagttcagtccaatcttatggcagaactctacggatgaaggatcgccgccgtgctcgccgcagataccgcacttaaggtctgcctttgtggagcgtcccttctcaacagccatcttaaccagctgtccaacgccttcctgatccagccttgcaaatgggtcagactcgtaaatcttagccttgtagtaggaatccaggaacttgccggcatcgtcacgtgagaagccgaaggtcatctgtgtaaggtcattggttccgaatgagaagaagtctgcctcttctgcaaccttgtcagcagtcagggctgccctcggaatctcaatcatggtaccgatgtggtactggatatcggagttcttctccttcttaaccagttcagcaatctcaaccactacgtccttaacgtacttaagctctttcttctcgccaaccaatggaatcataatctcaggaacaatatcatatccgcactcttccttaatctcgattgcagcttccatgacagcccttgtctgcatcttggcaatctccggataggtaacagccagacggcatccgcggtggcccatcattgggttgaactcatgaagttctgcacacttggctttaacatcctcaaccgtcattcccatatcatcagccagtgccttgatgtcatccggatcggtaggaacaaactcatgcagaggcggatccaggtaacgaacggtcataggtcttccctccagagccttgtacatggccttgaagtcgcccttctggaatggaatcagctcgtttaatgcttcttctctctgcgcaactgtctcggacagaatcatcttacgaatcttcggaattctctctgcgtcaaagaacatatgctctgtacggcagagaccgatgccctcagcacccagcttaactgcgttcagggtgtcggcaggggtatcagcgttggtgcgtacacgcagggtcctgaactggtcagcccactccatgatgcgctcaaagttaccgcttacagtagcttcctgtgtagcgatgtcacccttgtagatctttcctgtagaaccatccagggaaatgtaatctccctcatggaatgtatgtccgccaagttcaaataccttagcttcttcgtcaatcttaatctcgccgcagccggatacacagcaggtacccatgccgcgtgcaacaactgctgcatggctggtcataccgccgcggacagtcaggataccctgcgcagcgtgcataccctcaatatcctctggggatgtctccagacgaaccaggataactctctcgcctctgccgcccttgccggcatccttagcctcgtcagctgtaaagtataccttaccagctgcagcgccaggagatgcaggaagcgcgcttccgattacttcgccggccttcagtgcttccggtacaaaggttggatgcagcagctgttctaaagacttagcctcgattctgcatacagcctcttctggtgtaatcatgccctcatctactaaatcgcaggcaatctggatggctgccggagcagtcctcttgccgttacgtgtctgtaagaagtacagcttgccttcctcaatggtaaactccatatcctgcatatcccggaaatggttctccagcttcatagccagatccataaattccttatagcactccggaaggtcctctgccagcttggagattggctgtggtgtacgtacacctgcaaccacgtcttcaccctgtgcattaatcaggtactcaccgtaaattccctttgcgccggtggatgggttacgtgtaaacgcaacacctgtaccggaggtctcgcccttatttccgaataccatggtctgaacattaacagcagtaccccagtcgccggggatatcgttcatacggcggtatacgatggcacgtgggttgtcccaggaacggaacacagccttaacagcgcccatcagctgctcggtaggatcctgcgggaaatcctcgccgttcatagcttctttgtaaacagccttgaattttgctgccagctctttcaaatcatcagcagtcagatctgtatcaaaatgtacgccctttgcttctttcatctcgtcgatgattttctcgaagtaggactttggaacttccataacaacgtcagaatacatctggatgaatctgcggtaggaatcgtaagcaaatcttgggttgccggttttctttgcaaatccctcaactgcaacgtcgtttaatcccaggttcaggattgtatccatcataccaggcatggacgcccgtgcgccggaacgtacggaaaccagtaacggatcctctgtatcgccgaacttcttgccattgataccttccagccaggtaattgcctcaaaaatctggtcctgaatttcctgtgaaatctgcttgccacagttataatattcggtacaagcctctgttgtaacagtaaatccctgtggaatgggcattcccaggtttgtcatttctgctaagttgcagcccttgccgccaagaaggtttctcattgccgcactgccttcgtggaacttataaacccattttgccataagttaattcctcctcatgttcttgtagactggcattctacgctctgttttatgcctttcatttctgaacggaacaaatatatatgtcttgtccgtccacctcgttcattatatcacaaagatttcgcgagtaaagagtttttccgtgaaaatttgttaaattttaaggtaaaatcgctgtaagcactttcattttctgtcattttcacatatgcgttatttaatcgtatatgcgaactttcggtgttgtatgtacataactttgcgaataaccctgaatccgtcaaaagcccagcccggttcatttccgtctcatttatgtaagctcttccaatattcgggagcaaatggatggaccgaaaccatatagccaaagcaaaatcctgtgtactggcatacacgggatttcgctttgtgtccaaatggacatacttaacttcctggctaagattattttacaccaaataaagtgtcatgttaatattataccttaaaccggtagcacataagctgtccctggtttaaccgtgcctaaagttttatacctctttatcccttgttatctctaggaactttccacatcttaccttttctttccctctcacttttttctagccgtgttgctttcggtagtatttgtggtagtacaggagtttcatactaccatgaggaaaagtaatgttatcatccttcttgttccatagacatctccatctgtataagatataatgaatatgctgtcgactctttccagcaggaaggaggtgtctgcatggaactcttaactactttcatattttctgtcatggcaagtgtagctggctactacatatgcaaatggttagacagaaaacctaaagacagctaacctaaaatgaaatcccgtgtactggcatacacgggatttcgctttgtgtccacatggtcttaactactttcttagctatctttatattacactaaatttagtgttatgtcaatatcacaccttaaaccggtacccaaccccccatatcgtctcaatatactgcggtttggccgtgttaaactctatcttctcgcgaatcttcttaatatgcaccgttacagtggcaatgtccccaatggactccatatcccatatcttgctgaacagctcctctttggtaaacacatggttcgggttctgggcaaggaaggtcagaaggtcaaattcctttgtggtaaaggttttctcctccccgttgacccacacgcgccgggctgtcttatctattttcaggccgcggatttcaatcagctcattggccggctgcccgctgccaataaggcgctcatacctggccatgtgcgccttcaccctggccaccatctcgcttgggctgaatggcttggtgatataatcgtctgctcccagtcccagaccgcggattttgtcaatatcctcttttttggccgaaaccataatgatgggcgtgttctttacttcccgtactctcttacatatctcaaatccatctgtaccgggcagcatcagatccagaatcaaaagatcatagtcttccttcagcgccttatccagaccggaacttccgtcattttcaatctctacctcaaagccggacagctccagataatccttctctaactctgctatgctctcctcatcttccacgattagaatcttgctcatcctgtaaaacctcctgatattttcttagaacaaaatgtatctctgttccgattccttccttgctggtggcccatatacgtcccccgtggtcctccacaatcttgcgcacgatggataaacctataccgcttcctccctgggctgaattgcgggaggaatccgtgcggtagaaccggtcaaaaatattgggcaggtcctttgctgctatgccttttccattatcttctatttcaacctggataaaatcgcctacgtcctttatcctaatattgataatgccctttttcttatccagatattttacggaattactgatgatattattgatgacacgcttcatctgctctgcatcggcaatgatgaccacgtcttcatccacataattgaaatatcccagctcaatccccctggcttccatatccaggccaacctcctccacgcagtcccggaaatactgggccacgttgatcttgctgaaggtatagggaatcttatttgtatcaattttggaataaaaggtcagctcgtcaatcagcctgtccatatcattagacttattgtatatggtacggatgtatttgtccagcttttccggcgaagacgccacaccgtccagtatgccttccacgtatcccttgatagccgtaatcggtgttttcaaatcgtgggaaatattgctgatcagttccttattatccttgtcatactgtatcttgtcctccgcgttctccttaagccggatacgcatttcctcaaaatcctggcacagctggcctatctcatcatccgcgtccacatccagtgtgaattccaggtttccgtcgcgaatcttcttcgtggcctcctgaagcttgttcagcggactgagaatggaacggtatacccagtatgtcagcacaatgcccgcaaacaccagaatagtgacacccagtatcagcatctcccttatcatggattttacttccggtatcaggtcatccacattggaaataataaaagcgcttccttcctggccgtccggaaaggtgaaatccatctgcttgatcaggtgctggctctcgccgtccagataaatgccgccctgtaagtctcccttcatcatatcaaacctgggcagctgggcgcatatggcctcccctgcggctttattgctgtcaccgcagtacagaatggtatcgccttttcgcacaatcagatatgcataatggcttttcagttcagcgttgactttatccagatatgataaatcgttgtagagccccggagcgttgtccagtgtattcctgatgtcctcctgggagcgcttggtaatacggttaaatatctgcatggaattgcctgagaacagatccacctgctccgtaagtccgtactccttggtgaaggacctggtctgataattgctgagtgcaagaaccagcagataaaacagcagcatgggaacaatggttatggttaaaaacgccaccgcaagacgggtcctcagtttcataagccccatcctcctttgtcatgatacggtctgacattacgagtactgcatcgtataagcttcctatacaatgcagtactcgcttccgtccgaaaacaaagacagtctgtcatccgttattgctagtatatcacaataactaattttcgtttataaaaggtttctaaattttatgaacaaaagtcctgtttttccttgtttcctcccggatttctgatataatgataatattgtccttataaagcaaggaccaaaaggacgaatgattggggttgtattttatgataggattttacagctacacggttgtattgacatatttgggactggcttccgcagccatgggcatgattctcaccttccaggggtttgcaaaatacgctttgttctgtcttgcgttctccggcctgtgcgacatgtttgacggcaaggtggcccgtctgaaaaaagaccgcacggaagatgaaaagcgcttcggaatccagattgattctctctgtgatgtggtctgtttcggggcttttcccatgatactgtgctattccatcggtatgcggggaccggcaggcatctccatactggtattctatctgattgcaggtgtcatccgcctggcattttttaatgtcatggaagaaaaacggcaggatgagacagatgaagcccgcaagtactaccagggacttcccatcacctccatagccattattctgcctctgttctgcaccctgcgccctctgctgggccacagattcctgtcagagcttcacatctgcatcctcaccgtgggtctgctgttcatcattaatttcccgctacgcaaacccggctggaaaatgctgacccttctggtcgccattgtatcctgtgcactgattaagatatatttcttctgataataaagaaaggtgtgattccatgcaatatgcagacagaaccggccgttccctgggcggcagcaccctccaggaccgtttcctggagaatctatatgccagctttctgggacgtatgctcataaaaccgctggtccatccggctttttccaaaatctgcggcgtttttctggactcgccactgtcagcgcccatcattcccggctttatgaagtctgccggtatctgcgccgaggactgcgaaacaccggccggcggaaggtaccgctcatttaatgccttctttacccgcagaatgctgccggaggcaaggcctttcgacgccagggaccatatattgtgcagcccctgcgacgggtttgcaagcgtttatcccatccacaataacatgcgtatcaccatcaagcacacccaatatacgctggagcagcttataagggactccggcctggctgcccgctacgccggcggcaccgcccttctcttaaggctcactgtatcagattaccaccgctatgcctatgtggaccgcggacggcgctcctcttaccgcaggattcccggcgtgctccacacagtcaatccggcagccgccagccgccgtcctgtctacaaagaaaactccagggagtattccctgctgcgcaccggtaccttcggcacagtgctgatgatggagataggggctcttatggtggggaaaattgtaaatcaccacaaagcttataccagcattgatgtgttccgcggtcaggaaaagggctactttgcctttggcggctcctccatcctgctgctcttccagcccggcaccgttgccattgacagagatatcatgcgcaacactgccctggatgtggaaaccagggtacggatgggtgaagccatcggccaggcaatgacagcaaatgaaatgaatccaaacgaaatgaatccaaacgaaatgaatccaaacgaaatgaactcaattaaatgatcccaattaaatgttcccaattaaatgttcccagcacaaaacctccgcagttccttcccggaaccgcggaggtttttcttctgcatttccatgcagtgcccttttatcttctaaaacataaacttctcagcaaagtagtccttaagctcagcaatcggaacccttacctgctccatggtatccctgtcgcggactgttactgcatggtcttcttctgagtcaaagtcataggtaatacagaatggagttccgatttcatcctgtctcctgtatctcttaccgatattgcccctgtcgtcaaactcgcagttgaaatatttggaaagctcggtgtaaatcttttcagcaccttcattcagtttcttggacaaaggaagcacacccacctttacaggagcaatggccggatggaagtgaaggacagtccttacatcgccttccccgatttcctcttcatcataagcagcgcacaggaatgccagcgtcacgcggtcagctcccagtgagggctcgataacataaggaatgtatctctcctttgtctcatcgtcaaagtaggacatatcctgtccggacaccttctggtgctggcttaagtcatagtcagtcctgtctgcaatgccccaaagctcgccccagccaaacgggaacagatactccaggtctgtggtagccttgctgtagaagctcagctcctcaggagagtggtccctggccctcagctcatcatccttgattcctaatgaccttaaccagttgatgcagaattccttccagtaagcaaaccactccaggtctgtgtcaggcttgcagaagaattccagctccatctgctcaaactccctggtacggaatgtaaagtttccgggcgtaatctcgttgcggaaggacttgccgatctggccgatgccgaatggcaccttcttcctggaagttctctgtacattcttaaagttaacgaaaataccctgggcagtctcaggacgcaggtaaaccgtgctcttggcatcctctgttacaccctggaatgtcttgaacatcaggttaaactggcggatatccgtgaagtcatgggcgccgcagcttggacagcagatattgttgtcatcaatgtactgcttcatctgctcctgtgaccagccgtcaacagagccttccatctggattccatgggcgtcgttataatcctcaatcagtttgtctgcgcggaatctctctttacactgcttacagtccatcagagggtcagagaatccgcccagatgtccgctggcaatccatgtctgggaattcatcaaaatagcacagtcaacgcctacgttgtaggggctctccatgatgaacttctgccaccaggctctctttacattatttttcagttccacacccaggttgccataatcccaggtattggccaggccgccgtaaatctcagaacctggatacacaaagcccctgttcttggccaatgccacgattttctccattgtcttttccatatctgcatcctctcttcttaataattatagatttaatataaattaaattataagaattactttaatatgatgtaactggttccctctccggaagtctgcacccggttggaatccttcaggacgcagccctcgcttacatactggatttttttctccgtcacaatgacgccctgtcccgcagccttgaccaccatgctctgtccgtccttaagagctgtctcctggtccaccgccttccccttctcatcctgaaaggaaacctccgcaagttcaccggacatggctgccaccctgcctgtatccagttgggtgaacggcacattataatctccaatctcctgggcaaattcaatgagacggcccggagcgtcgtattccgtaaccaatgtggctgttccgttccccatgctggctgaaacaatggccaccggaagtttctcagagccttccgcattctcataggaagcagccttacccagtccgctgttaaaatcaatgattttctgtccggccgagttctttagttcgtcctccgtataactgccctgctggtaagtctccaccgaagcccacctgacactgccgtcgcctgccacgtagacgctgttctcagtgggggcttcggctccccccatgcctatcctggagcatcccgtaaccaccgcagcagccgctgccagcagcagaatccccttcacaatcttcttcataaatattccttcctcatacttctttgccgccgtaccgggcatatggacatattatatcctctgaatgccataatttcaagccttatgacggattttatgctgtcagggtttccaaaatttccagggaacggaactcatggcgcacaaaataccgtctgcttttttccacaacagactcaaattccttcagcacttcttccttcagcgcaaattgataaagggattccgacggtgagcagataacatactcccaggcataatgacaggaatcagagaccggaaccggagggtcctgggtatattccccgttgattaccatactcttaagctcgaaaaccctgcgcaccagccggttgggaagggccggacgcaaaagagctctgagggactggtacaggagctttaacagttctgtgccgtccagattttcctgggcgaaataagctgcggtttccagaaaataggagccatagcaggctgcctccatgtccgtggacagcccgtcaaaataattggtaatctgggctgactggagattgtaggcattcctgccttcataaaggttaaaattgccaaaacaaaaaggcctgctggccgccatcagaggattgcccggttttctggcgccatgggagaaggccgtaatcttccccctctcccttgtgagcagcaccagacgccggtcaaaatccccggagggagccgaaaggagaaccatcccagttaatgttactgtctctctcatttccagtttcttcctcctctcagcatttccatcagacccttgtcaaatccctgtggtttttccaccgtcagcgttgtaaaaccaacagttatcaacattaatgtgtgagattttttctcaaatttctttttgattatagccgtagttcttcatatacagctcgctgtcccgccattcctttcttaccttaacccacagctgcaggttcacctgtgtgtccatcatgctttcaatctctttcctggcctctatgccaatgcgtttcagcatgctgccgccctttccgataatgatgcccttgtgagattctctctcacatacaatactggcctcaatatcaatcaggccgcccttgcgctccttcatcttctcaatggtcaccgcaatgccatggggaatctcgtcgtccagaaggcgcagcgctttctcgcggataagctcagcagcaatctggcgcataggctgatccgtcaccgtgtcctcatcatagaactgcgggccgtaaggcaggtatttgaaaatcagctcagtcagcagatccgtattcttatccttcaatgcagagagaggtacgatttccgcaaaatcgcagacatccttgtaggccgcaataaaggtaaggatttcatcctggttctttaccgtatcaatcttgttgattaccagaatgattggggtttttacattcttaagctgctccgctatatggcgctcgcctgcgccgatgaaggtggcaggctccaccagccagagaatcacatccacttccttcagagtgtgctcagccacgttcaccatatattggcccagcttattcttggccttatggatgccaggggtgtctaagaagataatctggcccctgtcatctgtgtacacggtctgtatcctgtttctggttgtctggggcttatcagaggtaattgcaattttctgtccaatcaagtggttcatcagagtggactttcccacattgggacgtccaatcaacgtaacaaagcccgatttcttctgtatattctcttccatttaattctctcttccttaaaattagtggtaaaggttcttcacctcaccaaacatgctctcctgggcgcgaatctgctggtcattgccaatcacgcacagcgccctggtgtccagcacagcctgtacaatatcagccagtgcctttatatcctcctgggtcacatccagaatctgttcccgctccttctgcaccatctcatccgtcacaccggaaaggtatgccgacagattcctggctcccctcagagaaggcgtaagaggcgtatcaacgtcgctcatggtgccgatgacatattttgtcatgtccctctcgtcaatggagaagcttctcagataatccggaattccttcatacacctggttggtggcctccaggttggggtccctgtaggataccaggcatccgtcgcccgtgcggctgaagctgctcatgcatccgtaagcacctccctttaccctcaggttcatccacagatattcatagttcatgatgacctttaagactctcagcgctcctgtgtattccagttttcttcctccggcttcctttcccgcaaagctgccgcatctggccacatagttaacctgggacgctgtcttaaagccctcattgcggttgtccggccggaatacaaactcatacgttctcccgtctccctttccaaggactgaacggaaggtcttaagttctgcaggcagcctgctgtagccttctgtatcagccgtgtatgccaccagcagattatctgatgtaaacagccgggcgcagacatccttaagcctggcaatcaattgtcctctgccggaaacatcctccgcgaacctgcggctgacatcctccagaaattgataatatccaacgcctccggtcatatcgttgaaggccgctgacgcagagaaatatgacgaagccctgccaaccgccgctccatgggaagcatcctccatcttcatcctggccctggaccttgtctcgtccagaatttcacccaggcgcttttcatcatccagtctggatcgggttagaatctccgccagaatggagaaggcaaagtccagtttatggtacagcacttttgcgctggcaacaaaggcccctgtaaactgtcctggatgcgctgcatccggataagacgacaccgcaaagcttacgccgccgctgttgaggtaaatctcgctggtcagatccccgtagctgtagtgctccgtatccacatatcccagcactgccttaagaagccccacataaggcaggtcctccaccggcacccggctggtgtcaaacagcaccttcagatatccgattccggaggtgaacaggttgctgtggataacgttcactccgtcctccatcttgacctcataagaaaaacggccgccttcccgttcaatgtcctcccgctgcagcataggaattttttccaggtcctcctgctgtgacggctcctcctggtactcctttaattgtctggtccgggcagtcagggcctcaagctcctccctgccaagggattccttataggtcttcagcctttcagccagattgcggtcctcctcagctgtctggttcaccctggggcgcaccgtgataaccgcctcatgaggattatccagcagataccggtgtatcagctgttcaaaatagccttcctccaccgcctttttcagatagtcaaaggttttctggtattccagatggagggtgggcttcccgtcatacagccagctgtccagagaccagagtccgtacataaggcccttgggcgcggaaccgtagtccgcctcgcggtaacggaactcatagaggttcagtccggccaacaggctctttctgtcaatcccctggtcagccagccttcgcagcgttccctttacaactgcaaggaattcacccttttgctccggattggcattcttggcaatgacggaaaaatacggctgcagaatcccgcagtcatagcctcccagtatatcctgaccgatccccgcatcaatcaatgcctgcttcaagggcgctcccggcgcgttaatcagcgtatattccaaaatctggaaggccacataaagtaccggatccaaatccgtacccaccacggtattgatggaaagataggtcctgtcctttgtcccttcctcctctgtgacagagtaggtgatttctctctggaccggctgttcaaagggctgctgcacagctatggccgagtctgcatggcagtcctctctgtcatattgtcccagatattcctggtccagccatgtaagcttctgggccatatccatgtccccgtagagatagatatagctgttggccggatggtagtaattgcggtggaacgcaatgaatttttcataggtaagctccggtatcacggcaggatctccgcccgactcattggagtaggtcgtatccggaaagagcacatttctggtaaaacggtccagaacactttccggtgaagaaaaagcgcctttcatctcattatagacaacgccgttaatagccagctcatcctccggcgactccagttcatagtgccatccctcctgaaggaatatctttggctccctgtaaatagccgggtggagaacgccgtccagatatacgtccatcagattctgaaaatccttgtcattgcagctggcaacagggtatacggtcttatccggatacgtcatggcattcagaaacgtgttcagcgaaccttttaccagttccacaaaggggtccttgaccggaaacttatccgagccttccagtacactgtgttccagtatatggggaagtcccgtactgtcatcgggcggtgtacgaaaaccgatatagaacaccttgttctcatcctcattggacatcagaaaaatcctggcgccgctttttatgtgttccagcaccatggccctggagtccatttcctccacgtacatctcttctgacacgcggtaagcggccagctcttttaccttttccagattccttccatctgccattgcttcaatctctccattctatcgttcattcagtcatatggtgataatagctattctgccatttttcccgcggcccatacaccggccaactcatatgttccgtccataccgtcacatattccccatgagcctgtccttcaaaatagaagcacattccctcacgcacagatggataaacagaaccgggtcggattccgcagatatgccgtatacgttgtcaaatccccatttttccgctgtaagcctggcacggtaaatatggaaattactggtgagaactcctatttccagcggcttgtccggtgcaatggcataaggaaccgagcctgtctttccgggcatggggatgatctccttcttgtccttcatccggtcctgctctatgacaatcttgctgtaagcaatgttctccaccgtgctggtggaatcggactccataagcagctgcctgggactgaccccgttgtacaccagataatcatacatgacctgggcctcgctgtctgcttcccccggccccttgccgccggaaagcaccagaatggtgtacggattctcctccgcatagacaatggccctgtccagacgctttttcagggaattgctgaccgtatgttccttgaccctggcccccagcacaatcacataatccaggttggcctttcccggcgtggctgctcccagaaataccaggatacagaggattcccagcacagccactcccgcaatacaggtggtaaccaccgacaccggcacccagcgggggatccgttccatatttctggcataataccattttccatataccagaaatacaagcagggccgcaaaaaacagccatatgaaggcaaatgaggtgcttatgcctgcatacacaactatgattataaaataaacaacgcaaagcactgccagcccaatgagtactccatctaacatcccaaggcacctcctgtctgccggagccaataaagcccaggcgcagtttcttcctcccgaattccgtacaaacaaatttccagtctcttccagttctcagctttgtctaatccacggcctcttcttttctccgcaggatatcaaaaacagacacattcccggacagcttaacccacagaatctgctttggatggggagcgctctcctgctcattgccctcatggtctgttatggactccactgtaacttccaggttctgtccgtcgggcttcatcacctcaatggtctcccccgcagaaaatttatttttctgttcaatcctgcaccggccccggctgtccgtttcttccacggtccccaggtaggtgtagctctttacataggtgctgctgtcatatatgtggtcatccgaagtgggcttgccgaagtaaaagccagtggtaaacctgcggttggtgcattttccaatttcttccctgtaccacgccagattcttcctgtacacagacggatccttcagataatcatcaattgccctgcggtaggccctggtgacagtggccacatagagagctgttttcatccttccctctatcttgaaactgtcgattccggcatccatcatctccggaatatactccaccatgcacaggtccttggagttgaatatataggtgccacgctcattctcatatacaggcatatattcaccgggtctggtctcctccacaagggaatatttccagcggcagggatgggtgcaggcgccctggttggcatcccttcccacaaaataattgctcagaaggcatctgccggaataggatatgcacatggcgccgtggataaagctctctatctgcatatcctgagggatgtggtcccggatttcccggatctccgccagggacagctcccttgcagacaccacccgccttgcccccagtccatgccagaacagataggtcccgtaattggtgttgttggcctgggtgcttatatggatttccatgtcaggaagaactcttctggcaatggcgaacacacccggatctgatatgatgagcgcgtccggcgccacatccctcatctcttcaaaataagcctccacccccggcaggtctccgttatgggccaatatattggccgtcacgtagactttgaccccgcgcgcatgggcaaaggcaattccctgtttcatctcttcattggaaaaattatgggccttggcccgcaggccaaaggcctcacctccgatatatacggcatctgccccgtaaacaacagctgttttcagcacgtccaggcttccggccggtatcagtaattctgtctttctcattccactctctccgtatatttggtgctgacggcaactccgtcccctatggggatgatggctgtctccagtccctttctgtgcttaagctcgtagagataccggcgcatcctgctgtggatggtcctgttcctgcgctccactgcaaatctggattccacgatatctccgtcctgaagtacattgtccgatatgaggactcccccttcaggcatcagctccagaatcatgggcagccagtgcaggtactggcctttggcggcatccatgaacaccaggtcaaaggtctggcccttaagtccggccagcaggtcatctgcatccccttccagaagggtgatacgcccttcctcacctgcgattttaaaatgttcccgggccgccggaatccgtttctcatacttctcgatggtggtgatgcggcagttttccggcatcacacggcacatgagaagagaagagtatcccacagcggttcctatctccaatatacgggccggtctcaaggctgccaccagggtccttaaaagggctgcggtttccctgcgtatgatgggcacccggtccctttccgcttcctgttctatggaatccagcaggctgccctggctggattccagggaacgtatatagtccgtaatcctgtcatttacaatcattgggttccatcctctgctgcatcctcaatccatccgccttccatctcctggtcctcgccttcataggtctgctcattggcctgggcctcctgggagtcaagggcatcctcccctgaccgggacccaggagccgcgtcagccggtatttccccgtctgtctctgccgctgcggctgcaccgtcctgggacgcagctgccgcagccggagatgtctcctggtccgaagcaccgctgttcccgttttccttctcagatgtcctgccctgggacgtcttggcttcagctgccttggcgccgccggactgggccggttttgcactgtcttcggtttccggcttttcattgagaagctggagtatttccttggatgtcatggacgtattaagggtataggtgcccggatagatggtgtcgtagtcatagaacttgctctggaaaataaaggcaaactcacttttaataagccccttatgcgcaagaaactgcgcagcatcagacacggattcctttgaatcaatctggactaccatatcctgtccgggggcctcgtccactgcctcggcaaaaaatatctcatggccaaaggcatagcccctggcaaccgcctcatacagcagcaggataatcaaggcatataccatgagcttcacggatatgccgattatggtggtggtgattttgttgatttccctagttctattgctcataatccattcctcttatcctgcccggcgtcttcatgaccgcggtatcccggaccggtgtgctgccgcccaggcagcacaccggtccgttatctgttatacctccatgataattggcagaatcatgggattgcgcttcatgcgcttccacaaaaagtcacttaaactgtctttaatgatgttctttatcttaccccagtcgctgacatggcggtccaggcagtcctgcactgcgtcgtacacaatggtgtgggcctcctccagcaaatcctcggattcccgcacatacacaaagcctctggacacaatatccggtcccgcaagcagctggttgctgtgcttctctaacgtcaatactactacaataataccattttgtgcaaggttttgtctatcccgtaatacaatattgcccacatcgcccacgccgaggccgtccacgaagatgcctccgcaggtaacatggtctatcacctcgcagctgtcctcgtccagggccaccacgtcgccggagttgaccatgacagcattttccttttgtacacccataaactgggccagttccctctgggccatacggtggcggtactccccatggatggggatggagaactttggatgcaccagggaataaatcagcttcagatcctcctggcaggcatgtcctgatacgtgggtatcctggcagattacctcagcgcccttcatggacagctcgttcaccacattggccactgccttttcatttccgggaatcggcgtggagctcagcaccaccacatctcccggcacaatggataccttcttatggatgctggcagccatcctggaaagggcggccatggactcgccctggcttcccgtggtaatgagcaccgtggactccggcgggtagttcctcaggtgttcaatgtcgatgagggttccctccggcacattgatataccccagcttgctggcaatatccatgatagtcaccatgctgcggccttccaccaccaccttgcgcccgtatttgtatgccgtgttcaccacctgctgaacccggtccacattggaggcaaaggtggccacgatgatgcgcctgttctggtgctccgcgaatatggcgtcaaatgtctttcccaccgtacgctcggacatggtgaatccgggacggatggcattggtactgtctgccatcagggccagcacgcccttcttgcccagctccgcaaagcgctgcaggtcaatgggatccccaaacaccggcgtgtagtcaatcttaaagtctcctgtgtgcagcacggttcccactggtgtaaatatggccagggcggatgcgtcctggatgctgtggtttgtcttcacgaattccactctgaagcatcccaggttcacggactgtccgtgcttcatcaccttgcgcttggtgttctttaagaggcggtgctcctccagcttatgctcaatcagagcaatggtcagctttgtgccgtatacaggcacattgacctgctgcaggatataaggcagggcgccgatatggtcctcatggccatgggtgatgacgaagcccttcaccttgtcaatgttctgctttaagtaggtcacgtccggtataaccaggtcaatgcccagcatgtcgtcccccgggaaggccagtccgcagtccaccacaatgatgctgtcctcatactcaaaggcggtgatgttcattccaatctgctcaagaccgcctaatggaatgattttcagcttgccctttccgtccttttttccatcccgtgccttctgtctggccggtgcgggaagcgcctttgattcaccggaatttctggagttcttggactctccggaattcctggatgccttggactctccggaatttctggactctccagaattcctggactcccctgaacctctggccgccttggactctccggaattcctggacgcctttgcgctgccggttcccttggaggaccttgcgccggcgctgtccttggactccctggcagcagttccggtctggttctctcccttttgtccgctcctgctctttgcctgaccctgtctggaacccgtatttttctttttctgggcttccccatttcctccctgttccttggaagcggtctttttctgagccggtcttctgttctgggacttcttcacaggctgctcctgtggggccgcagctcccgctgtctcctggacaccggcatcctgggcattgttttcctgtacggcctgattcgttgcctgtgcagctgcctctggcgccacctctgccgtattctctttttcttctaaattcaaattgattcctccaatctttctttctatctatttctcaaggtccacatctgcatcgcttaacagttcttcaaacactttcatcagtgcgtccagttcgctgtcgtcttccacaaactcatacacggcctcagcgtcctgctgtcctgacatatccttaaggatatagcactctccgtcctcgccttccggcgcgtctgtcacaagcagataactccttgcatttatccttgtttcttccaacacataaaaatccacggattctccggaatccgtcaccatggtaatcatatcttctctcgtcttttcttccatttcttctctcctggcgcctgtctgtcacgcctgacgcgaccggccgcattgtccatgtcccaattgcatcctaactatactgcaggctgtccagatacccctgcagaatcatggctgccgcaatttggtccacgcttttctttctgttttccctgcgaacaccgctttcaatcagaacccgttctgccgccactgtggtgagacgctcgtcccagaggataacctcaagatcggtacgcctttccagggccgctttgaactcctgggtcttttccccgcgctcgcccactgtattgttcatattcttaggataaccaagaacaatacgttcaatctcgtattcaccaattaattgctcaatcctcgcaagggtctgacgcatcttattctcgctggccctggtgattgtttccactgtctgggcagtgatacctaaaggatcgcagactgccaccccaactgttttcgagccaaaatccagacccattatcctcatattcaattcctccggtaaacgcaaaaaatcggaatgcaccataaaagcagctggcctatggccaactgaatgcatcccactcatatccatccgtacattactgtaaaggcccgtttccgggccttctgttattcacgccgcatatcctgcctgcccgtggcgggccggatgcccctggagcgcctctgtaaattgccccggaaccagtctgaaacagttcttatttcagacgggcatcaatatacacagccatcagttcctccagaatctcatcccgctcaaccttcatgataagacttctggcgcccttatggctggtaatataagtcgggtccccagacatgatataacccacgatctggttcacgggattataccccttttcagtcaaggcaatatatacctgctccagtacgtcgcttacttctatctttttgtcctgaacagcttgaaaatattgagtatcttttatattgcccatgtcatcacgtcctttaagtattcttctctattctacattatattttgctattcggcaatagattattttcttaattttttctaattattgtcatgtttctgtaaaatgtcgcacaatctttccgtcttttcggaaatatgttccttttttcaagaaaattccacctttaacatctcatcgttcagcagcccggaagcaaaaagctccataatacgcccgccaaactcttcccggttcattccgtcctccagcggcagggctgctctgacatactgaggagtatggcccatcatataccattttcccccaatctcagctgcctcctcaaacaggaccgatacccggctgcctgcaaagcgctccctgtactcacgcgacatggtcttttccagctccagcagcacgtcgctgcgccgggcctttacctgctccgaaacctggtcctccatgacagccgccctggtgccctggcgtttggaatatttaaagacatgcatctcataaaaacgcactgtctccagaaatcttctggtctcctcaaactcttcctctgtctctcccggaaaccctgcaatcacatccgttgtaatggccgggtggtcaaagatctccctgagtatgccgcagcgcctgagataatcctccgtggtataatggcggttcatgcgttttaatgtggcatcgcagccgctttggagggagaggtggaaatgagggcagaattccggaagtccggccagcttttcggcaaattccctggtgatgattctcggctccagggaacccagacggatgcgctccagtccctcaacccggtgaatccgctctatcaaatcccacaggggaccgctgtcccagtctccgccctttaccgggcttccttccatgtgctctgttccgtaggagcttaaatggattcccgtaagcaccacttccctgtaaccccgggccaccagccctttaacctcagcctccacatcctccggcttccggcttctgaccctgcctctggcataggggataatgcagtagctgcagaactggttgcagccgtcctggaccttgataaatgccctggtatgttctcccagacggctcacatgaagctcctcatactcccgggcccgggcaatatccagcacatagccgccttcatccccctgcctgtccttcatgtattcttccagaatatccgccagacgcgccttattgttattgcccacaatgatatccacgctgtcatcttccttcagggcgtcggatgccacctggacataacagcccgccgccaccaccacagcctcaggatttaacttctttgcgcggtggagcatctggcgggatttgcggtccgcgatattggtcacggaacatgtattgataatatagacgtccgccttctggtcaaagggtacgatttcataaccgcgctcctctaactgctgctgcatggcttctgtctcataagcattcactttgcatcccaggttatgcagggctgcttttggcattgtaaaacctcctgtttacggtctgttgcgaccctttatacatggcttgcgccctatggaactctaaccaaattaccatattgttactgcgtttttcatgcaatctcactattgacttttagtccccctgtctgtagtattaaagcaaagcaggattcactgcaaacataatccatacacacttaccacaaggagggtttttctcatgaaaacagttcgtatttcgttaaattccattgacaaggttaagtcatttgtaaatgatttatctaagtttgatgttgattttgatctggtttccggcagatatgtgattgatgcaaagtctatcatgggcatcttcagcctggatttatccaagccaatcgacctgaacatccatgccgagagctgcgttgatgacattctggctatcttatcaccatacatcatcgcttaatctgctgattcttcatccgctgcccaggcagcgtgacaaagcacataggtcatcagaaaccatcagagtctgccgaggcagactcttttttgcgtttgttttgacgtttgctccctgagcggactggtctgtttttcccttacccctggcagagaatctgttccgtggtctccagagcagtctccaccagctggtcgattttctcctccagacggcgctccgaactgtgaattacattgatgttgggctttgtcaccggatgcttggccacaaaaatggtgcagcagtcctcgtaaggctgtatggatgtctcgtaggtgccgattttctcagacacatccacgatttcctgtttgtcaaatccaatgacaggcctgaacacaggcatggtgcacacctcattggtggctgccagggactgtaaggtctgggaggccacctgtccgatgctctcgcctgtaatgaggccgatggagccggtgcgctccgcgatggtctgggcaatccgcatcatatagcggcgcatgatgatggtcagctcctcatgagggcacttatcataaatgtagagctggatgtccgtgaaattcaccacatggagattgatggggcccgcgtatctggccaccaggtttgccaggtccaccaccttctgctttgcccgttcgctggtataaggcggggcatggaaatacactgcgtctatcttcacgcctctcttggcaatcatgtagcctgccaccggactgtcgatgccgccggacagcagcagcatggccctgccgttggttcccacaggcatgcctccgggtccgggtatcatcagtgaaaacaggttgatcctctggcgcacctccacatggagaatcacatccgggtgatggacgtccacacgcatctggggaaacgcttccagaatcacctcccccatgtcgcggttaatctgctccgaagtcacgggatactgcttgtcccccctgcgggcatttaccttgaaggtgatgttcttatccggataaacctggtccatgtactccaccacatgttgtttcaggttctcgtaatccttatcctcaatctgcaccatggggcagatatccgcgatgccgaatacacgcttcagcgcctccaccgcatcgtcgtaatcatagtctgtttccgccttcacatagatgcgtcctgactccttggtgacgtcaaactgcccctccacgcttttcagcgcatagcggatctgctttatgagggcatcctcaaacatataccggtttttgcccttggtgccaatctctgcgtatttaattaaaaatgactggtactgcatcttttacctctttctgtcgcttaatcgtccccttcattgtcctgcggggccgaatcatttacacggttcagcctctgtggtaccttctcagcaccggcagaagctcttccaggacttccatgcaatagtctacctcttctcttgtgttgaacacgccgaagctgaatctcagcgtggaatccagcagttcctgcctgaccccgatggcctttaaggttccgctgattgccgggtgattggaagaacaggcggatccggaagaaacatagattcccttgtcctccagggcgtgaagaaggacctcgcttctcacaccctgaaagcttgcgctgacaatctggggcgcgctctccattcccttgcggctgttgacagtaacgcccggcagggacgccatgcggtctgtcatatagtctttcaggccggtaatatactccaccttctgctgatggtctgtgtagatttccctggccgcccggcccatgcccgcgatgccaggaacattttccgtgcctgaacgcatgtccttttgctggcctcctccgtagagaaggggacggatcttcaccttctcgtctatatagagaaaacccactcccttggggccgtgaatcttatgggcactgacagataacaggtcgattccctgcttcttaggacgtatggtaagcttaccgtaagcctggatggcgtccacatggaaaaggatggccggattcttcccatggataagggatgctatctgctccaccggttcaatggcgcccacctcgttgttcacatacatgatggataccaggatggtgtccggacggatggctgcttccagttcctccagggaaatgtggccctggctgtccacagacagatatgtgacctcaaatccctgctgctccagataggccagagggttgtaaaccgaggcatgttcgattctggtgctgatgatgtgctttccggccctctggttggccatggcggtgccgatgagagccatgttgttggattccgtgccgccggaggtgaacaggatttccttatccctgacctttaatgttttagcaatgtccgccgctgcctggcgcacatactgctctgcctccattccctttctgtgcttggcagagggattgccgtaatcctccgtcatggtctttaccacaatatccctcacgctgtcaaacacgcgggtggtggctgaattgtcaaaatatgcttccattatacaaactcctttacagcgccccttccagccgcatcataagcaccgacagcagggccagccccgctgtctccgtcctcagtatcctgcgtcccagactgatgggccgcacgccttttgaaagggccaattctatctcccgttcatcaaaaccgccctccgggccgataaacacagcaatgtcctgtcccggccccgcggcatccagctccgtctttgtgccgtccatccccgcctcatgttcataaggaatgagacgcacggaaaatccctggctttccacatagtcaaaggcttcttttaaggtcataatgccggataccctgggaaccaggctccgtttggactgcttggcggcgctttccgcaatggcctgccaccgcttgaccttggcctcttcctttttggggtccagtttaaccaccgtgttcctggtggacacaggcacaatgcctgccgcccccagctccacagccttctgtatgatgaactccatcttatcagatttgggcagtccctgaaagagccagattctggaaggaagctctctcccctcctcctctgtctcaagaatccgtaccgtgacttcctgtccggcgatttcctccgcctgacacaggtagtccctgccggtgccgtcgctgaccagcatttcctccccctgccttatgcgcaggacattctttatgtggttcacgtcagatccggttatccttatcaggccgtcctccacctgctcagggttcacaaaaaaatgatgcatggctttccctcaggtccttccttattcatcctatttccttctggcggtcacgctcacccattctccctggtatgtgatttccaccacttccagctccggacagcgcccaaaggcctccttcaccgcctcttccttcatatcaataatgccggaggtgatgaagataccgccttttttcagatgggccggtatctcatccaccagcagaataataacatccgccagtatgttggccactgccacatcgtacttaccgtatcccgcccattccttgacggaaacatcgtctatgatattaccctggagtacatggaacctgtcttcaggaatgctgttggcttccaggttctcccttacggcgttgatggcattttcatccaggtccgtgccccacacctcttttgcccccagtttcagggctgtgattcccaggataccgctgcctgttcccacatccagcaccaaggtgtcccggttcacgtactttttcagctggcggatgcacagctgggtggtctcatgcatgcctgttccaaaggccgttcccgggtcaatctgcaccagaagcttgtccttgtgctcctccggtatggtttcccaggtaggcttaatcagaatatcgtccactgtaaagggcttaaagtattgtttccagttgttaatccagtccttgtcctctgtctccgacgcggtgatggtcctggcgcccagatccgcaaatggggacagctcgtccaggccttcttccacccgtctgaggtaatccgccacatccgcgtcatcatccaggtaaaaacttatcctggcaacgccttcgtccggaggaagctcaggaagaatgtcaataaacatcccctttgtctccttctctgtcaggggcacattgtcttcgatttcgattccttctataccaatgtcgtcaaacatgctgctaatcaggtctacagcctgtgttgtggtagttaatgtaaattttttccatttcatgtgattctctcctatttcctatgtgctgtttacgggctgcttatgtgttgcttattattttaatgaacaataccccaagcaccgccaataccacgggacggaccaccttctggccgtcgtgggccaccatgcctgccccgatgtagtgtcccgcaatggaacacatgcctgctgtaagccccagcgggtagtaaacatttccggtggcaataaaggtcaccagggccgctatattagaggaaagattgattacctttgtctgggcggaggcgctgcgggcgtccatcccggcagcccctgtgagaatcagaatcaggaaggttcctgttccgggtccgtaaaagccgtcatatccccccacaaaaaaggccgccgccatggagatggcaaataccttatttctggaaatatcttccgtcctgtccctggctcccatatccttgttcctgagcacgtaaaacgccacaacgggcagcaccacaatcatcatgtgcttgatgacggattccggcaccatgagggccagatgggcgcccagagccgaacccataagggcggccgccgaggagcacaccgccataagcacctttcctttgagaaaaccgtgctttgccagccgggccgtggaaacagtggtgcccatggccgagctgagtttattggtacccagggccacatgggcgggcacccctgcaatgagatatgcgggcagagcaataagcccgccgccgcctgcaatggaatccaccagtccggccaggaacaccaacgggcacacaattagatattgtaacatgattgtatcctcttttctgtaaaacaacctttatattatcacatattatgaacactggcaataagcggcaatttttttttgcaataaaaaagccccgccctgcattaacattatgaacggatgaaagaaagatgccggggcaggaacgggcagccgcgaaagccccaggggacagggattccggaacatacaatcataaacctaaagggcggcaaaaagccgcacgaaattccaatattgcattacactccatcacacacacataccggatggaacggctcccaggcattgaaccaaaatacaaaagaaacggattaccatacagttaccatataaataaggatacaaaagaaaaaattgcttctggtcttaaagttaccatacgacaaaaacagaaaaccccggcgcctgcttgccacaggcgccggggttttccgctaccggaccaaagccccgtccgctcccaccacatagccgtccggggttgtggtattcacaaacagccgtcccatggtaccgtcggactgggtattgaaataataaagctgtccgtctatcatctgccagcccgtgcgcatcatgcccagagtgccgtcatccagaggattcagataataccggtttccgtcgctgtccgtgaaccatcccgtcagcatatatccgttctggtcaaagcggtaccagcggttatgtatcagctgccagcccccggacagccagctgccgccgcagagctggaaccaccagccccccggactgtatctccagccctggccgtactggaccccgggccctccattgtaatgccaccagtcgtcatcatcccagtcgtcccagtcatcccagtcatcatcattgggatcccaccagtatccgggatcaaactgggccgtggacgtatccggcacattggtattaaagccggggtaagccctgaccgtattatctgtggtaacctgggcattgccctgaggcgctgatgggccgccgtaatcataggtccctgacggcgcagtcccataatcatactccacaccggggccgcccctgcggtaatggtcataataccagctgtctcccggcccataggccaggcagtcctgtaccggcaggaaagacagagctgcggcagccgccagtataagcggcacagaaatcatccttctcatgtttttctcctctttttcttaggtctgtattacatttcccattacattctcaactaccttcttacgcatatctaaaagtatatcacaacacaattgacattttcaacacatgagcatacaatagttgtatgtgcaattgttgcgaatgcatttatttgacttatgtaacttatgttacagttcaatgaaggaggattccggaatgaaggaatttttatcttatctgaagccttacaaaagggacgcggtgctggctgttttctgtattgaagccgagaccgtgtttgagttaatcatcccgctggtcatggcttccattgtggatgtgggcgtagccaccggggaccgccattatatcctgatgaaggggctgcagatggttctctttgcccttatctcccttgtgctgggccagggctccgccatgttctcggcccgttgcggccagggactgggggccgaaatccgcaaggcggagtttgcaaagctgcagcagttttcctttgccaacacagaccatttcagcagttcttccctggtgacccgccttaccagcgacgttaccaccatacaaaactctgttgccacaggcatgcggcccgctttccgctcaccggtcatgatgctcaccgccatggccgcttccttttacatcaatccgcagctggcactggtgtttctggtggctgcccctgttctgggtgtgctgctgtttttcatcatcagccatgtgcgccccctgtacagtgtgatgcagggcgccatcgacatggtaaaccgcatcattcaggaaaacctgaccgctatccgtgtggtgaaatcctatgtccggggcgattatgaaattcacaaattcgaggaggtcaattacaatctgcagttcacagcggaaaaagccttccgcctggcagtcctcaatatgccggccatgcagttagtcatgtactccaccatcctgtgcatcctgtggttcggaggcaggctggtcaccataggtggcgtgaaggtgggcgagctcaccggtttcctgagctatgtgatgcaggttttaaattccctgatgatgttctccaatgtgttccttatgaccaccagggccctggcttcctggaagcgtatctcgcaggtcatggatgaggaaatcgacatcagggaggatgcgtccagcaccctggaagtaaagcacggtgatatccggtttgagaatgtgtactttaaatacaatcaggaggctgccgaatatgtgctctcagacatttccttccatataaagccgggacagaccgtgggcatcattggccagacaggcgctgccaagagtacgctggtgcagctgattcccaggctctatgatgtcaccaagggcactgtttatatagacggccgcccggtccgggaatactcccttaaaggactgagggattccatcgccatggtgctccagaaaaacaccctgttttccgggacagtaaaggataacctgcgctggggcagggaaacagccacggaccaggaaatcgaggaggcctgccgcattgcctgcgtggatgaattcatcgaccgcctggagcggggatatgaaacagagctgggccagggaggcgtcaatgtgtcgggcggacagaagcagagactctgcattgccagggccatcctaaagtctcccagggtgctgattctggatgattccaccagcgccgtggatacggccacagaggccaaaatccgggatggactggcaaagagcatgccggatacaactaaaatcatcattgcccagcgcatatcctccgttgcccacgcagaccaaatcatcatactggaggacggacgggtgaacgcggtcggcagccacgaaaccttgctggcttccaaccagatttatcaggacatctatcattctcagcaggaaggggcgaatctgtaatggcaagaatagcaaattataaccgtcccaaggataccggacggaccttaaagcagatgttcggctacctgggccggcacaagtggtatatgctggtcatcgccctcctggtggcagtcagcgccctgtccagcatttcaggaacatacatgttaaaaccagtcatcaaccgtttcattctcccgggtgacataccggggcttgtaaacatgctgctggtcatgggagggctgtacctgtgcggcgcactctcctgttatgcctacaatcagatgatggtccatatttcccagaaggtggtgagcgaaatccgctccgacctgttccggcacacccagcgccttcccctgacctactttgacgcccatacccacggggagctgatgagccgttttaccaacgatgtggataccatcagcgaagcccttaacaacagctttgccatgatgatacagagcttcataaccataacagggaccatcaccatgctgctggtgctggactggcgtctttccctcattgtcatggtttttctgcttctcatggttttgttcatccgttataatggaaaaaggagcaggaagtattttatccagcagcagaagtacctgggaagcatcaacggctttgtggaggagatggtggccggacagaaggtggaaaaggtgtttaaccatgaggcgcaagactacgaggaattctgccgccgcaacgaggcgttccggacagcggccaccagggccctgacctattccggcatgacggttcccaccattgtggccctgtcttatgtaaactatgccctgtcagcctgtgtgggcggcctgttcgtcctgtcagggttaacggatttggggaccctggcgtcctatctggtgtatgtgcgccagagcgccatgcccatgaaccagtttacccagcagattaactttcttttggctgccctgtccggagccgaacgtatttttgatatgatgaacgagatccaggaactggacgaaggcactgtgacgctgtgtaatgtgcgcaggaacgaccagggcggctgggaagaatgcagggaattcacccactgtttcgcctggaaggtgccgcacgaaggtccggctgatatggcagagccccataccggctcccagtccggcttccgtctcattccccttaagggggatgtgcgtttcgaccaggttgtgttcggatacacgccggagaaaaccattctgaacggcatcagcctttatgcgaaaccggggcagaaaatcgcgtttgtgggttccaccggcgccggaaagaccaccatcatcaatctggtaaaccgtttctacgaaatacagcagggaaccataacctatgacggcattgacataagaaccattaaaaaggacgatttgcgccgttccctctccatggtaatccaggatacccacctgttcaccggaaccatagcggacaatatacgttacggacggctggatgccacagacgaggacgtggtaaacgcggccaaggtagccaatgcccactcctttatccggcggctgccccagggatatgacacgccccttcacagcgacggcgccaacctgtcccagggccagcgccagctcctggccattgcaagggcagccatctcccgcccgcctgtgctgattctggatgaggccaccagctccattgacacccggacggaaaaactcattgaaaagggtatggatgcgctgatggacgggcgcactgtcttcgtcatcgcccacaggctgtccacggtccgcaactccaaggccattatggtgctggaaaagggagaaatcatagagcgcggtagccacgaagaactgattgaccagagaggacggtattataaactgtacacaggccagtttgaactggaatagagaaaggaaacatgaaccatgatgaaacaagagcaagtgcgccgccttctggtgagggcggaaagggcaaggaaacatctgatgcagccccatttcacccggatcggccttaccttcggccagggccacgcccgcatcctggatgtactgctggcccgggaccatatcacccagaaagaactgtcagatctctgccatatggatgtaaccaccatgtcccgctccctggaccgtctggaggaatccggctacctggtaagggaaaaggatccgggatgccgcagatcctatctgatatgcctcaccggcgatggtgccgcagaggcccgcagggtacgcaaggtgctggagatggtggatgaggttatatggaacgggctggatcaggatgagatggaagcattctgcggcactatggaaaaaatatgcagaaacctggaggaatgcgattttaaatttgatgagcaggaaacgtaagggaaaaccgcccggtcagaatagaactattccggcagggcggttttcctgtttatatgtttattttattcataccatttcatccgtctgccggttccatctactgctggttcagatatgtacggatattatccagcacctttttgctgagcaaatcaaaggcctgctttgttcttccggcagagatatgggcgcagaatacgcccggatggcgaatcagttcgccggtgctgtctcccagcgcgccctctgtatcacagataaaataattatttccctgatccagccatgttttcagggcaggaaggtcgaatgcaggtccgatggaggtattgaacaggatttttccctgtcccagctgtgtgaattcttcctcatgaagcagaatcacattcttattcagacaggcaaagaccacctcgctgcgggccagcagttcctttaaaggcctgtaaaccagcccctggtcttccctgtcctgcttcctggaacggctgtaataggacacatccgctcccatgaatttcatggcatccgctatcattcctcccgacacgcccattccgatgatacccacctttaaatccgtgatttcaaccggcatatcccgaaacatgggccggtcgaagccgtgaaggaaacgcaccagctcgcagagcacgtattccaccactcccctgtctccgtaatccctgattccaagcactgtaatgccccgttccctggcgcagacaatgtccacattggcgctttcctccgaatagaggctgcagcacatgccaatgtaccggatagagggacagctctcaattacatagcggctgattctggatgtgtagcttaccagcactgcgtccgcatccccgatgcgccggatgatttcctcatcaccggacggaacatcttcatataatgttatctcccctgcatacccgcgcagctcctcctctgcctgtgaaaccaggttcacaggctctattgccactaattttttaaacatgtccatttcctcctaaaatacaatgggtgatacaatattctgcaaaaccgccaccacgctccagccggcaatggcgctggtactggagtaaatatccacaacagccttcacgccttctatctcggatgtaatcttatggtcatccccaaccatgcccggaacgctgtatatatccacacgggtatcctccggacccacggtcgcaagggatgaggccacagccacattcaccttggtgggaaggagtgaaatggcttcctttgcattaccatggaatacgtgactctcctgtgtgtcctccatcaggcgctcttcaaaaagcggggttcccttcaaggatgccggtccctttttggtcctgatgcctgcctctgcctgccccataagggatatggtccgcagcacatcaaaacctcccactgcaccggatgcaatgtacaccctggttccatggacggcagctgtttcctttacctgtccataaaattccttatctgcaaacgctccgatggacagcacaatcatactggctccggatgccagaatcttcactccgcagtccttgaccgactggaccgaagctgcctccgcaacatagtcaggggccagcgccagaagctcgtctatggtgctgcatgcccggcacccgcctttttttgccagaagctctgtcttttccctggttctgcccaaaactcccaccagctcatattcatccagcattcccttcaggccagcttccactataatatcggccagatagccattgcccaggattccaagttttaattttcccattgtaacctcctaaaacgagggctgaacgctcaataaaagccttcagccctccatgtctctttttttatggcttagtttgtatagttgtcaaaatatccctgaaccaggataaccggtgttcccttatcgccggaaccgctggtaaggtcgcacagagagcctataaggtcggtaagccttctgggcgtggttccctgggatgccatgtcgcccaccagatcggatttcttttccttgattctctgggaaacagcattctttaaggcttctccggacagatccttaaaatcattgtcagccagatattttaattttacttcgtttggcgtgccttccagtccctctgtattggcaacagataccaccgggtcagccaactcccagatttttccaaccggatccttgaacgcgccgtcgccgtataccataacttccacatgctttcctgtgcggtccaggacttttttctggatatcgttcaccaaatccatacaatcccgcgggaacagcttaatggtgtcctcggttgacttgttggagcccagaaggccgtatttttcattgcagccgcttccgtccaccggggcattcaggatatcatccatgccgcataccacctcggctcctgcctcctttaagatgcgcttggtgcgcatacgtgaatggatgtcacaggtcagcaccttcctggtatgatttaagatttctctgggattatttgcaaataccacctgggcctctgcgccctgctcttcaatcagctggcagtaataggacacatagtccactccggtaaacgggtgcttattctccccgaacagttccctgtagcgcttcaaatccagcacatcgctgtaagggttgatgccggcctcatctacctggtctaaggataccagggaattccccacctcgtcgctgggataactgagcatcagcaccaccttctttgctcctctggcaattccctttaagcagatggaaaaacggtttctggacagaatcgggaaaatgaccccgatggtctctccgcccagctttgccctcacgtcctctgcaatggcatcaatggaagcataattaccctgagccctggcaaccacggactctgtcacggaaatgacatctttgtccctgatctcaaagccctcgctttccgctgcgtccaaaacgctgtccaccacgatttcagcaagattgtccccttcacggataatcgggcagcggattcctctcgagattgttcctacttttctttccatatgtatcttctcctaatatattataattttcgtcatactattttattatagtataaaatacgggattgtggaagtatttattttcgcggaaaccatacgcgggaaccataaacctgcagggacgccgcgggaaccataaacagcagcccggtatcactttccttcggtgacatgggctgctgttttttccggatattttttacattcccggctctggttttaagattttcgtttccctgattttggttgggatggctttgacacagattgctttggcttgtgcggttccggaagctgaccgcaggtatccaggaccagggcggtcagaaactctctgtcatccagctcctccaccagatacattcccggacggccgccatgaggtgccaccggttctgcttccgggagatgcttatgtcctgcttctgtcacctttatataaaactggttgttctctaccgttccaaagaacgttcccccgcaccacaggccatactcgccaaataattttttataggaaatggcacctgcgccgcttaactgcgcagctacatactgaacatattccaggctggaagccatattgggtcctccttgtttgatatgtaatctgtcaatccagggaccggagtacttccagcatcttttttaagcctgccgcgttttcctccggcgtcctggcagggtcctgctggtcataccggctgcacgggagttcactgcatctgccgcagtggggcagtttcttttcctccacgcagcactggtatatactgcaccgctcctcccctgtgtattccagccagaatggttttccctgtatctttgggcaccccccgcattccttttggtaataaggacattcattgcagatacatccgcagcatgccacaatattctccatcatccttcctccttgctatgagcacttagatgctgtgtttcagcactttacacacggcgtacgacttccccgttgcatacgtataacataaatggatataattatgaaattttgtatgttgcagtatataatgcctttcttcctctggatttccgcctgactcccatataatcatctgagtaacattttcatttatatgttttataaacttatcacgtactttttcttgatgaaaataatggtaaaatacagttagcagtattgcaatatcatatttttcatcaactttatagtcttcaaatttttgtctcacgactttacaatttatatataataattcatttatcttatgtgtgagaacatagtgaaaattatctggctcaagcaatattacatctgcccccattctgcaaaatgcctgccccatatagcctaaatttgcaccaatatcaatcaccctttttttcttgaatcttcgagtacctaaaaattctaatatatgatgtaaccttgattttgtgtactcctcacgatgaggatggatgtccataaaatacgggttcaatattggttgatagaattcagtccttttctgctccaaaataattttatgtacaacatttactatatctagattacaccaagtttcataatcttttctcgtagtctgaactggtatttttgatataccagaataatataaaaatgttgttctatgatgaccatcaagtaagttaaaataccccttgtcattccactttgctttcggtggatggttaataaaaaaatccattcccatattcaattcacgttgcatgattttaaattctcgaaatcttttttcaataagctgttcatctgtatagcctgacctcatccctcttgataaaaataatttttgataccaatcactgtataaagaggggtacgctatgccctgtataaaaaacaagtaaagatttctatatggttcaaaagatatgataggtatattttcaaattgactattttgcagtttccattcctctgcatattcatcaaaattagtaatatcctcttttttttctgaaaataataattctattggaatccaggctacaacatgattttcatcaaggtcatgaataaatgctgtgtcctttaaatctgaatttaatatggttttatcattaatatattcctcttgaaatatacgttcttcaatatctttaaaaataagcgggaattcagaccgcaatttttctgtattcaataacttatgtgtaaattcttcatccgcgtcttggaactcatttctatttttcacaaataaaactttttctaaatccactttttcattaatacatgttcttaatatttcgttattatgattcaatatacatacaattaaacaatcaaaatttaattctttaatctgatcaggcttataaacttttgcccccataaataaatctttctttttataagagtcaataaaaccaactatcttatgatttaaaaaatacccctgtctcatataattcccacttaaattacctgttccccaaattaatatattcataatactgccctttctttttcaataaaccgctttcctttagcttatctttttactctatgtaaataactatttatatttttctccagcttctccctattttctaatctatctgccacccaagaggcatcataatgatgtatcgaaaccgtattttccgttattccacttcctattccgtaggggccgacgggagctaatacttcagaaggatataccgtcaaatcctcaaacttctgaaatgtgttattcattcttaccccttcatccaataatactttcgactgataaatcgggcatgccgcaggaagcccatgatgcatctcaaataatagttcttcataaacttctaatattttttttataattctatgtcctttag

SEQ ID NO: 3187 - DNA, 1712 bp, Unknown
  gut microbiota DNA sequence
gggagcaccgcattgggatgcctatgccagaggcgccattctgggccttacccgcggggtgaatcggtatcatattatccgcgcgactctggattccctttgttaccagaccaatgatgtgctggaagccatgaagatggatctgggacaggaggtgaaacggctgaaggcagacggaggggccagcgccaacaactatctgctgcagactcaggcagatttaaccggcgtccaggtagaccgcccggcctgtgtggaaacaaccgccatgggagctgcctatctggcaggtcttgcagtgggattctggaaaaataaggaagagatcgccagaggatggaaagcggaccgcagcttcttcccaaagattgaagaggaagtccggtgcaggatgcttaagggctggcagaaggcggtacgctgttcctatggctgggcaaaagacgggatttaagaagttcagataaaaaattccagtaaaaatacagctgtgcaggctgcaagggatacatgaaaaagactttttcccttccaggccagcaggacggccacggccagagctgcggctccgcctgccgcagagcgggtggcatagaggatggccggaaaggtcatgacggagagcgtcacatagggaacataatataaaaaagaacgaagaaaggtatttttgatttcttttcgtatcagtgtgagcggcagcagtcggatcagataggtcactgctgccattactgctatatagacataaatattccgattcatttaagcttcctcctttacagggcagatcagggcggctcctccggcgataacaaaggtcaaaaggatgatcttaaatccggatgaaatggtatttaataccgggatcagggtaaatacaaagctggctgtcatggagagcaggaccacagcccgaaggatcctgttttctcttgccggaggtacgatgatcgccagaaacattccatagagggccacgcccagggcatttaaaagccgttccggaagcagactgccggagagcgcgcctaaaagcgttcctaaagtccagcccggcacagcggcgctcatcagcccgtagctgtaaaaggggcttaaggttccaggatgacagaccgacacgccgaaaatttcatccgtcaccccataggccatgagaaaacgatggaataaaggcatcttatgatccagcttctgggaaagggagcaggacataaggcagtagcgcaggttgatcacaagctgcaccgcggccatttccagataagaggagccggcggttatgatgccaaggccggcaaactggccggcgcttgtaagattggtaagggagataagcacggactggaaaacagagaggccggagcttaccgccatgatgccgaaggtaaaggatacagccagatagccgaggccgatggggatgccgtggatcaatccggaataaaacggacgtttctgctgattcatactcgtgtttccctcccttataccgatttccagaggatatcccggttgacggtctgataaaacaggcgccggatttccttcggatcctttgtttgtcccagaatccacatggtctttgtcactgctgcctccagagtcatgtcataggcttccagcaggccgaattcctgcttgatatttttgcctacctcatatacggacatattgctgccctcatttgtgacctgtgtggtcatgat

SEQ ID NO: 3188 - DNA, 5222 bp, Unknown
  gut microbiota DNA sequence
atgaaagtggattatgcgcttgatatgaaccaggagcatgtggcagactgttatcttgcgattaaggcacagccaaaggactgtaagaattttacaatttgatcagatctggtaagttctctgcttcgttgcagatatctgtctgatccaaacagaaaaaggtcagtgatctgtgtgtatggatgacacgattcactgacctttagtttatatgtctgactgcatttatctggcagttttgtctttcttgaattttgcaaagaaacctttctttttgggagccggtgtctgaagggaaccgcggattccttttacgcctacaatataaagaccgcttacttcggctttgatttctttcttaagcggaatcaggtcgaaaaccttctcatctgcgatcatgatcgcaatctttggtccgattttagctttaacgattggaagcttggaacggcgcataagtttaggtgtctgttcaattaccatctgaggaagtccggattctttcagtggcatcctctttttatcgataaccagcatggaaacggtttgtttagttgcttcaatctgagcctgctgttcttcctgtttcttctgggctttttttccgaagaaatataaaccgatcagtgcagcgatcaggataacaagaatgaccagaaggactattgttactgtactcatttgcatcctccctaatgtatgtgttttcacagggactgttggtacggacagtccattgcataaaaattattttatcattaaataaggtaaaacgcaattgcaaaaaaagaattaatggatggaaagcggtagaaatttacattatgaaaggttataattgtagcaaaactgtaatgcgacaatatttgccggagcgaacagtagtgggaaatatgcggaacagttaaagccatttttacaggatggaatcataatgtgtggttataatatatgtaacgggaattgtggagttattttgtgacagaataatttgtgggtaaaaaatggatatgataaaaaggagaaaagcatgagcgaattaaagcccgactctgagaagaaagaggagcgactttcagataaggaaaaagtaaatacagaaaagacaaatgcagaagaaccaaatgcagaagaaccaaatgcagaagaactaaatgcagaagagctaaatgcagaaaaaccaaatgcagaaaaaccaaatgtagaaaaactaaatgaagaaaaaccaaatacagaagagatagacgaagaatctccggcagcaagcgaggacgaagatttcttttttgatgataataaagcttatgaagcccgtagggcagccagactggaacgccgcaataaacttcgccgcagaaaaaaaagactgcgtatcgcaggctgcatagtggtggcggcagccgctgcaattgggattggaataggattttacggggaagaactgcagaattttgtcagtgagcagcaggttaagattgcgcagatggtgaaatctgcagacaggaaaacagaagaagaaaaaacagctcagcagacaaatgcagaggcagaagctgagaatgcggtgacacctgaagttcaggatacggatggactgagtgaagaggacaaaattctttacaggcaggcaaagtatgctgcaaaacagtatgattatgataaagccataagtatgctgcaaaacagtgagacttatcagacaagtgagaagtttcagcatgcggttaaggtttatcagaaaaagaaggaatcctgcgtttcctggccgttagaccaggtgacacacgtcttttatcatactctgatcaaagataccggtaaggcttttgacggggattacaagtcaggagattacgatcaggttatgacaacgattgatgaatttaaccagattactcagagcatgtatgataagggatatgtcatggtcagcatttatgacatggcgacagcggatgaaaatgggaatatgaatgcaggggagattctccttcctccgggtaaagtaccgtttgtgctttcgcaggatgatgtgtgttattatcattatatggacggggacggatttgcaaccaaacttatcgtagatgaggaaggaaaaatccgcaatgaatatgtggaagatgatggcagtatttccgtaggcgattatgatatggttcctctgatcgatcgttttgtagaggaacatcctgatttttcttacagaggtgctaaaggaattgttgcccttaccggttacaatggaattcttggttatcgcacagacagcagttatgaaacccgtccggatgatctggatgcagataaagtaaaatggctggatgagcatccggattttaatctgaatacagagagagaaaatgcagccagagtagcgcaggctatgaaagatgaaggctggctgtttgcaagccacacatggggacatcagaatgtaagtcagatcagtctggagagattacaggcagatacacagaagtttaaagagaatgttgatcctctgataggcggaacagatattattatttttgcatttggagcagatcttaccagtgttgaagattattcgggggagaagttcgaatatcttaagagccagggctataattattactgtaatgtggattcaagccagtattttgtgcagatccgcagtaattatttccggcagggaagaagaaatctggacggatacagaatgtactataatccggaacttctctcagatctgtttgatgcacagtctgtgtttgatccttccagaccggtgccggttccaactatggggtgagtatgatctctgtgcataactgaaaggggacaatatatgagaaaaaggatagcatgtgtaacagcagctattttgagtatttcgttaggagtaagcggatgtgggctcattccgtttgaacaggatattccatttctgagttccatagctgaaaatgtggaaactgagaaaaaaacagaacagcagacaattgatgaacaggatgctgatacagagaaaagtacagaagatacacagcaggatgatggtctgaatgagggagagcagactgacaacgaagatacagaagaggcagatgagaaacaggaaaatcctatggagcaggcagcgcttatggctgtacagtatgattatgatggcgccatagaactgcttaagagtcagccggattacgaaagtaatacggatatgcagagtgcagtttcggattacgaaaatacgaaagccacctgtacagaatatccgctggagcagatcacgcacgtgttcttccatacactgatcaaagacactgccagagcatttgacggggattcagacagtaatggatataaccagtatatgacaacaattgatgagtttaacaaaatcatacagagtatgtatgataagggatatgtcatggtcagtccgcacgacatggcggttatcaatgaggacggaactatatccagaggcagtattatgctgccgccgggaaaaattccatttgtgctttctcaggatgatgtaagttattatcactatatggacggagatggtttcgcatcgaaacttgtagtggattccaatggtgaggttaagaacgaatatattgaggatgacggaagtgtttccacaggggattatgatatggttccgctgatcgatacttttgtaaaagaacatccggatttttcctatcatggaagaaagggaatccttgcaatgacaggttatgatggtgttctgggatatcgtacggatattgcatataagaccggaaaaaaactgcaggatgatcagaaaaaattcctggaagatcatccggattttaactataagcaggaagtgaaaaatgcaaaaaaggtagctaaggctatgaaggcagaaggctgggaatttgcaagccatacatggggacataaggatgtggctgccacttctctggatgatctgaaaagagatgataaaaaatggaagaaatatgtggctcccatacttggagaaacagatatgatcatttttgcatttggtgcggatatcggaagctgggaaggatattcggcagacaatgagaaatatgagttttataagagtcagggataccgctatttctgtaatgtagattccagtcagtattttgtacagattacagatgattattttcgacagggaagaagaaatctggatggatacagaatgtattataatccggaaatgctcagtgatctttttgatgtatcggaagtatgggattcttcaagaccaactccggtacctggaatgtagaagggagtattgattattatgaagaaaaaaatatatcttgccatgcttgcggtttgttttgcactgacagcatctgcgtgtggcaatggcggtgctgttatcacagacggtacaaagaccgaaggagctgctgacgggaagaaagcagagacaggaactacgcgtcttgtgtctgttgagaatgtagagaaatatattacgatcggagaatataaaggactgactctggacaatacggtggatgcgatcactgatgatgatgtacaggcgcagatcgatgagaatctgaaagataaggcagaacctgtatctgatgcggcaaaagaaggggatctggtgactgtaaattatacaggcactaaagacggacagacttttgacggcggtactgccaataactatgactttgtgatcggcgacggacagatgtttgaggaatttgaaaatggtgtgatcgggatgaaaaagggtgacacaaaggagattaaaattgattttccgtcagactatgcagacgaaactctggcaggtaaggaagttatatacaaggttacggtgcagaacgtgcggcgtgaaggagaacttacagatgaatgggttgcaaagaacactgattatacaacagtagatgattatcgtgagagtattcgcagtgaacttgagaaaaacgcaaaggaatctgcgcaggaggttcttaagaatactgcatggagtacagtgcttgagaactctgaagtaaaagaatacccacaggaagatgtggataaggctgtttctgaatttaagaagagtatggaagtttatgcaaaacaggccgacatgactctggaagagtttacagacagtcagggtatttcgcaggatgattttgatgaacaatgtcagcagtatgcagagggtaaggttaagcagaacctgatcgtgcaggggattatgg

SEQ ID NO: 3189 - DNA, 20014 bp, Unknown
  gut microbiota DNA sequence
tctgaatcattcgcatcagttcgtccacagactcccctgccaggccctgtttagaaacattgatggaagtcaacggaggcgtggtgacctcacagtttggccggtcgttgaaaccgatgatggagatatccccaggtactttataaccatgttccgagaatgcgcgaagggcgccgctggccatggtgtcatcgtcacagacaaatgcgtcgggtatatcgtaggaggggtgactgtcaaaaaactgccggatatcccggtaactttcttcttccgaataatggacatccaggatatggccgtcagagaaggaaaggccaaagtgggcaagggcatcctcgtaaccgctctggcgctccttgaaactgttaatgcggatcaggctttttaaatagccaatccgccggtgtcccatccgcaccaggtattccacggcttgaaatgtccccatctgattgttgatggaaacactgttgcaggaaaggcgggagaagtcattgtccagggcaaccataggaattggaagctcctgaaggagttccatgtcttcatcttccatttccgtggcaaagacgatggcgccctggcagtccagttcctctaagtgggcgagctggggctccatggattttcgtttatcaagattgcatagaaggatattataaccgtaggagcgggcgcgtgtttctatgctttccattaaaaggaggaaaaagggatgaagatccagaacctccccatgacgtttataaatgatgaagcacaggttgttgcttggcacagccggtgctttttttattaaattatcacagcccatctcctgaagttctgtgagcaccctgtccctggttgaatcggatacgccgggtttatggttgataattagggacagagcggctggtgatatgccaagcttctgagcgatttcccgattagtcatagatagaatctcctttatcaatttctactataaattatagatgaacgaaatgaagaagtcaattgtttataagaatatttagtgaacgattactgaatactattctgacttatgaatttactgtgatggtttgagatggatacaataaacgtaattagttttgtgtggcgcaaacgctgcgtttagttcaacgtgcacaaaaaaataactttaaaaatgttaaatatttagtatttacaaactaaatatttagaagtagaatctaaatatagataaacaaagaaaaaatatttaggaggcagtaaagatgattcagtatgagaaggtaaacggaaattttgatttaacaggaaaagcagcaatcgttgtaggaggcgcaggtggaatcggagaggccacagcccagatgtatgcaagaaagggagccagggtagccatcgttgactgtaaggataactgcccggaagtagcagcaaagattgcagaggagtttggagtgcaggtgattggcgtaaaatgtgacgtgaccagccaggagagtgtggacgccatgatgaaggcagtattagaggcattcggagaaatcaatattctcgctgccatgcctggattcgtggatctctaccgcgcatcggatatctccattgctacgattgaaaaacatatgtctatcaatgcggttggagtgttccgggtatgccaggcggttgctaatcagatgattaaacagggtaagggcggaaagatggtatgtgttacctcccaggccgattttattgcaattaacaagcatgtgggttataccatgagcaaagcggctgtggtgggcatgattaaggtatgcgcattggaatgggcggattatggtatcaacgtcaacggcgtggctccaaccgtagtgaacacctacatgggtgaaaaagcatggcaaggtaaggttaagaccgacatgattgagaagattccggcacaccgctttgccgagacagatgagattgcggcggctgtgctgttcttatcctgtaatgagtctaacatgattactggcgaggaccttgttgtggatggtggatttacaatctattaaatttgtgaaaccataatcaggagctgatagaaggagaggatataagatggatgcgttgacaagaaaagcctatgaactgcgccgcgatatcattgagatggtacataattccagggcggggcacgtaggaggagatttaagtgtaactgatatattgactgtcctgtattttaaggtaatgaacgtatcaccggaaaagggagagaatcctgaccgcgaccgctttcttttgagcaaaggccattgtgcagacgcgctgtattgtgtcctcggagaaagagggttctacgataaagaagaagcaatcaaaaccttcagccagtttgggagccggtttatcggccacccaaacatggaggttcccggggttgagatgaattccggttccctgggccacgggatttccgtgggcgttggtatggctctggcggccaggatgaaccatcagtcttaccggacttatgtggtgctgggagatggggagatggcggagggttccaattacgagggcatgatggcagcaggccattataagcttgacaatctctgtgccacggtggacttaaatcgtcttcagatcagcggcaccaccggccaggtgatggacagcgccagcttggcggacaaattccgtgattttggctggaacgtcattgaggttttggatggaaatgactgtgcccagttggtcaatgcctatgaacaggcggcggcttataagggaaagccaacggcggtcattgccagtacggtgaagggaaagggtgtttcctttatggagaaccagatttcctggcaccacggagtgatgacagaggaacagtatgaacaggcggtaaaagaactgaaggaggcattgcaatgaataaaataacgaacagacaggcaatatgcgacacactgttggaagcgtccaaaacagaccgggacattgttgtactgtgttcagattccagaggttccgcatctatgacgccctttgccaaaacttatccggaacagttcgtggaggtcggcatagcggaacaaaatctggtatccatatctgccgggctggcggcctgcggcaagaaagcttttgctgtttcaccagcatgttttttatcgaccagaagctatgaacaggcgaaaattgatgtggcatattccaataccaatgttaccctggtaggtatcagcggaggtatcagctatggcgccctgggaatgagccatcattctttacaggacattgccgccatgtgcgcactgccggatatgcgggtctatctgcccagcgaccggttccagacgggtaagctgattgaggcgttgcttcaggatgaaaagccggcttatgtcagagtcagccgttcagccacggaagatatatatgaggaacagatgaagtttgaactggataaggcccatgtactgtcagagggtgaggacgccatgatcattgcctgcggcgagatggtgccatatgccctggaagctgcaaggattctggaaaaggacggtatccgggtcggagtcgtggatatgtactgcttaaagcctttggacgaggaagcggtcttacaatacgccagtagggtaaaatgcctgataacggtggaagaacattcggtatatggcggacttggcagtatggtagcggccgtgacggcggagaaacacccgattaaggttaagaaaatcgcccttcctgacggtcatctgataccaggctctaatacggagttatttgcctactacggaatggatggagccggaattgctgaaaccgttaaaaaaacactgacagaggggtaaatgatggggtacatattggggatagaccagagcacacagggaacgaaagcaatccttgtagataacaagggaagattacggagccgggcggatcaaagtcacagacagattgtgaatgaacggggctgggtttcccatgatttagaagaaatataccaaaacacatgcagggtgatacaggacgtggtgaagcggactggtatctcaaagaatgagattgaagtaatcggaatcagcaaccagagggaaaccacagcaatctgggacagagacggaactcctttaaatggagcggttgtatggcagtgctccagggccaaggaggtatctcaggccttggccccctatggggatctgataagaaataaaacaggactcatgctatctccatttttcccggctgccaagatggcctggctgctgtcaaatacagagggagcgaaagagagggctccggaggatctgtgtctgggcaccatagacagctggctgatttacaggatgacacggggaaaggcatttaagacggattattccaatgcctcaagaactcagttgttcaatatccataccctgtcctgggatgaggagttatacgagcttttcggggtttcggcaaaatccctggcccaggtatgtgacagtaacagtttattcgggatgacggatttagacggatactttgaccatgagattccgattcacagcgcggccggggattcccatgcggctttattcggtcagggctgtcacagcgcaggcatgattaagactacttatggaaccggctcctccatcatgatgaatacggggatggagtgtgtgtccagcagccacggcctggtgacttcccttgcgtgggggctagacggccaggtgaattatgtgctggaagggaatatcaactatacaggcgcggtgatgacctggctgaaagatgagcttcatctaatcagctctccggctgaaagcgaagcgtttgcaaaggctgccaaccctatggacaagaccgtattgattccggccttttccggcttatcggcgccctattggagtgacacggcgaaagccgtgatttatgggatgactcgcacaacaggaaaaaatgagattgtcagggcagccttggaaagcattgccctgcagatccaggcagtgttggaagcgatggagaaggacagcagtatctgcataaaggaactccgggtagacggagggcctacgagaaattcctatctgatgcagcttcaaagcgatctttcaaaattagatgtagcagtagctgggattgaggaattatctgcgatgggtgctgcctacatggccggtataggggctggtatcctgaatcaatccgaactgttttcagaggaaggcagaaccctatacagtccgcaaatggcggaagaagaacggaaggaaaaaatcgggaattggaatgaggctatccggcttgtatgcggcgcgaccgtccagtagggggagtagtgatggagaagatgaataataggtatcagtcaaatgaagatttaaacacattccgtctgactcctatgaaaagaatgtattacgctttgggggatttcggttacaactttatgtactactggctcagcacctatctgatgatttattatacggatacgattgggattccggctgccacggtatccgtcatgatgctggtagtgaggatttttgacgcatttaacgacccggtcatcggttcactggcggaccgcaccaacagccggtggggcaggtaccgtccctggttcatgctgggttccatagctatggcttgtttcattgtgctgatttttgcggccagccccgggtggcagatgacaagcaggcttctgtggatgtggggcatatatctgcttctcacggtggcttccacttgcagcaatatgccttatggagcgctgaacggctgtatcactccggattcggaggacagagcaaaggtttcaggtcttcggatgatgtttgccaacgtgagttccatggtgaccgttatcattgctgtaccgctgatgattgcattttcttccgacggttccgccagcagcgccaggggatatttttgggctgtgcttatcacctgtatcctgggacttcccacgatgattgtgagctgttgcaagacgaaggaggtactgactccgccgcccacccagaacaagattccgatgaacctgcagatgaagtctctggtaaaaaacaaggcagttctgattctcattattggacagtttattcttggatgtgtcttgtacggcagggcggcaatgcttgcctattactggcaatataatgctggaaacgcagcgtatgcaaccacttacgggttgattggtctggcggctacaattgtgggaaccgggtggtttggcaatttcctctttaaacgcgtccgtcataaaggaaaggtctgcgcagtattgaacttcataactgcaggcgcatatttcttcatgtattttactaccgcaccgtcggtcatgttctggtttctgaccttcgtgagtagtatgagcttttatgcctatatgggaatccatttcggggctatcggtgacgcggtggactttggggaatttatttccggcgtgaggtgcgatggctttttatcttcctttgtgtctgtagcaaacaaagcggggggagcggtgatgccggccatcggagcagcggtgttggctgccatgcattatgtggcgggcggtgcccagcctgcacagattttgaacgcggttaactggtttataacgctgattccggcgattctcagcctgattaacgctgttttttacctgatgtatcccatcagtacggaaaagcataaagagattatgggagagttgatccggcgcaggcagtagcatagacgaaggagtatccatatgggcgtttcacggcataaatgtcctgtatggacgctctccgcacaaaagtatcaggataaggagaaaagaatacatcattgtgtagtggagtaagctgattaaatgtgtaagttataaacggaatgatattttattctggacggctcagacaccggaagctcttatgatgtttttattgggaaaaatcgccatgggaagagatagctttgacggtaagcgtagtctcagtaaaagcaacacagttgagggaatcctgctcaatgaagtgcgttaattttcaccgaaaattcactatggtaatatgctattgcccttgaagacagcgagatattagaaatctccggcaacctgcttttaaaacccgatgcggaatactgtgatattcagattaccatgatgcgtaatataatgggaacttttgtgaaaaaatagataatcttggcgataaagttaaaatcctatcctatgcctctgtccgggaacggattacttttatctgtatcataatcagcataaaagccaaaggtaaatattgaatgcaaccagagaagaaatcgctgattatttagggggtgcaaggccatcactctcaatggagctgggacgtatgcagtaggaaggaatcatccggatagacggacgcgaagtgttcattttgagccaggagttgtttgctaacctgtttgaataaaatgtaaaaccgtagccatggttacagaataaagcgttttcttttgatagactaaggtcaacagatcaagagaagatgctttttactatgcatttgccggcagatgcccccgttccattgatttaagccactttttaatacttgcatcatctgttccgtgcggttgtggattttatattccgtgccatcttttataaatatatttccggtctgaccgaatgcgggaatgttacatacacaaagttatatcttgatggaacgttccgtcagttgaaaagagagattcccgacaaaggagctgctgcaaaatatgatacgcagggactgcccggatgaatcagctttatgataacctttgatgaggagacgtgcctcgtggaatatccaaagctgccgctctattcttaggtagaaggtgcggacgttttgtttggatgcagaagttggatcaaaacggcaatatgcttttggaaataacggtaccaaaccatggcgctgctattcgtgattttaccgatgatggcgcttccatcacccgctataagggatcttggggcaagctacgcctttccatgagacacctgtatgaacaggaaatcacggatgagattccggcatatagctttgaccgggttgagaaactggagaaaggccagatggtggaggatgatatcgtaatgagtccggttggtatggcatttcacaaaggagaatccatccgcttaatcttatcatctaagaaagaatacagaaatagtatgatgcagcccccgccccccaccggctgtataccaaagaactggggatggcaggtaatttataccggctcggacaaagcttcctatcttcagcttctgatattaaaaatatgaaagtatcacaagctcttcctgtaaaaagcacaaggtaaaatgagattgctggatgaaattatcttccctgcgttattatattgcggttgcaaaatatggcaattttatcaaggaatcggattggctgtttatctcccagccgaccctgagccggacgattcaggagctaaaggaagaacttggaacacagctgtttatccgggagcgccgtttcctgaaattgacagaggatggcgtctggcttttaaatggaaaaccctgttctagaaatatatcaaaggttgttaacgcataaaagccacttgtcgtgataatgttttcatggttgcgagggaaagaagttaatattggctaagtagtgagatgaaccgcgcagcaggtagaaggacaagagacgcagaaccatgaaattttaggttaaatctcacggcatatgcggcaaagcatgacaccctaacagcatactttactcagaaagaacaggtatggtatactgagctggtaaattatgtgcttccggacaagtcaaaggagaacagaggatgaaaaaaagacagatttaaaacaggctatattctatgtgatatgtgcggcagtcatcataagcaaaccaaccacagtgtcggccagcaatgaacagactgccgtggaagataccggagagcagcagccatcgctgcgacaagagattccgaaactgaaaaaaggaaactgggttaaccagaccgcgtaacagaagctggaggacctggatatcctgtatcagaaaagggggatatgttatgagaagaatcaccggcatgtttgtttgtatctctttattgcttaatctcagttttacgtcatatgcatcagaacgcttgataccttcagaaggaaacgagtatcaggagattctttctatgaaggatgaggttttatatcatatcaattatggtggagcacgtggagaactcaaccgggatgtggaagcggatgaggtggaaatggaaagagcatataaagtttatgccaattccgagttgttaaaaacaaatgatgttaaagaatcattggaaaacagttattataagtggcaaatacccgtatacacagacggttttacgattttggttgatataaccaaggtgacatccattcctgatgatattccggaagatgcaaaagaaacgctcaaacagaaattaaatatttggactgtgggagctgtctatgtatatgatgcagaaacggttgattatgacaatactgtaacaacttctcttgaggaggcggggtacaacagtgatgagtattcatacgaagttgcttcaggacttcctggaattcgatatcctgcagctatcatatttaatgctgatgaaaaacctgaatttgtgattcctgcgcagaagtctacgacacatgcatttattggggaatggcctacagcagcaaaaaatagggagaaaacagctacaccttcaaatgcacagaatagtaataatgataacataaacggtttctccatttattattatgatgatgttgtaagggcatcaaattcctacaatcagtcaggaatagggctatcttacaaaaaggatataattgaaaaaaacaccatagcagtgtcgatattcggagccgctggaatcttattgattataggaacaaaaaaaagaaataagaaaaggatgaaatgaaattttacattccgtatgcaagactaaattccacagattgacttgaaaaaagatagttatcgggcggtggtttcttaagtgattttattttttcagcagcttgggtgacaatatcacttcatttggaacgatgaatttaagctgaaaagatcgatttttgtattgttgcataaaaataaatttatgaaaagtttatctttttgttagcagggtgttatttttccattctaagatatctttagtataggaaacgatacgaaattcaaattgcatgaattcataataatgcctcaacttttaaaatacaggctggctatggcctgtatttttatgtgctgatatctgaaatagtgatatcagaaaaattttatcaatacatatactcaaaaggtatgtgtatgtatttaatataggtatttgatattattgtgttggcataataaaatagatgtaaaggaaaggaggcggaaatgaagaagaaaatatgccattttggcacagataacagcgaattatcatgcaatatatggatgcttctcttccatggtagggcaacttggggcggcaaaatcggcttccattggcttaaaccataaggattcaataaatattaagattaggaggatttgaaaaaatataaagagaaaatggattgtgacagcggctgctgtactgacaacaggacttttggcgggcagtggttctttaaatgccggggcgggaaccatacctgcagaaactacgatatcaggaaccacggtggaggctcagacagctggggaagatgctggaacagaaggggaaaaagcagctgacggtgagagtacaggtggtagatgtgaaggggctgaaacaactggccaggctgtatgtctgggtaatcagagggacacccctgctggttcagctttatgtaattttttatgggcttccgggattggggataactctggatgcattcccatcggccgtagttgtattttctgttaataccggagcctatgcgtccgagaccatccgggctgctatagaggcagttccggccggacagttggaggccggatactgtgtgggtttgtcctatactcagaccatgatgcggattattctgccccaggctctcagaatcgcatttccgccgctgagtaattccctgattgggctggtgaaggatacgtccctggcagccaatatcacagtgatggaaatgttcatgtcggcccagagaattgctgccagaacgtatgaaccatttgcactgtactgtgaggttggcatcatttacctcatattttgtacggcgctgaccaggcttcagagcgtatgggaacagaaactgaggctggagtgaaaataaggagaaagaccgcattcgtctttcagaactacaatcttttccggaataaaacggccctgcagaatgtaacggaggggttagtcattgctcggaaaatgccaaggtcccaggctgagaaggccggtaagagggctttagataaggtgggactctgggaccggtatgactattatcctcatcagctgtccggcggacagcagcagagagtggggattgcccgcgcgattgccacggaaccggaagtaatcctgtttgacgaaccgacctcggcccttgacccggagctgattggcgaggtattagaggtgatgagaaagctggcaggggaaggaatggcgatgctggttgtcacccacgaaatgaactttgcaaaaaatgtgggaacaaaggtaattttcatggataaaggagtggtggtagaggaaaatacgccgaaagatttttttgagtccccgaaagaagacagggcaaggcggtttatgagttctacaaaatggagcggatgataaaacatataggaaggggaatttatttagtaaatgtgattagtgggttaaggggtaaagatactgtatggcccttctgcattttgagtggttatgctccactttccttgtatgaagaagtaatccggatttgtagaaaatctgttattacataaaaaattataaaagaaaggaagaacacaatgagaaagaattcgcagagaatcatagcaggggcgttaatgctcacggtactcgtaagcacaggctgctctgtacagaatagccagcagactgtaacggagcagcagacacagcagagcacaacatcggagacagaaccggaaaccggtgcacctgttgcagacacagacgaaacaacagacggagttgtaaattatggtatgatggaggatacctccatcaaggtggaaccgattgaacttactgacgaatgggataaggtatttccactcagtgatgaagtgaaccatagaaaggtgacgtttgtcaaccactttggcaatacattggctgctgatctttacgaaccaaaagaatatacagggaagattccggccattgctgtaagtggcccctttggcgctgtaaaggagcagagttccggtctttatgcacaggaaatggcagaacgaggttttcttgctattgcctttgacccatcctttacaggagaaagcggcggatatccgaggtacttcaattcgccggatatcaacgttgaggattaccaggctgcgattgatttcctttccacccaggacaatgttgatccagaacagattggtattatcggtatctgtggctggggcggtatggcacttcagacagcagcgctggataccagagttaaagccacggctgccatgacgatgtacgacatgagccggaatacggcacttggttattttgattccattgatgaggacggaaggtatgagtcccgtgttgcttacaatcaacagagaacagatgattataaaaatggaacttatacgctgggaggcggccttccggaagaagcaccggaagaagctccgcagtatgttaaggactatgtggcttattataagaccgaccgtggctatcatccccgttccgtcaattccaataatgggtgggcggctaccgctccgggctctctgatgaatatgcgtttgtttgagtatgcccctgaaatcagaagttcggttcttcttgtgcatggcgaggaagcacattctttaatgtacagccatgatgcatacgaactcctccagggtgataataaggaactgttgataattccgggagcaacccacacagacctgtacgatcagatggataagattccgtttgacaaattagagagcttctttacggaagcatttcagtaaccggtggattacggcggttgtgcgctttaaaaggagcacaggaaaggacactttatgaagaaagcaggattaaaaaaatatgccgtggcacttatggtagtcattggattgacagcagctcttacaggagttgcaagtgcggaaatgacaggagaggttgtaactgcatcccagttggaggtgcgttttggtgataatggagcagccttcacaatgacacttgaaaataatgatacggctgcagctatcaaaaagcatgtagggacagccgactggaggcttccaatctatcactttgatgattatgataattgggaggtgatgcagtattatgatatttcatcgcggtatgagattccatcggttgatgtgaaaacagtgacctcccaaaaagcaggagaagtgtattactcccacccaaacaggatcatcctgttctatggggacggggaggtgaccggagactatacaaagatcggagaaattgaggctgccgatgatttaaaaaaagcggttgttaacaatccgatcttacggggctggggtaataagattgtccagattaagagcgtaaaataagcacagcactgtgattgccaacatggaaagttaattttcaaatacagacctttctgcgggggtctgtatttttttcatcattgtatggattgcttcaaaccaggaaaaagttcaaggggtttatgaaaagtttattattttgttaggtggacgttattttagtggtttaagatagaaaaagagtagaagatggaacgtgccgggttggcgtttctatcagaagttatggataaagccatagtaaaaaggcatatgtaaatatttagtataggtatttgatattaaatactactggtattacaatggacataaagaaaggggaggcataaacagaatgaataaaatgaaaagaatgctgctgtttacaacactgaccataacaggagtgttaacagggtgtgcaggaggggcgcctgtattacagcagaccgcatacgcacagaacaatggggctttgactcagacggttacggctgccgggaaagcatcagatgcggccatcaccccgggaagcgaaatcatgaagctggaagacggtttttcagcagtaagctatgacgggaattactggtttgatgactttctcgctcagggaggagccacgaacgatgcaggagtcattgatttccttaccagacatatgatggccggtgagtcacgaccgtcactccggacaggcggtttcggatgcagcaccttggcggtgaaaagcccggcgggagaagctctgtttggaaggaattttgactggcagccatgtgaagccatggtggtccgttccaggccggagggtgcatatgcttctgtttccacggttaatatggattttattcgttccggctatggggcaggcctttcacaactgccggatgaggtccgtaccctgattgccttatatgctcctcttgacggcatgaatgaaaaaggtttggcggtatcggtcaatatgatacaggattatgatgccatctgtcaggacacaggaaaaccgaatcttaccacgaccacggctatccggctgtttctggatcgggcggccaatgtggaggaagcactggctctgttgggacagtatgatatgcactcttctatgggaatgatggtgcatttcgcactggcagacagaagcggccgaagcgtggtggtggagtatattgatgacgaaatggttgtgacggatacgccagctgtgacaaatttctatctggccgaaggaagaaagcagggaattggaacagcacagtcccatacccggtatgagagattgatgaaacgtctggcagaagatgaggcgatggacatggatcaggtcagggatgccttggacagtgtcagtaaggacaattttggagaatttgagtcaacagaatggagcattgtttttaatttaaacaacggggaggcttgttattatcacagggagaactatgggaacagttatgtgttttctgtaaatgaagaagcttaagtgaatgccagacagtatgaatggaactgtctgggtattcagtggaacatatggaggttatgatgaattactttaatttactgtggaatttataccagttaaaaagaaacacgggaatgagacgggaacaattaataacgctccaggaaaaaaaactgagagaattgcttgtgtatgcctatgacaattcaacgtattaccaccgggtctttgaggaggcagggattacaagaaagcagattccgctcatgcccctgtcggcatttcctgttttggataaacagcttttgatggagcatttcaatgaactggttactgtttccgatttaaagcaggaggacctgcgccggtttgaccgggaggaaagcacagaacagaaaaaatttaaggatgagtaccatgtggtccattcttccggcagtacagggaccccaggatattttgtttatgatgaggcggcatggagccagatgctccttgggattatccgggccgcgctctgggatatgaccatgccccagatattaaaattgctgtggaaaggcccgcggatcgtgtatattgccgcaacagacggccggtatggtggggccatggcagtgggggacgggatagaaggcgtccatgcggaccaacttttcctggatgtcaagacaccccttgcagcatggattcgccagattaaagagtttaaaccaaatatggtgatcggttatccgtcagcaatcaagattctcggggaacttgtggaaaaaggtgaagtcagcgtggatatattccgcatcgtttcctgcggagaacctcttggcgccagcttacggaattatctggagacaatatttgaagcggacgtggttaatatttatggagccagcgaatccctggcccttggcgtggaaacaagtcatgcggagggaatgtatttgtttgacgacttaaattatatcgaggtagagaacggcgccatgtacttaacctccctctataattatgtacagcctctgattcgataccgtatatccgaccagcttaatttacgggaaccggaggatgggagcccctatccgtttacgctggcaggcaatattatggggcggaatgaggacatgatgtggtttgaggatggacgtggaaacagggattttctgcatccccttgtcattgaaggattctgcctggacgggcttttagattaccagttccgccagctggacagtcattcctttgagatgctggcggaagtgtcagacacaggaaagataaaagaaatccgggaagaaatgatgaagcagatggcgctgctcctgaaagaaaagagcctggaatatgtaaggttttccattcgctttgtgggagaaatccggccggatcaaaggacaggaaaaaagcggcttattgtggcatgacgtgttaagtgctcataatgagccactgcactaagctcatggaggacctcgctaagtgccagtgtcatgtatcgcacgtaagcggccaaaagacacccgctaaatgctcataacgaggaggaaaagaaacttgaaaaagacattattagctgccaaagatatcagcaaagagtttgggaaggaccggggagcggttccggtgctgaaccatgtatccgtggatatttatgaggatgactttacaatcatcatggggccgtccggggcaggaaaatcaactctgctgtatgtcctcagcggaatggaccgtgtttcttccgggactgtggtttataagggaaaggtgattagccgtttcaaagagagccagatggccaaaatccgctcacgggaatttggttttgtgtttcaacagacccttctggtaagcaacttaacgcttttcgagaatgtgacggttgcaggatatttagggaaggaacggaagccggaagagaccaggaagcaggcaaaagccctgctggaacagatgaatgtaggaagcgccaaggaccggatgccggcagaggtttcgggcggtgaggcacagagggcggccattgccagggccatgatcaatgaaccgggtatcatttttgcagatgagccaaccggagctttaaataaaaggaatacaggggaagttctggatcttttgactgaattaaataaggaaggccagagcattctgatggttactcacgatctgcgggcagctgtccgcgggacacggcttctttacctggaggacggtaagattctggacgaactgtccatgcctgttttccatccggaagatgaaaggacgagggaggcagcgatcaatgactggcttgcttctttccaatggtaacgagggggttctataatggaagatacaatattattaatggctgatctaaaacggcacaaaggcagcctgtccggcgtatttatcctggtactgcttgtctgcacggcgttgggaacggttctttctatatggatgaactcagaacgctatctcagggaagaaatggagcgggcggggtttgggaccctgactgcatgggtctccaatgtgcctgatatggatgctctggcggacaatattgctgacttggaggcggttggtaatgtggatacgcaggtagtcatttattcggactatacggtgaatgaccaggattctgatagtgaaggccagctgattccccatgggacggaggatagacggtataaattctttgaagatgagctgtccgggtaccggggagatataccggaaatccggccgggagagatttatgtctccccttccatgatttccatgttcggtgtgcagattggagatgaaatcagatttcaggttgcccgcgggggacaggcggcagactttacggtgaaagggttttatgaagatccatttatgggcagttccatgatcggaatgaaaggatttctaatcagtgaggccgattattccggaatcatccagacaatccgggatactggtattgatgcgctggccagggacggagctatgctgcatatatttcaggcggacacaaacggggaaggcgtcacggtttcccagctgaatcagctcatcaatgagaatacagagctgccgcagtatttggaattcctccacagtgggaatgccattgccggattcatgctgattctccagaatgctttcagcggctttttggcggcgtttgtagtggtacttatttttgtagtcctgatcgtgctgggacacggcataggaagctccattgaggcagattatgtgaatatggggattttgaaaaccattggttttacaggcgggaaattacgccggattcaactggcgcagtacatgctcgtcatcttaaccggaatggttttgggtatcctggcggctgtttacgtcagccggattgtgagtgcggccacacttacgactacaggaatccgcattcctacagacctgcctgccgcctggtgtttcttaatcagtggtctgctattcctggtattgaccggttttattgtatttaaaacgggaaagctcaaacggatcacaccgatgaaagcaattggaggtgaggcttttatctacggaaccagagtgaaaaaaggcttcccaatccgggggaactatctaaaatactccatggcgctccgtcagcttaccgcaggcgcccgaagatatagcggggcctgtattgtggcaatccttctggtgttctttgcctccatgatcggacggatggctacctggctgggagcggacggaaaagggatgatggatgcattcaatccggcggctcacgatatcggcgtccagatttttggggaacataccccgcaggaagcggaagaaaccgtgctttcctataccggcattacggaccgttacctcctggcgatgcagggggtgtctgtgaacggaattgattatacggccaatgcaatcaccgatccggaacggttccacattgtggaagggcggacttccaaggcagatgatgaaatcgtggtgacggagtttgtggcctctgacctgggagtagccgtcggtgatacggtcacggtacaggctgatctgggcagtgaggaatatgtgatatctggcatttatacctgtgccaatgatatgggcgataatatcggaatgagccgggaaggttacctgaaaatcggatcggatgacccggctatctggtgccaccattattttctggaggatgcttcacagaaagaggccatcatagtggctcttgatgagtcttatggcggggatgtccatgtccatgagaatacatggcccggtctatatggaatcatctctgccatgcaggcgcttttggtattcctgtatgggatggtggcggcttttattctgattgtcacaattatgactggcagtaaaatcctttcggcagaacagagggatatcgggatttacaaagcagtcggctttaccagtggacaactgcgaggcacatttgccctgcggtttatgattgttgctgttcttgcttccatcatcggaaccattctggctgcagccctgaccgattctcttgtgtccattgtcatgcgaatggcaggcatcagcaatttctcttccggtatgacagccggcaatacgttggttccgtccgcggtggtgatccttttgtttaccggatttgcctatgccgtatcgtggaaagtaaaaaaagtggacttaaccgtgctgataacggaatgacacatactaaaaaagcatagataactatttgatataagtatttgtttcgttgataccgcagatatataataaa

SEQ ID NO: 3190 - DNA, 5037 bp, Unknown
  gut microbiota DNA sequence
gttccatagggagtggtatagtaagtcatattcttcttaccctgttcaaaaaccatatgaacattgaccacacctttcttgcggacctccattcccttctgggaaatttttatgtaattgacggtaggttctgcaaaatcctccatgacttcctcatagcgcagataatgacttccgttccggaaataatactgtcccggtacaacaatctccagaggttcctgttcaccgtctgcatccattgtctgaagtccccttacatgaatcagcacttctttatccattcttctcatactcctgtttttatactgttcaaaacctgtttttatgtatctatattataaccattcagcaatctgctgtttttaatacttctcaatatctatttttttcgtcatctccacatcatatggaagaatcgaattggcaaatgccttaaactcatctgccagatcactcacatagaagcgatacggaaattcattcttctgtgtaccttcaccggcaagtcctttttcctccagaagccttcccagctccagtgcggtttcataagccggattcaccagacatactccgtctcccatgatctttctgatggtggaacgaagcaatggataatgagtacatcccaatatcagtgtatccacctgcttatcctgaagttccttcagatatctggcagcgacctcatcagtcaccggatcatgaagccacccttcttctaccagtggcacaaacagcggacatgctttgccgaaaacagtgatctccggatccagatgcttcagatactctgcatgtatcccacttcctacagttcccacagtaccaatgattcctaccctcttatttctggtctgggcagccgccactttagcccccggttctatcacgccaatgatgggaatgtcaaactcatccctcactgcatccagggcaaaagcgctggctgtattacaagcaaccacaatcgcctttacctgctgctgctgaagaaaacgaatgatctgccgggaataccggatgatagtttctttcgatttacttccgtaaggcactctcgccgtatcaccaaaatatacgattttttctgaaggaagattacgcatgatctcacgcgcaacagtcagtcctcctacaccggaatcaaatactcctatcggtgcctctctgtctattttcattgatttctattctccatctctattgattgtctcattattctatcaccaatcaagagcctgtgcaagccagaaggatatctttatgtcatctttctgtcctttatttttctcagggaactgcgagaagcagaatttcgggtacaatgtcccccaccatgcagtaactgcagtctgttcctgtcgtctttcagcgatttttgctatcttcccggacattcccggcgttgctctcatcataagaacaccaacagctgccacgaacagaacaaacgacagttttcttcttaattttttgttcttactctttttattcatcattgtccctctctcctgttatatcttatcagttaccatatctgcctttgttattttcctatatattttcttattttatatggaatttccagacagcactttaatatttggattatgccaatattttcctgatttatacttccacttccagacttccatttctgatcttcacaatcggaagtcgcaggattttatcttctttatatttttcatagaaaagctctctgagtgtcacagccgtaatatttcctcctgacattctgtttcggatcagtcctgtaatatattctcctgctgatgaattatcctctccatgccagttcaggatctcccctgcgtcctccgcctcaaacacataaagatcttcccccacaaaaatctcctgtttcagataatccagcaccattctccatcttccgtcctccaccagtgttctccccatgaccagaacctgcagatgccccatatcaagaagtttttcctgtgactgatcatacattttttcaatccgggtgaaatcagcaccactgatctgcagaacccgggaaccgccatcttcttcctcttttccctgccccgtactctcagaaagatccggcatcccataggtaagacagattccttcttctgaggcatccacgccaagtgccataggatacattctcttctccggttccacagccgcaccacatccgctcataaaaagactgactgacaaaataccggtcaccacactgacagcccttttcctctgcttcctgcggtgtccctttcctctgataaacatataaaactgacagatgagaattcccggaacgaaaatatacgccagacaccatccaaaataatccagtattccttttccctcttcttccagaagcgaaatcaggaaaaccagtgccggaagccagaacctccccgtaccagaatgagatttcccgataatctgatttccataatacagcagactccctattgcaaaaagcaggctgtaaagcagaaatcccatccacaggatgtcaaatctggccagtacatttcccggaagatctgcgcctgccagcagaggcagaaccggataactttccgccgctaccctgtcatatcccagaactgccggaagcagaagctccattccaataagaatcccgccaagtgtcaggatccctcctgccaccgtctttcccgcacttccgtatttctccacatttcccaacaaaaatggcagcaatgcaaccggcgaaaaagcacacagagttccataaaaagactgactgacatttctcactgtaagctcctcccaccggatttctcccatgagatattccgtttttgcctgtggcacacaaagtatcatcattatcataatcccgccaagaagcagaccacctgatacttccgccattcttcctcttctctgtacacctttgcaggttccgacagaacataccagaaccgcccagaatgcaatccatcggccggatactcctgtgatcagctttacaggaaccagcctcctgagaagtgccaacagatatcctcccgccatcaacacatagatcagaaaaaaaatcccgatcagccttcccgcaaaagcacctgcagactttaccggatcttcaaatgaaggtgtcagccgtatcagccagattacataaaacccaagcaatatcagcgcaaaaatcattcccgccactgcactgattccgttcattccaccctttccgaaaacgcagagcataaatggtgccagtaatgccagtatcatctgcctgtacagctgcctgtgggaaattctgttattctctgcaaatctcatgaaccggactcctttctcttcaaacggatcttctgctcctctcttgcataaagcggtcgtaataccctcttgcgcagcggaactctcagaaccccttctcctctgctgcccttctgttctttctttataaaaggaaccagataaggaataccaaaacttatcaggcctgccaggtgccctataaccagatatactcccagcacgattccgtaaattcccagataacctcccaggatcagaaacccatacttcaccagccgaaatgctgctgcaaactcttcatttggaacagtcatagagccaagcgcagtcaacgccacgatcatcaccacgatcggactcacaagatttgcctctaccgctgcttgtccgatcaccagtccgccaacaatgccaatagcatttcccagagatcccggaactctcaccccagcctcccgaatcagttcaaaagccagttccagaaaaatcagttccaccacactggaaaagggcactccttccctcgcctctgcaaaagacagtatcagtgcagatggcagaatctgtgtatggaaacgtatcactgccaggtaaagtcccggcagaacagtcgccatgatcacagccagatatcgcagtattctgagaaaggaagccatctcaaacctgtgataccagtcctcgctgctctccatgaaactgctaaaatttcccggaaggatcaatgcttccggagaattatcacacagaatcacaaccttacctttcaggatttcctgcacagcacgatccggacgttccgttgtctgatactgaggaaaaggagaataccacacatcttctgtcagctgttcaagcataccgctgtcaaggattccgtcaatctgaaattcttccagccgttccttcacttcttccagaagtccctcatgtaccaggtcatccatgtataacacctgcgttaaggtatgagagcgcacaccgattttatattcttccaccttgagtctggtatcacgaagcctttttcttaccagtgcactgttacttttcacactgtccgaaaatccttccctggaaccccgcagcaccttttccgattctgcctccatcacacctgtggatggataacctttgctggagattttcatcgccttgtcatatccatctatgaaaaacactgcattccctgcaagcatggcatctatggactcgtcaagattctccagtttctttacatctgcgatcccaagactgttatgcctgacaaattcctgaatatcctccggcgaaatctcccagaaatgattgatcatctttccaagcgcagaatcatccagcatcatgttggaaaccgcaacttctatatagaccataaggcagtccaccttatgtttatctcccagccgcatgggacggatcagaatatcactgcaattttccagcctgcttcgcagatatttctcattctccctcagatttgcagttactttccgggattcttccagcttcttcaataatttcccacctcgtttcataccggtacatcgttttcgatgtaccagacagatctgttgccagtcggcaatattcctaaactcacttatacacacatggatgcgcaaaaaaagagaggcatcctgcctctcttagaatttcccgatattcagatattataccattcttatctgtgtcccctggatttctctttctctgcacgttcacgttctgcat

SEQ ID NO: 3191 - DNA, 117901 bp, Unknown
  gut microbiota DNA sequence
ctccttcttcctgaatcctcaggaaaaggagccgcggctttttacttattaatactcttttgattggcgggtctatgctgcttattgacttacttgccctggccgctgttctgcggcattcagtcatctgcacagggaagtccgctgtggtaggaataattacccagctcggacagaagattctcaagggcattcagctttaagggctgtcctgtctccagcatggagttgatcatgtagaagatagtgctcagcttccccagggactgtctgaacaggtctgggaaggatgacttggaggcaatactcttatcccaaggattgcaccatgtctcatgatgcaggttcaggctccaggccgggttctccacggtatccgtaaccagcttgctggaggctaccggatttttgaggaacagggattcaaaaaatgcaatcctgtccttttttctgctgttagggtcagacagagtcctgcatccaaaacggagagccagaatggagcggtgtatcataggagccgtgacctggtacctgttcttatagctcagcggatagaatgcttcgttgatgcagtctgacaggaactgggaaataaattgggtttccattccattcagacagatggttgctgcctggttgaactgggatggcttctttctcttgtacttctgaagcagaagagcgtctatgtcattctccagcttggcgtggagtccgtggtaataggaccccgggtgattgacatcgtattcaatgcgtccgtatacataggggtggcatatagagtcaccgatataatggcagataaaaccgcacatgtaggccaggccttcttcacgctgctgcctggaaccgattcgggaaagctgcatgaaacagcaacggaaaaagtaattgacatggtgttcatgcatataggaacctacattgcggtggtctcgatggcgcaggatgggcaggttataaaaaaacatgtccggcccctggagacccagctgatagagccaccgatacttggcaatgataaacttcagattgttctgaggcatatcattgtatgctttcatgcccaagacatagtgtgttgtaaaacctggcatcggcatacctcttttctattggattcttgcagtagttcctactacatattctatcataaacaactatgaaatgcgagccggaaacaaaagaaaattccttccagcggtcatagtcaggggaacttcggaataagacatttataagaagtaagcagggcaggataagttcagatgatgaatgtattagagcaggtccaccagatggtgtgggggccgtggacccttgtcatattccttggggtgggtatattctttaccctgaaatgtcattttttccaaatcaggggatttttattctggtggagccgcacagcaggacggcttatatcgggagaagcgtccaggaaggaggacggcaccggaaaaggaaagggaatcagccagttccagtcggtgtgcaccgcgctggcggcaactgtgggaacaggcaatatagcaggggtggcaaccgcgctgacagcgggagggccaggcgccctgttctggatgtgggtatcagccctgatcggcatgataaccgcttatgcagagaccatgctgggaatcaggtaccggtacagggataaggatggacattacatatgcggtccgtttatatacatggaaaggggactgggacttaggggaatgggagtgctgtacagcttcctgtgcctgatgagctctcttggaatgggcagcatggtccaggccaactcggccatcagcaccatggaatacacctggcatgtgccaaccctggcgggcggactgatatttaccggccttctggtgctggtcacctggggaggaatccgcagaatcggaaatgtggctgaaaaactggtgcctgcggcgtccggaatctatattgccttttccatgattgtgattctttcctgtctggaacagatacccggagcactggcatccatggtaacctccgctttccggcctgaagcggcagcaggagggacagcgggatatgtaatcagccgcagcgtgcgttacggcatctcgcggggggtattctccaatgaggccggacttggcacgctggcggtactccacggtcccacagagggcacaacgcctcatgaacaggggatgtgggccatgttcgaggtgttctttgacaccgtggtcctgtgcaccctaacggccctggtaatcctgtgcatgaccggttccagcccggagacaataccttatgagggagcagcccttgcggcctggtgttttagcagacggctgggagttataggagaatatctggtcagtggctccatggtagtatttgcatttgccacgatcatggcctggttttatctggggaggcaggctgcggcctatttcatcggggggtgcgggttcggggaaaatgcgcagcacatgtttgctgccaaggtatatcctcttttgtttattgcagctgtatttttaggaagcgaggccaggctgggactggtctggctgctgtcagacatatggaacggactcatggccttccccaacctgacagcccttctgtttttatccagggaagtaactcttccggaggggtttttaagaaggcgggactaagagtatggccagcgtcctgattcaaaaaaagaaacaggggcaggatttagctctgccccggaccacggataaacgaaaaaacgcaccatcctgaggatgatacgccttctggaaaaaagtattttaaaagggaggagagctgataaattcttatcagctcgagtattatgaaaaaaatcttgtaagcgttttttgtgtagcaactcttgttgtttgctatgtttaaagtatatagcttaaacatgaagaaataatgttgtttgtgtaaaaggtttttgaatgaaatatgaacgaagtgtgaatgggcaaagcgggcttgctcctttttgcaggcggcaggtaagcaggagccttaaacggttgaaccggcagcgcgccgaattctagggctgatcctggagataacgcttctcgaactcatttagaggtatgggagcggaaaaaacatatccctgtatcatatcgcagcccatgctgcgaagaaaatcaacctgttccgtggattcgatgccttcggccacagtctttacctttaaatgcctggacagatcaatcaggcatgaaatcacatcctttgctttctgaccggacatattgaggaaaaaggagcggtccagcttcagtgtgtccacatcaaactccttcagaagtcccagggaggaaaaaccagacccgaaatcatccagggaacacagaaagcccatgcggtgcatttcctgaatggtttctctgactgtcttgatctgctggttatcaaagaaaatggactccgtcagctcgaattccaggattttaccgggtatcttaaagctggatgcgattcctgcaaaggtatccaggaaattgggattccggaaatgctggcgggacaggttgacggagactggtatcaacggcagcccttcctgtctccagcggtctatggcagcgcatacctctgtgaatacatagagatccagccggcatattttcccattgttctcgaacaatggtataaaatcagatggatatatgattcctttttggggatgattccagcgcaccaatgcctctgctccttccagccggccgcttctgagtccgattttgggctgcagataaatctgaaaataccggttttcaatggagtcctcaaaaagcgcgtttaactcctgttctattttcagggtccggatcaggctttcatcataaaaacagcagctgtggcataaatctgtcccgcagctttgcagtgcgatcctggcatggtcctggagaagagtgatttcctggtacgggtcgtctgcaaggcaagcgccctgcttgaaggacagggacaggtcgggaagttccgtatcatgaaagttgttgatatcatgaatcatatcattcagccggtattggatggctccggggctgtactccttcagacagaggaagaagtggtctgattcgcctctggccgcaaattcatcctgctcctcacgcagatgctgcttcagcaccttatatatataggagagaatctggttgccgatccggatgccgaactgctcgttgaccatcttaaatccccggacattcagaagcacaatggaataggtgcagggggtcatgttttttgagagttccctgtatctggcctggaaagccgcgttattaagcccgcctgtaaggggatccctgtatgcaatcagctcaagctgccttttgtgggcgttatagaaccggaatactgcaaataaaaacagggagaatataagtatggtagcccctataatgatgaaggactgaaggatgtattggtttgtcccggtggatatgatatcggcaggaatgatggtaagcagaaaccaatcgtttatgttaagggcattataggagaggagcagttcttcttttgtggtagcagtaaatttcaggacgccgctgcggttttctgtcatatcccgctgcatcttctgtatgtctgtaattattttttcatttttttcttgtttaaagatatcccccagctgcagaaagggttttagatccgtaggagatatgattacctgcccctggctgtccacaatgcagctcagcatctggccgctgaagcttttggaggaaatgagggactgcatgttttccttgctgcgaacacccaccagaaccccgtctactccgttgtcccgatagacagggacggaataaaaaatactttttccacctatatagctggcttgtatgctgccctgaaaagaggcccggacactgggaagcttaagaaagtcctccggggatacagggggttcaccatcgtcagtctgtgaggagacagaaaagccctccctgtcaaaaaaaatcagaggtttaaattccaaaatctgggctgcgcggtccagaaagcctgacattgtatctgtatcttgtttttctgtaaactgcgaaaagctgtcagcagtcatgaccagattggttatcttgttattgatggcatcccggatatcgcgggacaactgggaggtcacatccgttaaatagccctgggtagagcggtccaactcgatttgaagcttggctgcattcaggatggaaagggcaaaaactgagaccaggaccagggaaaggaatcctatataccatccgcgtctgaataatggtttctcataatcatctgacatagaatcttttgtttttttcatttccaagtaaactccatatttataacagtctaacatcaataaattttgatagttttattttaagtgacagtatttgataaatcaatgcaatatttgtgtacatatacatatagtattgaaattaatacgtggtataatactgttataaggaacagcgggcgggcagaacatgccgggggtccgggaggggtggcaatgaaaagaaaaaagacgctgcatgactacctgtatgaaaatctgagggaacagattgagacagggtattataaatatggagaagccctgccgtccatgaaccggctgtgcgagacctaccatgtgggaatccgtacggttagggatgtgctatcggaattaagggatcagggaatgatacggacagaggaacgcagacctgctgtcatcgtatacggcaaaacaggagaagaggactatatacccgatatactggcagtgcttcagagaaagacatcggttctggcggtttataagacaatggaattgctgatgcccaggatgtttgcattatctgtccaggtatgcggtgtggaaactgccgtggaatatttcaaacggctgaaaagggacagaaggaaggaagtacgtgccagatggaaggcctcatccaatgctctttataatctgctggatgcgtcccataatctgctgttcagggatatattcaccagccttgagattggatccagaattccttttttcctggagccggagtacacgccgcccttttcctgctgctgcggggaatatgatgaccccatgtggatggccgaggcagtgtctgccggtgatacccggatgatacaggaacagtttgcacgcatgtaccggtccctggggcatgacataaagaggtatctggactggattgaatccaggtttgaaacaggaaacatagagcagaaaaatggatattcatggaattgcgctcaggggcatgaccacctttatattcagattgcccgtgacctcatcgaccggattggactgggattctataaggatggttcctttcttccttcggaggctgttctggcgcaggagtatagtgtctccgttgccaccatacgcaggtccatatccatgctgaaccgtctgggattctgccgcacgtataatgtaaagggaacacaggtgaccctgtttaatgaccaggctgcctttcagtccatgaaaaacaaggttcacaaaaaggatatccttatgtatctgagcggcctccagttcatggccctggcatccgctccggcggccctgctggcggcgccttttatcgggagggaggagatagactgtatagaggaggagcttgcaggaccttatgcggtgcccctcagtatcctgatgcaccatatcattgaagatcttaccctggaaccataccaaattatactgcggcaggtcagcagcatacttcactgggggtattattactccttttaccagaatggaatccgggcaggcaatgagctgaatcaaatcagccatgaggcattccggcgcctgcaggccggagatacagaagagtttgcacgtcttttgtccctgtgctactgccatgcgctggagctggtgcgcgattccatggtagtctggggactttcggaggcagcgctgtttgttactcctcaggagatggataaagtgaagccgtgctggacaaagcccgcagaatttgctatagtggataaagattctaattgaaaaaggagaaagacaaaatggcaaatcctatagttaccataaccatggaaaatggagatgtaatgaaagcggagttatacccggaaatagctcctaatacagtgaacaattttatcagccttgtaaaaaaaggatattatgacggactgattttccacagggtcatcaatggcttcatgattcagggcggctgtcctgagggcacaggcatgggcggtcctggctactccatcaagggagaattcgcacagaacggcgttaagaatgacctggtgcacacagagggcgtactttccatggcaagagccatgcatcccaactcaggcggttcccagttcttcatcatgcacaaggcatcgccgcacctggacggctcatatgcagcctttggaaaggtgacagagggcatggatgtggtgaataaaatcgcggatgtccagactgattacagtgaccgtcccctgcaggagcagaagattaagtccatgacagtggaaacctttggggtggattatccggaaccggagaagtgctgatgggaattgtcattgaaggcatccccggctaatatgacaatgaggcggtaatatggtaacagagcgtagtatctgtttagacggaaagacctgtacagcagtcatatcagacgaacctgaggcccttctggcggcgaaagctgccgggagggccgttgttggcgttgagagcgagaggacagacatctgggagttaaagggcattccctatgtgataccggactttgaggatgccacggacgagctgctggatctggtgatacgccgccatctggggcttccgtggaatatatgcagaacagacaggctgcttatacgggagctgaccgcggatgatgcctgtcacattccggaggaggagtacggacctcaggaagccatattccgtttaagagacacactggaactgtactgcagaaaccagtacggcttttatgagtatggtacatgggccctggtacgcagggacgaccaggttctggtggggctggcgggagtgtccaaccccaggcttaaaagggagatggaggaatgtctggattccatgggacagtctgttccctggctggaattgggataccatgttttcctgccttaccggcagcggggatactgcgcggaagctgtgacggctattgcggattacagccatgaggtgctgagagtccggctctgcgcgctgatccgcagagaaaaccaggcctcccgcaaggtggcggaaggcctgggaatgacgtgtcttatggaaacagatactcaatcatctgaatggcagcttctttatggggagagccttgtatgacggccagataaggaggatccatgatgatgcctgtcttttctcccaaagccgtatcctccagggacagggcaacaggcgtaaggtttccctcgccgtcctttgcccggtagatatggtccttcacccgctcatagagctcaggagaaagcaattcctccaggttctggtatgcggatacggtctcgtagtggtctatggcggactggtccccgatgaccacgtccaggcttttgctggcaaccagggcggaaattttggccagggtggcatatccgtactgggaggtggattcctcattaaaatccaccatcagtccctcgtttatttcaatcaggtcctttttgccgcatcccaggtattcccgcagatcggattccagcagggcgctggaggaggcgcctgcggagcggtcgttgataatcgccacggacaggcgggtggtaaaggtctggcggtatatcatggtgcctatggtgctcaagacgccgatgacaagaatcacagccaggaggtggaatttataatactcccacacataccaggccctgtctttccaggacatgtttttcagtttctgccgttcgttttctgcttcttctctgatggacatagcttatgcattccttccgtttctctctgctgtatttgcacggacaggccgtttcatgtaagtataccacatccggccttaaggagaatataaaaatttcatgaaatcagggcagccctttgcattttccccttaatatgatagaatatcaccaggtgtatttacagaaagaagaggaatgcttatgttgcaaggtatatttaattatgataatccggtgtggcggtttataggaaagctgggagacttaatcatactgaacattttatggattgtctgttccattcctgtgtttacagccggggcctccaccactgccgtctattatgtgaccttaaaactggtgcgggatgaggatgattccaccatacggtcctttttccggtcttttaagagcaactttaagcaggcaacagccatatggcttatcctgctggcggccggaatcgtgctgggctttgatttctggttctttgtgtcaggtcagatgtctttaaacggagcagtcaagacagctatgaccgcggtgtccggcggattgcttttgatttatctgttcatcattacctatgtgtttccgctgcaggccaggttttataacccggttaagcggaccctgttcaatgcgttttttatgtccgtgcgccatttgttccagactatcgggatactggccactgatctgggaatcgcggcagccacatatttcgggctgttttatttccctcagtttgccatgctcttattcctgtttgggatgcccctcattgcctttgtaaactcgtatttcttcactgctattttcaggaagtacatgcctaaggaggaagagcaggagcatacagatgccacccccttgctgggagaagaggacgaggagatgaaggaagcaattcggaatctgaaggggaaataatctgattcttatcattattaaaaccggccggaaaatttctgccggttttctgcatttttctgcaatttccacttgcaaatagagtgaaagtattgtatacaatataatgtattataaaaacagaaatgtaaacaatgtacatagagaggagtccgcggatgataaaacatttacgcttaaaagcatatggaaagattaatctggctctggatgtactgggacggcgggctgacggctatcacgaggtgcggatgatcatgcagaccgtggggcttcatgaccggattgatttgtacgttacccaggagccgggcatcaagatagaaaccaacctgttttatctgccggataatgagcagaaccttgcccataaagcggccagactgctgatggaggaattcggtatacgccagggcctgtccatccatctgcgcaagttcattcccgtgtcagccggcatggccggaggaagtacggacgctgcatctgttctctttggagtcaataaaatgtttggcctgggcctgtccaccggggaactgatggaacggggcgtgaccctgggagcggacatcccctactgccttatgcgggggactgccctgtccgagggaatcggcgagaggctgtcgcccctgcctcccatgccccagtgccaggtgctcatagccaagccgggaatcagcgtgtccaccaaggtggtatatgagagtctggacgccatgaagcttgcgccttcggaccatcctgacatagacggcatgatagatgctatccgcagccagaatctgcgggaggtggcaggcaggttcgggaacgtgctggagctggtcaccggagaacggtatccggccatttcaaggattgaacaggtcatgcgtgactatggggctttgggggcaatgatgagcggaagcggtccgacggtattcggcctttttgccaatccaagggcagcccaggcagcctatgaggatctgcggttcggcaaggcatcggagctggcaaaacaagtgtatctgaccaatttctttaatgtgaaaaggaatggacaggacatggcataatgctggaaagggggcattttaaatggaaaataatttcaaggttaatatgaatgagtatcttccgcttcgggacgtggtgttcaacaccctgcggcaggccatactgaagggggagctggctccgggggaaaggctgatggaaattcagctggccgaaaaattaggcgtcagcaggactccgatcagggaagctatccgtaagctggagctggagggcctggtgcttatgatacccaggaagggcgccgaggtggccaagatatctgagaagagcctgcgggatgtgctggaggttcgccgctccctggaggagctggccattgagctggcctgccagaggatgtcggaggatgacatggctgaactggaacggatgcagggtaactttaaaagcgccattgacaggggggaagccatgagcattgcccagtcagatgagcagtatcacgatgtcatctaccagggaacccgcaatgataagctggtgcagatgctgggcaacctgcgtgagcagatgtaccgctaccgcctggaatatataaaggacgaggacaaaaggcaggtgcttctggtggagcatgagcacatactgaatgcccttaagaaccgaaatatagccgaggcaaagaaggctgccagggaacatatcgacaaccaggaaattacggtttcgcgcaacataaaggagcaggagcaggagccggccgtaccggcacgggggaggaaatgatgggggacgaaaccttcaaggagcggtatctgtcaggggaaattccctttgaggagatagaccggtatgtaagccgctggaataacagcgacgacccccgcactctggcccagtatctggggctgaatgcggaggaagaggacgtgtggatcgatgtgagcgacgaggcgcttcaggatatgctggacagccagaaaagatagaatctcagctttttttatgaaataaatccatgagccggaaccgtacgcggacctccggcttttgctgcggctgttttgtcctgtcaaggggggataacagggcatcgtaatcatcttccgccagcagggatgacagggttttcttggaggaatcaggcaccactgcgtggatggcgtcggtgtagcatagggagggatagagcacgcaccaccagttgtggccttttccgctgccaatggtgatgcggaccgcgtcataggtgccgcagggaaataccatgtccccgtaagccttggtgggaaagtaatcccttgttaattccagctttactggataggaggctccctggtccgccagccagtcctgtgccatggtctcgatgctggtcttgttgccctctatccactgtttaagctgctccttgtccgtatcctcaggaacctggccgtggatgtagtccaggaccagcccttttacccctagcttcagattctggtccctggtgctgtcgctttccgccagaacgtgaaaacggaggatttcaggggcaatgcgggatgccagggcctcctcgccggtggtacgggatgccatgagaatgaggaacgcagtaaaaaaacaaagtgcggatatgcacaggcttattttatatttcatatgatttaagacctccttggccgttaatgctgttttaatttctgtttgtaattattgccacatatgttatactataaacgtagaacaatcactaaaataagtgagtttaaggagactagcatgggtaaacttcaggctgcagtcatatttggcggccagtcatcagaacatattgtgtcctgcatgtcggctgtcaatgtcattgagcatatagacaggacgcgatacgatgtattacttgtaggaattacagaagatggacactggattaaggcagattcactggaagatgtaaaaaacggtacatggagggacaaaactgtatcagcccttctgctgccggacgccacgaagaagtgcatcctccttatggacggagattcggtccgcgaggtcagggtggatgtggtattccctgtgcttcacggtttgtacggggaggacggtaccatccaggggcttttggaactggctaagattccctatgtgggatgcggggttctttcttccgcagtgtccatggataaactgtacaccaagattatcgtggatgacctgggagtccgccaggcagcatacgaggcagtgtacagggaacagcttgtgcatatggaatcggtggtggaacgggtggagaagcatttttcctatcccgtatttattaagccgtccaatgcaggctcctccaggggcgtgacaaaggcggatgaccgccaggccctggaagcaggactgtcagaggcagcccgtcatgaccgcaagatattggtagaggaaaccatcataggcagagagattgagtgcgctgtattcggaggcggacttaaggaggtggtggcatccggggtaggagagatactggccgctgcagagttttatgactttgaagccaagtattataacgaagaatccaggacagtgacggatccggagctgccggcaggggcggcagagagagtccggcaggccgccatggacatattccgtgcagtggacggctatgggctggccagagtggatttctttgtaaaggatgacggagaagtggtattcaatgagattaataccatgccaggttttaccgccatcagtatgtatcccatgctgtgggaagccagagggatcacaaaggaccagctggtggatatgctgatggcccatgggatggaacgatacacttaagggaaagaggaaggaatatgacaaaagacgtgctgattacaatcagtggcatccagatgatagacgaagaggactccgatgtggagatgatagtaaggggagattattatcagaagaatggaaagcattacatcctctacgaagagatgatggaaggctttacaggtaaggtcaagaacgtaatcaagatatccccttccggaatggacataattaaaaagggaatcgccaacacccacatgcagtttgagaagaacaagaagaatctttcatgctacaccactcccctgggcgatatggtggtaggcatacaggccaaccggattaaaataaatgaagaaccggacagcctgctggtgaatgtggattattccctggatatcaattatgagcatctgtccgattgcagcatccgcctggatgtccagtcctgtccgcagtgacagggtacagggtacgcagtacacagagagcagtaaaagaaaaatataaaaaagaagcggcgcagctgccgcttctttttatttcttatctttcttattccttttaaatcttgcgaagaatcccttcttctttggcggagtcggaatcgcgccgcctctcacacttttgatctcagtgatgtagataccgctgatgacaaccttggcctcggtcttcaccggcagagagtcaaatacgcgcccgtctgcaataagggtcatgaccttgggaccaatcttggctttaaccacagggacctttgcccagcgcatgtactttggcgtctggtcagtcactgccttgggaagcccggcctgggtaatcttcatcttcttcttgtcaatgacaaggatggatgcggtctgtgcagctgcatctaacagctgctgctgttccacctggcgcttctggagcttgtttcccagaaagtagagaacaaccagggcaaccagagcaatgattagaatgacaatcagtacatttaaaataatctgagccatggggtttacctccaacctatgtaattatagtaccattccccccgttaaataatccacaaccccaggggacattctataatagtatatcattttagaggataaattgcaagcaaaaatccttgacaccttgacaggtctgtgttattatggagtgtgcactattgtggcggcgtgggctttttgcgccctcacgtacggttttacgtggtatgacgcccaattacagagaacgacagtgatattttgctgcatctggcgtccggttcggcggcagattgagatggaaatattgcgaaccaaattagaaaacaggggtgaaacgtcaatggagaaaagcagaatacgtccggtaccggccgggaaaagcgtaagaatgagctattcaagacagaaagaagttcttgaaatgcctaacttgattgagattcaaaaagactcctaccagtggttcttaaaagaaggactgaaggaggcatttgatgatatctctcccatagcggactttgcaggccatttgagtctggaattcgttgactttacattgtgtaaggatgatataaagtataccatcgaagagtgtaaagaacgggacgcaacttacgctgcaccacttaaggtaaaggtaagactgtacaataaagataaagatgaaatgaatgaacacgagattttcatgggcgatctgcccctgatgacagataccggttcctttgtgattaacggtgctgagcgtgttattgtcagccagctggtacgttcccctggtatctactacggtattggccatgataaagtgggtaaggaactgtatacctgtactgttatccccaaccgtggtgcatggctggagtacgagacagactccaatgacgtattttatgtacgtgtagacaggacccgcaaggtgcctgtgactgtattgattcgtgccctgggcttcggaaccaatgcggaaatcctggaactcttcggcgaggagccaaagctcttagccagcttcggaaaggacacctccgataattaccaggatggccttctggaattatataagaagattcgtcccggcgagccgttatctgttgacagtgcagaaagtctccttaacagcatgttctttgaccccagaagatatgaccttgcaaaagtcggcagatataaatttaataagaaactgtcctttaagtaccgtctgaacggacaggtactggcagaggatgtggtggataccgccacaggcgagattctggcagaggcaggcaccaagcttgacaaggaatctgccatgagaattcagaacgcggcagttccctatgtatgggtggacggtcctgacaggaagcagaaggttctctccaacatgatggtggagctttccgcttatgtgccttttgacccggaggaagtgggcgttacggagttagtatattacccggccctggcttctatcctggaagaagctggcaccgatgaggagtctcttaaggaggctgtgcgcaggaatatccacgacctgattccaaaacacattacaaaggaagatattcttgcttccattaactataatatgcatctggaggagcaggtgggcaacgcagatgacatcgaccatctgggcaaccgccgtatccgtgccgtaggcgaactccttcagaaccagtaccgcatcggtctgtcacgtatggagcgtgtggtaagggagcgtatgaccacccaggatatggatggcattactccccagtccttaattaatatcaagcccgtgactgcggctgtgaaggagttcttcggaagttcccagctgtcccagttcatggaccagaataacccgctggcagagctgacccataagcgccgtctctccgccctgggccctggcggtctgtccagggaccgtgccggattcgaggtgcgagatgtacactacacccactacggacgtatgtgccctatcgagacgcctgaaggtcccaacatcggtctgatcaactccctggcaacctatgcaagggtaaaccagtacggattcatcgaggctccctaccgcgtggtggataagaccacggatccgtccagcccaagggtaacggatgaggtggtgtacctgaccgctgacgaggaagataacttcgttgtggcacaggcaaatgaggccctggatgaggagggccacttcatacacaataacgtatccggacgtttccgtacagagacatccgagttccagaaaaagaccattgacctgatggacgtttctcctaagatggtattctccgttgctacggccatgattccattcctggagaacgatgatgccaaccgcgccctgatgggttccaacatgcagcgtcaggcagtgccccttctgaccacagaagcccctgccgtgggtacgggtattgaggccaaggcagctgttgactccggcgtatgtgtggtggctaagaacgcgggcgtggtagagcgctctgcttccaatgaaatcattatccgcagggacagcgatggcaaccgcgatgtgtaccatctgaccaaatttaagagaagcaaccagagcaactgttacaaccagaagccaatcgtatataagaatgaccatgtggaagccggcgaggtaatcgcagacggcccatccacctccaacggtgagattgcccttggaaagaacccccttatcggattcatgacatgggaaggctacaactacgaggatgcggtcctgttatccgagcgcctggttcaggaagatgtatatacctctgtccacattgaggagtatgaggcagaagcccgcgataccaagctgggaccggaagagattacccgcgatgtgccgggcgtgggcgaggatgccctgaaagacctggatgagcgcggcatcatccgtatcggtgcggaggtccgcgcgggagatatcctggtaggaaaggtaactcctaagggcgagaccgagctgaccgcggaggagcgcctgctgcgcgccatcttcggcgagaaggccagggaagtccgcgacacctcccttaaggtgcctcacggcgcatacggcatcatcgtggatgccaaggtatttaccagggagaacggagacgagctgtcaccgggcgtaaaccagacagtccgcatctacattgcccagaagcgtaagatttctgtgggcgataagatggccggacgtcacggcaacaagggtgttgtttcccgcgtgcttcctgttgaggatatgcctttcctgcccaacggacgccctcttgacatcgtgcttaaccctctgggcgtgccttcccgtatgaacatcggacaggtgctggagatccacttaagccttgcagccaaggccctgggcttcaacgtatccaccccgattttcgacggcgcaaacgagaacgacattatggataccctggaagtggccaacgattatgtgaacctgtcctgggatgaatttaaagctaaatacgaagacctgctgaagccttctgttatcgactacctgggcgcccatttggagcacagggagctttggaagggtgtgcccatcagccgtgacggtaaggtccgcctgagagacggacgtactggcgagtactttgacggcgctgttaccatcggacacatgcactacctgaagctgcaccatctggttgacgataagatccatgcgcgttcaaccggcccttactccctggttacacagcagcctctgggcggtaaggcccagttcggcggacagcgtttcggagagatggaggtttgggcactggaggcatatggcgcttcctataccctgcaggaaatcatgaccgttaagtcggacgacgttgtgggccgtgtgaagacctacgaagccatcatcaagggagagaatatccctgagccgggcgtaccggagtcctttaaggtgctccttaaggagatgcagtccctgggcctggatgtacaggtactgagggatgacggcaccgaggtcgagatgaatgagaatattgattacggcgatacagagctgcgcgccatgttagagggcgagcgccgcttcgaggagaaggaatcctatgcacagtttggctatcaggaacaggaattcaaggatagcgagctggtagctgtggaggaggaagaagaagtaagcgccgatgattacaccgaagaggctgatgacgaggatgatttgttcctggatgaagctgctgacggtgaagacgaagaatagaagggagtaaatgctcatgccagaaactaatgaaacttatcatccaatgacatttgatgccattaagattggtctggcctcccctgataagattctggagtggtcccatggcgaggtgaagaagccggagaccatcaactacaggacacttaagcccgagaaggacggtctgttctgtgagagaatcttcgggcctagtaaggactgggagtgtcattgcggtaaatataaaaagattcgttataaaggtgttatctgcgaccgctgcggcgtagaagtgacaaaggcaagtgtccgtagagagcgtatgggccacatcaagctggctgctcccgtatcccatatatggtattttaagggaattcccagccgtatgggtctgattctggacatctcccccaggacactggagaaggtgctgtactttgcatcctatattgttctggagccgggttccaccagcctgcagtataagcaggtcctgtctgagaaggagtacagggaggaagtggagaagtacggcggcaccggcggtttccgcgtgggaatgggcgctgaggccatccaggagctgctgagggccattaatctggaaaaggattccgcagacctcagaagggcgctggcggattccaccggacagaagcgcgccagaattatcaagaggctggaggtagtggaggcattccttacctcaggcaaccgtcctgagtggatgattatggatgtgattcctgttatccccccggatatccgtcccatggtacagctggacggcggacgtttcgccacctctgatttaaatgacttatacagaagaatcatcaacaggaacaaccgtctggcaagactgctggagctgggcgctcctgacatcattgtccgcaacgaaaagcgtatgcttcaggaggcagtggatgccctgattgacaacggacgccgcggcaggcctgtgaccggcccgggcaacagagcccttaagtccctttccgatatgttaaagggtaagcagggacgtttccgtcagaacctgcttggaaagcgtgtggactattccggacgttccgttatcgtggttggacctgaacttaagatatatcagtgcggtcttcctaaggaaatggccattgagctgtttaagccctttgttatgaaggagctggtttccaacggaaccgcccacaatataaagaatgccaagaagatggtagagagactgcagccggaggtatgggatgtgctggaggatgttatcaaagagcatcctgttatgctgaaccgtgcccctaccctgcacagactgggtatccaggcctttgagcctatcctggtagagggcaaggccatcaagctgcatcctctggtgtgtacggccttcaacgctgacttcgacggcgaccagatggctgtccatctgccgctgtccgtagaggcccaggcagagtgccgtttcctgcttttaagccctaacaacctgttaaagccttctgacggcggtcctgtggctgttccttcccaggatatggtgcttggtatctattacctgacccaggagcgtccgggagcaaagggcgagggcatggtatttaagagcgtcaacgaggcgatcctggcatatgagaaccaggaggcaacccttcattcacgggttaaggtaagggtcagcaagaccatgtccgacggcacggtgaagacagggaccattgactccactatcggacgtttcattttcaatgaaatcattcctcaggatctgggatttgtggacagaagtattccggagaacgagctgaagctggaagtggatttccacgttgccaaaaagcagttaaagcagattcttgagaaggtcattaacgtacacggcgcaacccagacagccgttaccctggatgatatcaaggccattggttataaatattccaccagggcggccatgaccgtttctatttccgatatgaccgtgcctgagagcaaacccaagctgattgaggaagcacaggcaactgtggaccgcattgcgaaaaactaccgccgcggactcatcactgaggaagagcgctacaaagaggttatcgagacatggaagaccaccgatgatcagttgacacatgacctgctgaccggcctggataagtacaacaacatctacatgatggctgactccggagcccgtggttctgataagcagatcaagcagctggcaggtatgcgaggactgatggcggataccaccggtcataccattgagcttcctatcaaatccaacttccgtgagggactggacgtattggagtactttatctcagctcatggagcgcgtaaaggtctgtccgatacggctctgcgtacggctgactcaggttacctgaccagacgtctggtagacgtatcacaggatttgattatccgtgaagtggactgctgcgagggcagggatatcccatttatggaaatcaaggcctttatggatggaaatgaagtcatcgaggacctggaagagagaatcacaggacgctatatcgctgagaccatcactgacccggatacaggagaggttgtggttaaggctaaccatatgtgtacaccgaagcgcgccgcagctgttatgaaggtgctgaataagacaggacgcaagtctgtgaagattcgtaccgtcctcagctgtaagtcccatattggtgtgtgcgccaagtgttacggcgccaacatggcaacaggccagcctgtacaggtgggcgaggctgtcggtatcatcgcggcacagtccatcggtgagcctggtacacagcttaccatgcgtacgttccatacgggcggcgtggccggcggcgacatcacacagggtcttccccgtgtggaggagctttttgaggcccgtaagccaaagggtcttgccatcattaccgagtttggcggcgtggtgcagattaaggataccaagaagaagcgcgagattacggtaaccgacaatgagaccggcaatgccaagacctatctgattccttacggttccagaatcaaggtactggacggccaggtgctggaagccggcgatgagctgacagaaggcagcatcaacccccacgatatcctgaaaatcaagggggtccgtgcggtgcaggattacatgctccaggaagtacagcgtgtataccgcctccagggtgtggaaatcaacgataagcatattgagatgattgttcaccagatgcttaagaaaatcaagatcgaggagagcggcgacagcgatgtgctgccgggcgtatccatggatgttctggattacaacgagatgaacgaggctctgattgccgacggcaagaagcccgcagaaggcagacaggtcatgctgggtatcaccaaggcatccctggcaacagattccttcttgtcagccgcatccttccaggagaccaccaaggtcctgactgaggcagccatcaacggcaaggttgaccacctgattggcctgaaggagaacgttatcatcggtaagccgattccggcaggtaccggcatgaagcgttaccgcaaggtgaagctggacacagacgatttgatttcagatgaaatcctgctgtctgatgacgatgaactggtgctttcttccgaggatgagagcagcagcggactcaccgaggacaatgttgcagaggaagttctgggaatggacgatatggctgatgtggatgaagaggacgatgcagtagaggaagaatagaccgagaccatagaaacgatagagaccatatagtaatcatgctccgggaaggaacagtgtatgtttcttcccggagtttttttgcggatggacatggggcgtacatgatacgtacatgatacgtacatgggacggtaagataaaaggcacgtgaaaagatcaagttagtccgagccggttcaggtatgtaatcatagaggaacggtaccggagaaaaatggtaccagagaaaaatgataccagagaaaaatgatataaatatatatattgataaggccagagcttcgcgccccggcctttttttcattgcagatgctgcttcagcgccttgataacatccatgacaaagatacattccttttctgtcaatttatgcaatgtctcccttaattcatctgcgtattcacccgtatattcaccggtatacgtaccaggctttttatgatcgcagcaggtattccactttctgcctgccagattatccagggaaatgttaaggacatcggcaatcaggatggcattgccggtggtaggacttttcctgccgtttatatattcggacatgagagaggtctgtatgcctgccatgcggcacaaatctgccagcttcatattttttctaatagtaacagctttaaattctcgttgaatcccatgttcatacctccagaaagatattaacatttgtgcgtgaaagcgacaatcttttattgacaaactaacgaaagctacatagggagcggccagaagaaaaatgaatctgaaaaataagtagcagtcaaggcagctgccatggtaggattatatcatggcagctgtaataatgtgtatgggagaataagaaatgaatatattaataatgaagctctgtttcgtgttcgttgtaatcattgccatcctgtggatgaagcgtcctttgttctgggccatttcaggcggactggcggcggccctggttctgtacggtatccgtgtacctgacgccctttccatcatgggaaggtccatggtcagcaaggatacggttacagtggtcctgagcttttactttatcaccttcctccagcgtatgctggaacgcaggaaccgcttaaagcaggcagaacagtccttaaactggctgtttaacaaccgcagggtaaatgcgtccgcggcacctgcggtcatcggcctgcttccctcggcgggtgccatgaccatatgcgcggagattgtcaggtcatcatgccaggattatctgagcaatgaggacatgacctgtgtcaccagtttttaccgccatataccggagagctttctgcccacctattcctccatattgatagcgctggctgtgtctggcgtgggagcaggggaatttgtacttgccatgctgccgctggtggctgctctgttctttatcgggcacatgttctatctcagaaaggttcccaggtccacgggacagaagacggaggaaggcaggaaaaaggcggcggttatgctgtttaagagtctgtggtccatcatattgattgtagtgctgattattgcctttgacataccggtttatgtggcgacaccgatggcagccgtcctcaatatttttgtggaccatctgaagccatgggagataaagcctatgttcaggactgcgtttgagccaatcatcatttttaatactatattaattatgatgtttaaggacattattacctatacgggggtcatccatgaactgcctgtatttttcggaggtctgcccattccccttcccatggtatttgccctgatatttttcttcggcaccattatcagcggttccaacgccatcataccgctgtgcatgcccatggccatggcggccatgccggacgcaggcgttcccctgctggtactgctcatgagttctgcctatgcagccatgcaggtatcccctacccatgtatgcctgttcattgccgcagaatgctttaaagtggatatcggcgccctggtaaggagaaacattcccatgattctggtgtttttcgcagttacgctggcatatacagctcttttgggcgtgttttaagcccgttggtgccggaaattgcgaaaaaataaagaaattccttgacagaatttttttgcgtgtatataatgatatggcgtgctgaaacacgtaatgttttcgtgcgcaaaaagctgatatacagcaaccgcagacaatatcacaggaggtgaaaagaatgccaacatttaaccagttagtgagaaagggaagacagaccagcgttaagaagtctactgcacctgctctgcagaggggttacaactccttacagaagaaggctacagaggtttctgctccacagaagcgtggtgtgtgtacagctgttaagacagctacccctaagaagcctaactcagcactcagaaagattgccagagtacgtctttccaatggcatcgaagttacaagctacattccaggagaaggtcacaaccttcaggagcatagtgttgtactgatccgtggaggaagagtaaaggatcttccaggtaccagatatcatatcgtaagaggtacactggatacagcaggtgttgcaaacagaaggcaggcccgttccaaatacggcgctaagaggccaaaagagaagaaataatttagttagaccgcagatttgatttgtaggaattgtgccggaatgatgatattgacctgtaggttgcaggattatatattgtagtaccgtgcatgaacgtgtggaaggtgcagaggaaaaacagcagcaggcaccatgctcagtgccgcgtttaaagacgcgcccgctacgcaggtgtgcttgattgctaagctcgtgagagacctcgctatgcactcaaagcacgagtacctatgatctaatgaaacgctgtaagggatctgcagcgcaggtctttacagttctattaaggagggaagtaacgtgccacgtaaaggacatactcagaaaagagacgttctggcagacccaatctacaataacaaggttgttaccaagctgattaacaacattatgttagatggtaagaagggtgttgcgcagaaaattgtatacggcgcttttgaccgtgttgcagagacaaccggcaaggacgctatggaagtttttgaagaagcaatgaacaacatcatgcctgttctggaagttaaggcaaaacgtatcggtggagctacctaccaggtacctatcgaggttaggcctgagaggagacagactctggctcttcgctggattaccctctactcccgcaagagaggcgagaagacccagaaggacagactggcaaatgaaatcatggatgctgccaacaacacaggtgcatctgtaaagaagaaagaagacatgcacaagatggcagaggcaaacaaggcattttcacatttccgcttctaatctttggaatgtgtttaacctgtttgattatttaaggaggaaaatcccttggctggaagagaatatccattggagagaaccaggaatatcggaatcatggcccatatcgatgctggtaaaaccacaacgactgagcgtattctgtattacactggtgtaaactataaaattggcgatacccatgaaggtactgctaccatggactggatggctcaggagcaggagagaggtatcaccattacttccgctgcaaccacttgtcactggaccctgcaggaaaactgcaagccgaagccaggtgcattagagcatcgtatcaacatcattgatactccaggacacgttgacttcactgttgaggttgagcgttccctgcgtgtactggacggcgctgtaggcgtgttctgtgcaaagggcggtgtagagccacagtctgagaacgtttggcgtcaggcagacacctacaacgtacctcgtatggccttcatcaacaagatggacattctgggtgcgaatttctacggcgcagtagaccagattaagaccagacttggcaagaatgcaatctgcattcagctgccaatcggcaaggaagatgatttcaaaggaatcattgacctgtttgaaatgaaagcctacatctataatgatgataagggcgacgatatatccatcattgatatccctgaggatatgcaggatgatgccgagttataccgttccgagttagtagagaaaatctgcgagctggatgacgatttaatgatgacatatctggagggcgaggagcccagcaatgatgaccttaagaaagccttaaggaaagctacctgcgagtgtgccgctattccggtatgctgcggtactgcttacagaaataaaggcgttcagaagttactggatgcagttattgaatttatgccttcaccgttagacatcccttccattaagggtactgacctggacggcaacgaggttgagcgtcattcctctgatgatgagccgtttgctgctcttgcattcaaaatcatgaccgacccatttgtgggtaagctggcattcttccgcgtgtattcaggaagcctgaactccggttcttacgtactgaacgcaaccaagggcaagaaggagcgtgttggacgtattcttcagatgcatgccaacaagagaaacgagctggatagggtttactccggcgatatcgcagctgcagttggatttaaggtgacttccaccggcgataccatctgtgacgagaagaatccggttatcctggagtccatggaattcccagagccggttattgatatcgctatcgagccaaagaccaaagcaagccaggataagatgggcgatgcgctggttaagctggctgaggaggatccgaccttccgtgtgcgtaccgatgaagagactggccagaccattatctccggtatgggcgagctccatctggacatcattgttgaccgtctgctccgtgagttcaacgttgaggcaaacgtaggcgcgcctcaggttgcttacaaggagacatttaccaaggctgttgatgttgacagcaagtatgcgaagcagtccggtggacgtggacagtacggtcactgtaaggttcactttacaccaatggaagcaaacgcagaagagaccttcaagttcacttcttccgttgtgggcggtgctattccgaaggaatacatccctgctgtaggcgagggtattgaagaggcatgcaagaccggtatccttggcggattcccagtactgggcgttcacgctgatgtatacgacggttcttaccatgaggttgactcctctgagatggcattccacattgccggttccatggcattcaaggaagctatgcacaagggcaacccaatcctgcttgagcctatcatgaaggtggaagtaaccatgccggaagactacatgggtgatgttatcggtgatatcaactcacgccgtggacgtatcgagggtatggaagacatcggaggcggcaagatggtccgcgcatacgttccgctgtcagaaatgttcggttattctacggatcttcgttccagaacacagggacgcggaaactattccatgttctttgacaagtatgaaccagttccgaagaatgtacaggaaaaagtactttccgaccataagaaataagatagattcttgataaaaggcttgtaaactaaaggaaaatagaatataatggttgatagcctgacattaactataatagcccattatacagggcgcaaattaaggaggacgttataaaatggctaaagctaagtttgaaagaaacaaacctcattgtaacattggtaccatcggacacgttgaccatggtaaaacaactttaaccgcagcaatcacaaagactcttcatgagagattaggtaccggcgaggctgttgctttcgagaatatcgataaggctccagaagagagagagcgtggaatcactatctctactgcacacgttgagtatgagacagagaacagacactacgcacacgttgactgcccaggacatgctgactacgtaaagaacatgatcactggtgctgctcagatggacggcgctatcctggttgtagctgctactgatggtgttatggctcagacaagagagcacatcctgctgtcccgtcaggtaggcgttccttatatcgttgtatttatgaataagtgcgacatggttgatgatccagagctgcttgaattagtagaaatggaaatcagagacctgctgaatgaatatgagttcccaggcgatgacactcctgtagttcagggttctgctctgaaggctctggaagatcctaagagcgagtggggcgacaagattcttgagctcatgaaggctgttgacgagtgggtaccagacccagttcgtgaaacagacaagccattcctgatgcctgtagaagacgtatttaccattaccggccgtggtactgttgctaccggtagagtagagcgtggtactctgcacctgaatgacgaagttgaaatcatcggtatccatgaggatgttcgtaagagcgttgttactggtatcgagatgttccgtaagctgcttgacgaggctcaggctggcgacaacatcggcgctctgctgcgtggcgttcagagaactgaaatcgaaagaggacagtgtctgtgcaagccaggttctgttaagtgccacaacaagtttaccgctcaggtttacgttctgacaaaggacgagggcggccgtcatactcctttcttcaacaactatcgtccacagttctacttcagaacaactgacgttactggcgtttgcgatctgccagcgggtgttgagatgtgtatgcctggcgataacgtagagatgaccgtagagctgattcatccagtagctatggagcagggtcttcgtttcgctatccgtgaaggcggaagaaccgttggttctggtagagttgtaagcatcgttgaataatttcggcaagcttatacgctaaaatcataaaataatatatctgaattgatattgtgcccaaacagtaaaattcccccggaagatacatcttccgggggttttgtgatatctggaatgaaacttaaccgcagcacaggtccgtgtcccatgtataggatccctttgacgtgtcaaatccatagaagtcggcaaatgacagcctgaagatgctccggtcggcggacggtagttttatctggttttttatcagatactggtaaataccgctgcctgatatatttcccaccatcagtatgcttttcagtacgccgtcctccaccagggcctttctgtagttttggctgtcctcctctgttatgaccagagtgtggctgtccagacggttgatgtcgccaatgcaaagggccggcaggccgaagaagttcatggtgttcttcatggcatatgtgtcctcgtagggagtggggatgccgtacatgtttttggcagccacggctccctgcttcatggcgttgggccatataccggacaggccgcacaaatccccggccccgtagactccgggaacagaggtagagagatactggtccactgtgacggccctgcccgtctccacgctgcaatgctccaggaaacggatttccgggcgtacgcctgccgccgcaatgatgaagtcacaggccagttcttcgccgtcctccagaaccagggcgcttacattgccccgggaatccagacgggtccggcttgccctggctgccagccggaagctgcatccgtggtgttcaaagagtctctggtactcagacgcagctttggcatccagctggaggggaaggatccggccggccatctccacgattaccggggagattccccgctccataagggcataggctgcgtccatacccaccaggccggagccgattatcactgccctggcccctggttttacggccttgtcaatggccagggcatcggacagatcgcggaagccgtacacattttctgcctccttaagtccgggtacagggggcagaaggtaataggcgccggttgccaggagaagccggtcataggggaggaaggtgccgtcatctaagaggatgcgcctctcagcgcagtccagccggaccattgcctttcctggataccaggttatgttgttctgtttaaagaagccgggcggaataaagctgattccttctgcgtcccgctcaccgcccaggtatttgtgaagcatacagcgggaatggacctggtcatccttcgataccaggacgatttcaccgtccctgtccagctggcgcagggtcttggctgcgctgatgccggccgggccggctcctgcgataacatatctcatgactccacctcctcaatccagattgcctttttgggacatgcctttacacagctgggttcgctgccgctgtccttgcagaaatcacatttgatgatgcggctgcgggctgtattgtcgggtttaaggacgccaaaggggcagttcattacacacatgaaacatccggcgcactgtttttcatcatattccacgattcctgtttcccggttctttgaaagggcgccgctcatgcaggaattcacacattccggttcatcacagtggcggcagaaaatggggcggtaggaaccgtccggctgccggcggatgaagttgcggctttcgttggcaggatctgtcagatccaaatcatatatgctgcctttatctgccctgtgggcattcatgcaggcaagtgtgcagttcaggcagccatcgcacctgccggcgtcaatccatatccgtttcatagccgccctcctatatattcagtgcctgtcgtttgtccatgatgatttgttccagaatgtccgcggattcacctgcatggctgtttacaatgacctgtccgccggtaagggccttcatgtcctctgtgaggatctttgtcaccaggctgctgcctgtgataaaggggggaagtcccaggtgaaggggaagacccagggccagtccgaaggcgccgtctgccagcgcctgttcctccagccactgggcggccgagagcaccaggggaagctggggaatgtccacgttaagggcctgggccagttccgtggccaccatctccagtctcccgatggccagacaggggccgaaattaagcacgggagggatgcccagggactcacagactgcccgaagctttggacctgccaggctggctgcctccggggtcatgaggccgcagttttccaggccgcctgaggaacatcccgcggtcaggaccaggatatccctggcaatgagttctttggtcagctccacggtcaggatgtcatggccgcctgccgtcaggttggagcatcccaccacaccggcgattcccttgatatccccggaagcaatgaggtcgatgagaggcttccagctgccgcccaggaactttttcagggatacctcgctgacacctgtgatggtgttggtattgccgtgttccggaaggaggtttaagggcacccgggccctgcggtttttgtaggattccagtatctcgtccaggatttcccggctgatgcgctccctgtcctcaaacacaaagggtttcagcgctgcattctgcttctttgccacgtcatccaggcagatctgccggatgttcagacggtcgcagatgggttcaatgccgggaagggtacagttgaattcactgagcacggcgtcgatggcaccggtggccaggacagcctcgctggtgtagttgttgcctgcgtggccgctgaagatgtcctggtaatgaacgccccgaagctgcaggtcctggcccacacaggtgcatcccaccagccggaatcccctggcccctgctgcctttgccagctcctggacctccggcttcttaagctgttcctggagatggacgaagatggagtgctgatgtccggtaatcatgatattgatgtagtccgggtcaatcaccccaaggccaaccggggcaggggtgatttcgggctcgcccagcatgacgtcattcagcaggttggtcagcatcagaccgtatacgccggtggaaatgcccagcttgagacagtgaagcagcatgtctgtggggtctgagttcaagttggtggaacatttcaccacgccggcgcagacctcggatttggcgcctccgggcaggattcctaattcgttccacttggccagacggggagcgtatgacagtttctgctggagcttcatgggagtgtagtcgggaaggtataaatcttccaggactgcctgggccacggctgcggcgcgggtgtgtgggtcgccctgggggattgcgaatagctggcagagatgttccagcgcattcatcccttttaaggctccgccggaaagggcggtctcctttaaattaagggcagtggtctccactacgtggatatagcagcctgatcctgctgccactgcgcggagaaaattcctggccacgattacgtcggcggaagcaccgcagattccgtgaggggcctcaggcgtgatacggcaggggccgttggaacagaggcggcagcatacgccctggagaccgaagccgcatttgacggactgtccttccacacggtggtgggatgtttccatgggaagacctgctatgtaacattccagtggtttgtctgcgcttttacaggttgtgcagctgtaacaatgattcatgatggatacctcctgttgaaatatatggtttgcgtaggtttgaatatcataaagtggataaaaattatccacttttggggcgaataaaaatagatgtatcagccggatttgttaaagagcctgtccagagaggtgcgtttcaattcctcctccagcacacgctggactcttgccagttcacagtgaactttgcagccgtcaaaactggcggcatagccgcactggtattgactgtccaggcagggattaagaaaaaattcctcgtccgccgccttaatgatatccaggagggtcagatccgccaggcttcggttcagaatacatccgcctccggcgcccctgcgtatggataccaggccggaacgctccagctttttcagtatcttgtatgcaaactgtttcggcaccagttcccgctggcatatctgttccaggggaagcagttccccgtccttcagggcgcggataatgcggattgcataatcggattcgcgtgttatcatcatagtgttatcaccttattgttaaaattgtaacaattcttatatactattatagcaaagtagataaaaattatcaagtataaatgtggtatttatacagaatgttgacagccagggggctatgtggtatgctgattccggctttttgtgcgaaaacagtatgtttttggggataaagctgatttgacagagtaaaattggggatagacagggggtattatgagcagaccgcacagtttgacagagggaaacattctcacatctcttatgggttttgcgctgcctgtgctggcggctttgtttttgcagaccatgtatggggctgttgacatgatgattgtggggcagttcagccatgcggcggaggtgtccgcggtgtccacgggcagctggatcatgcagaccataaccacggccatcgtaggactggctatgggaaccaccattcttttgggcaggaagattggggaggggcagcctgaggaggctggccgggttatgggcgccagcatatggatatttgctgtcatcggtctggcggtgactgcggtcatgcagtttctggcagttccctgcaccgcatggatgcgggcgccgaaagaggcatttgacagtaccgcggtgtatgtgaaaatctgttccgcgggctcgctgtttatcgtggcctacaatctgctgggaagcatattcaggggactgggaaattccaggcttcccctcatatccgtgtccattgcctgcctggtgaatatcgcaggggatctgttgttggttggggtattccacatggcttctgcaggagcagccatagccacggtgtttgcccaggcggtcagcgtggtgctgtcaatcctgattatcagaaaacagaagctcccctttgcttttcgcaaggagagcgttcgttatgacaggcagctggccggccgggtggtgaagctgggtttccccattgcttttcaggatgtgctggtgtccatatccttcctggttatatcagccattgtcaataccctgggagtcattccttcggccggtgtaggcgtggctgaaaaactctgcggttttgtgctgctggtgccatctgcctacgggcaggccatgtcggcctttgtggcccagaatatcggcgccaggagaccggaacgggccaaacgggcccttgcatatggtatactcacttctctgggagtgggcgtgttcctggcgtatttttcatttttccacggagatctgctggctggtgtgttctccagggaccgggaggtggtgctggcggcggcagattatctgcgggcctatgccattgactgtctgctggtatccttcatgttctgcatgacaggtttctttaacggatgcggaaggaccgcctttgtcatgtttcagggaatcgcgggagccttcggtgtccgcataccggtgtcctatctcatgagccgtctggttccggtgtccttatttaaaatcggtctggccacgccggcctccacattgctgcaaatcctgctctgcggcatttatctgaaggtgctgaaccgggaccctctgctgcatggaacgggggagcctaccagtcgccctcatcagaccatataatccggatgaatttggccataagagggatatagcttatgacaaaggacagaaaggcggctctgaggaccgtctttttcttttcctccggcactgccatgccgacgcagatgcccagggacaggagacagaattttaacagtccgatggtcttccagtcggactcccagatgtactggttggcgcagcgaatcagttttttcataggtatacctccttctattgagcgcttcttacatggtttcttatacttacagtttagcacatgggatggacggatggaaggggctcttgacaggtttggggaaacatgctaccataaaatgcaggattcattatacgaaacagagagcgcgcagaacatgatggtactgaaagcatacagaagaaggccccggcggaaccgggtgtttatatatagaagatttgagacatcaggacggcagagaaatctgccgtcttttaatttgggaattcattccggtgcagtgagaaaggactaaaatcatggaaaagaaaaaaacgacggctaagattgtattcagtctgggagaaattttggtgggaaatatgatgtacgcggcagcagtggtgctgttcattgtgccgaacggtctcattacaggaggaaccacgggactggccctgtttgtgaaccatagccttggcatccccatcagcctttttgtcagcgtgtttaacgtggccatgtttctgctgggggcatgggtgctgggtaaacagtttgccctgacaaccgtactcagcaccattatctacccggttttgctgggggtgatggagggaagcggatttggtggctttgtgctggaagagaagctggtggcagtgctctatgcggggctgctcataggcggggggatcggtatagtgatgcgggcaggagcctccacagggggcatggacattcctgccctggtgcttaagaaaaagctggatgtgaatgtgtccatgactctgtatatcatggactgtgtggttctggggcttcagctgattgaggctgattcccatgccattctctacggtatcatactgattatcgtgtataccatggtgcttaaccaggtccttatgtcgggaaatgccagaatacaggtgaagattgtcagcagaaggtatgaggagatcaaccgcctcatagcggagcgcattgactgcggtacctccctgctgcatatggagaccggttatctccacagggagcaggaaatgattctggcggtgatttccaggcgggatctgcccaggctgaacaacctggtcatggatgaagacccggaggcctttatgattatcaaccagattaatgaggtgagaggcaggggctttacccttaagagagtatataaggaagcgcggcagtaaagtgcagacaggccccgctgcaggcgggccccagccctatgttataccgcttacatgctgcgaaataccggtatgtagagaagcagggtgatgaacatggctgccgcgcacagcaaaatcagtacattgaccgtgacaagtgacatgtgggggaagagcagcagtaggaaaagcaccacgaacagaagcgcggtacagcatttgccgaaccacttggcgccgtttaacttcttgccttcccggagcttgatggcgcccatgattagcatgaagccttctttcagcacaaacaggaccagaaggagcagaatcaggggataacggctccacagacagagcaggatggcgccgtgggtcagcttatctgctagggggtccaggaatttgccgaactccgtaatcatattgaattttctggcgatcattccgtcgaacatgtctgtgatggaggatatgcccatgacaatggcagccctgtaatagtctgcatctgtggatgccttcaggtacagccacacaaacacaggaatcataattaaacggaaataccccatcaggttggggatggacaaaagctccttttttgagatatgcctcataatacagcccccctctttgaaaatggcaattatttaatttaattctactacatttcttgctaaaagaaatatttttttttataataagagtaaattaaattttcacagggcgggcagcagaaggaggaaggaaaatggcagaggattttttgttgaaaataagaggcgggtataaccagtttacaaaggcggagaaaaaggtggctgattatatcctgagcagccccaagaaggttctgttcatgtccatcactgagctggccgaggcctgcggggtgggggataccagcgtgttccgcttctgcaagaccatgaactgtaaaggctaccaggaattcaagatgcttttatccctgagccttcatgagggaaagcagggattcggacagatggagagcgatatcagcctggaggactctttttcccaggtggcggagaaggttctcaattccaatgtaaaggcccttaaggagactcattccctgttaaaggaggacgtgttccggcgggtcgttgagtgcttccataaggccggacgcatctgcttttacggagtgggtaccagcatgacaacagccatgaaggcagctgataaatttcttaagattgagccaaaggtctactgttctcctgattcccatatgcaggccatgatggcctccaccatgtccaggggcgaagtggctgttatcttttcctattccggggcaaccaaggacaccatccatgtggcccagctggccaggcaggcaggcgcggccattgtctgtgtgacccggttcatcaagtcgcctcttacggcctacgcagacctgaccctcttgtgcggggccaatgaaagcccgctgcaggcaggctcttcctcggcggaaatcagccagcttttcctgattgacatgctgtacacggaatattacaggacatattatgacaagtgcagtataaataatgaaaaaacttccgcgtctgtcatggcaaagctgtgctgagagggggagcggacgaagccggctaaaacgtgttttaactttaacatagaagttccaggctgcctcctgtaatcaggggacctgcctggaacttttgtcttaatgcccgcttttgttatggaccggtatggaggaattgctcgtcatagcgcttttgtgcatagttcagggcatcctccggcgtcatcacctggctgtaggcatttttcactgccatgcctatgatgctgaggaagctgcgctcgtcaaagggctgggtggagaattcgggggtacggcgcccatgggccaggccgaatccgtccttggccaggttcagccaggggaaggtgttgagtatctcgtaattgtcataggacttacggcagggggatacgctgcccagcagcgtggccgcggaggccacgggttcgctgcacatccatttgatgaaggaaagggcgtcctccggccgtttggtatacttggccactcccagggaaccgcctccgataactggattgcggccgggcgtcagggcatatccgatatttcccgctacccgggaggaatggctcagaaggtctgaggcatagttgctgtagaggatggccatggccacattgccccctgcaaaggtagtggctgtgttggtccaccaggaacagtacttggggtcagagtattccttcagggcgatgagctccctgagggaaccaatggccgccggggaattcagggtgacctggcagtcctcgttataaagattctcctggtggctgaacagtcgggccaggtattcggaaccggccacgccggtggatccaagtgtcatggtggccccgtattccacgggagaggatggggtgcatgccttggtgaagaacctggcaatctggttgaactctttaaaatcctgaggcggccggagctcctggcggtatgtttcgtgatacatcctgcggtagatggggctttcaaacaggtccttgcggtagtacagcagctgtacgctgggggtggagggcagggcatataccctgcccctcactatggaatactggttgatggtcccgtccaggaaggtgtccagacagctggagatgccggggtcaatctggtccaggggctgcagaatcttgtccgcgaaccaggacagccatgtcacgtccaggcgcagcacatcaaagacagaatcatgatgcatatggttgaaggcctcatatatttcctcgtaggaatagatggtgatgttcacagggacaccggtttttttcgtgtagatgcgggacaggttgcgcatggtgtaggcgctggggctgtccagggtcagcacatttaagggctttttggaggatgggatgaggatatccgcaaaccagtccctgaagccggaattctccagcagcaggcagggatgtccgctgccctgtccgctgtcctgtccgctgtcctgtccggtgcgcaggtttggttcctctgattcttccggaccgctcttttccccctttttttcttttgatatatcctgaatcaggcactccgccgcaacctttcccagctgccggtagttaagttcatatttctggaaatcattttctggcatggtgaacatgggggataccgtataaatttctgggctgtccccagaatagaaggtgttccatatatccttgacgctctccgcaaagccgtaattggaaatgaagatggcctggggggcggcagcgccgaacatctgcatgatattctgcagcttgcggtaggggtctgtctggatgtggtttatccggcagcccgatgaaccagcgatgctcataaatccgttgaaaaagtcggattcattgggcagctggagacttccggtgagaaggcacaggctggagaagccgcgctccagcgcccttaaagccagctcgcttcctgcccggtgatagtcaaagcctgcatagggggctgcaaagggagggcggcgttccgcaaataccacatggtccgccagcataccctgctcgtccagatagggattggcgtcggcaaaggaacagcaggagactgctgccatgccctgggccatggaagaacggacatcctggatggctgcatattccgcctcccggttgtcatcgctggtcagatactgggacacgctgtagccgtgattttccgcatatgccttaaagctcagatagaagtctatatattgtttggaacggatgttggggagaatgaccgcaagggtattggacctgcccttcctcagcagtttggcccgctcattgggcacgtagccaagggcagaggcggcgtccatgacctgccgtattttttcactgctcacatttcccttaccgttgagaacattggaaacggtgccctgggccactccggccgctttagcaatgtctttgatagtagtcatctgccggttctcctttcaaatggtgcaccttaaatgatgcattccaggttatatatttggttcaattctaccatatggcgggcattttgtaaaactgttgcggttacgattcaataaaaacgggaatctgtagatgagacagcttgataaaaatacgttaaaatgtaaaaaatatgcaaaaagtagaaaaaattcatgtaaaacccggttaaaatataggataaatgtgcaaaatgccttaaaataatattgacacgtttcaaatacaatgctatgatgaaattacagaacagatgacaaattcccaatagtttaagaggaggtatgtattgtgaaaaaaacaaaaaagattgcagcagctgtcctggccatgactatggcagcaggccttgccgtcaccggatgttccggaaagggaggaagtacggacacagacccggcggccgcagagcagtctaaggaaacagctggaagcgccggcgagtccaaggatgacgcagctaaggctgacgacggcgcacttcaccttacattttattacccggttaatgtaggcggttccgcagcgcagctgattgaaaaaatatgtgcggattttaatgcagagaaccccgatatttttgtggagcctgtctatacaggcaattatgacgataccgtgacaaagattcagacagccatgcagggcggaacgcctccggatgtgtttgtaagtcttgcaacccagcgtttcaccatggcatccacaggcatggccatgcctcttgacgaactgattgaggctgacggggatgagggaaaagcttatattgatgatttccttccgggcttcatggaagattcctatgtggacggaaaaatttactccataccattccagagaagcaccatggtgctgtattataacaaggatgccttcaaggaagtgggcctggatccggaagcgcctcctaccacctgggaggaactggctgaatacggccagaagctgacaaatgacggccgctatggagtgggaatcgcgctgaattccggttccgcacagtgggcatttacgggcttctgcttgcagaacagcaccgacggacagaacctgatgagcgaagacggcaagagcgtatatttcaatacaccggagaatgtggaggcgcttcagttctggctggatctccagaatgagtataaatgcatggcagagggaatcgtacagtggaccgacctgcccacacagttccttgcaggtgaagtggccatgatttaccacaccaccggcaacatggccaatatccacgacaacgcggactttgatttcggaacagccttccttcctgcccataagagagtgggcgcgccaacaggaggcggcaacttctatatctccagcaatatttccgaggacagggtgcaggctgcatggaagttcatcaagtttgccacctctacggacagagcggcacagtggagcctggatacaggttatgtggctacaagacagtcatgctttgacacggatctgattaaggattattacgcagaggttccccaggcatctgttgcttacgagcagctgccgtacgcaaagcctgagcttactacatacaatgcggcagaaatctggagagtgttaaatgacaatatccaggcagccgtggttggcgatatgtctgcccaggaagcgctggacgctgcccaggagcaggcagaggaagttttgtcagagtaccaatagaacggatgaaacgtaaatgtaatacctgttaggaaacaataaggcgctgtggcccggtaccatgcgcggcaaaggcaagacctttgctgcgcagccgggcatatacagcgccttaagagaccggggcgtgtcacaggccgcggcacggcaggcggaatatgaaaaggctggtgagaggatgaaaaccaagacaaagaagcagcgtgaaatcaggaataatgcgacagcctgggccctgatggccccggcgcttatatttatgctggcatttacagtgttccctatattcaggagcctgtatctaagcctttcaaagtacaagcttggtatggacggcgccgagttcatcggccttgagaattatgtgaagctggccggttccaagctgttctggaaggtaatgaaaaataccattgtattcgcccttatgacggtgattcccagtatggcggtgggccttggcctggcggttctggtaaaccgcaagggcaagcgggtgggattcatccgcacggcctatttctacccggtggttatgcccatgattgccattgccagcgtgtggatgttcatttatatggcaaagaacggtctttttgaccagctgttaatcgccatcggcttaaagcccatgaatgtgctgtccagcaagagtacggtgcttccggccatggcggtgatgtatgtctggaaggaggcgggatacctgatggtgttcttcctgtccggcatccagagtatatccgatgaggtgatggaggctgccaggattgacggggcaggcaactggaccgtgttcaggcgcatcaccatgcccctgctggcgcccacctttttgtttgtatccacgattgcctttaccaactgctttaagctggtggaccatgtggtcatcatgacagagggagcgcccaacaatgcaagtaccctgcttctgtactatatttaccagcagggctttacaaacttcaactacggcgtatcatcggccctgaccgtaatcatgctgggacttctgcttgtggtgtccctgcccagattcatcagccaggataagaagatacattacaattaaaggagggagccggtatgaaacaagttaaaagtactgcaatttctgttttcgccctggccctggcgcttatgtggctggctcctctggtctggctggtgggaaccgccttcagcgagcctacctttcatatgacctttcttcccaacagccgttttacctttgggaatctgtcttatgtgtggaatgccattccctttgcccggtattacctgaatacgctgatactggtggtggtgaccttctgcgtacagtttgtcacatccactctggctgcctatgcgctggctgtcatggattttaagggacagaccctggtgtttgccgttattttcatgcagatcatcattccaaatgacgttctcatcacacctaactttatgacactggctgacctgggactgaccgatacaaaggtgggcatcatgctgccgttctttggaagcgccctggctattttcctgctgaggcagcattttaaatccattccaaaggccctggctgaggcggccagaattgacggcgccaacacctggcagaccatctggagggtgtacatgccctgcgcaaagcctgcctatatgtcctttgcagttatttccgtcagctaccactggaataactacctgtggcctctgattgtgacgaactcgccatccaaccgcacactgaccgtaggcctggctatctttgcaaagtccaaagaggccaacatgcagtgggccaatgtctgcgcggccacctttatcattatcctgccgctgctcatcgcgttcttcttcctgcagaagcagtttatgaacagctttgtcagcgccggaatcaaagagtgattagggatatgaaaccagttatgagaggagaagtgttatgaaactgcattttttcggatgcggcagcgcctttaatcctgcaatgggaaatacatctgcctggtttgagatggacggatgcctgttcctggtggactgcggcgagacagtatatgagcttctgatgaagcgcagcgatctcagggaatacaggcagatatatgtgctgctgacccatcttcacgcggaccatgtgggaagccttgggtccctgatttcttacaattactgtatcctgggaagaaaaatctgcgttatccaccccagggccaccgtggtggagcttctgcggcttatgggcatcaaggatgaattttacaattattaccaggaacttccggaggacgtgggctgtcttagggctgaaccggtgccggtggagcatgcggacaatatggactgcttcgggtacattctggaggcagaggggatgaggatttattacagcggtgattccgcacggatgccggagcggattgccggcatgcttaaggacgggaagctggacgccgtttaccacgatacgtccctccacaatccgccaagccccagccactgctacgtaggtgtactggaggagacggtgccgcagcagctgaggcacaaagtatactgtatgcacctggacggggagtgcagggacatgctggagtccaggggattccgggtggcggaggttggctgatgggatatagccggcgcaacgggatagccggatgatgtatgactgatgttgaataaatgagatgttgctgagtgtgagaatgccccggcagaggatggatgattcctttgccggggattttttgtttaaggaatccctgggggcggggaggtttggcatttggtgaaccattgatggcaaaaaatgaacaaaccatgctgtttgtgtttgccagtgacaaaatatacttatactaggttcagaaaagcttttctcaataaaatataaggagataaaaaataatgagtgagaaatacggcagtcataaagaatggacctttggtatggaatgcgagctgccttataaggtgtgttttgccttggacaaatcacctgacagcatgaccttcttggaggtaaaacgtggaggagatacggtaatacgtttgttttctgacatgggaggaaaaaccagaacaattgagatgattacagagcctcttaaaataggacaggtaatagagcgcaatcagaatctcagaatcatggcatttttggaggattttctggaacggtattccagcgagctgggagcagtaccggggatggtcactaatgcaatagtaaatgaagcattttcggcttatacagatttggaggggaatgccgatttaaaagaatttaaagtaaaacttttgtgcaacgcatttatagtcaaggatgtcatgggaaataatcagatatcttttggcatgggatttgatgaggtccgggccttttttgaagagtatggaaaggggctgtggtggacatatgatacctcgtatatcccttctgaaggtacggcgaatgaacgggataaggagatatacaattacatcttatgtgcagtttcacacctggctgatttgtttctggctgacagtaaggttaacattgcagacccggcagcaaagaacagctgggaactgatgccaagaatggctccggcagagcttttggcctatgtctccaaccgtcgggttatgacaaaggatctggaatctgcagtcagggggttgccgggaatgacagaaaaaatattccagaaaacgtatacatatcttgtgctttccggaaaaactgtgggcggccatgtgggaagtatacgaaggacgattgaaaaagaaagaattcctatggtatttgaagccaggaaacccggcagtgaatttgattcatattttgattataaacgttacaggggcagattagtgcttgacggtaacagggatttcagccatatgtttaatatgaatccggccggtgggcaagaggtatctgacagtacagacgagtcagacggtgaatcatggtaaaatgaggcccagtgtcttcgggctgtccaaacatctaagaacattgagcgaactgtcgtccgtgtgcgacaggctctatgaattagcggaagggaaggtttcctgtaagtagcacatacaggcagccttccctgtttttctgcatttttttgtttcctgatactcttacggcaatctatctgactcagatatagtgatgctgcaggcgttttggaacacagcgggaaggtatgattcctgttcatataattaagagacatgtaataaaaagttcattgaaaaagtaaacttatttatgtatgatgtatcatgtatcctattttggagaaagttgggaggaattcataaatgaagaaaccattcgttaaaggaggtaaggccctgaccctggcggcggccctgctgtgcggtgcggcgttcctgggaagttttacggcctttggggccgcagctcaggcggagagtcaggcaggcgcccaggcagaagcccaggtattcacgccgggagtggcaggccagattacctcctgtaagatttcaggagataaacagaacgttgagattggattttccagcagcggggatgtgacgggaacagacggaaacatctacgtctttgagatgcagccttacgaggaagagctgggaagccgcagcaattttattgcttcctcacctgccttaagtgctgcctcggtaagcgtgcccttgaacctgggcacaccgcaggataagctttatagccggtttgtcctggctgtatttgacggaactaagttcatcaaggtcagccagccccactacataaccaatccggagctgattgctaagaaccagacgccttttaatgaccctctgactaagaagggtcttgtgattgagattgacatgctcagcgacgcctttgacctgggcgtgaagcatgtgaccaccaatatcgcattttcccagattatgggaaccggaattgattaccagtatgacggaaagacgtaccattttaacaaaggcgtggtagacgcttatgacaagaccatcagcgcgctgtccaacaaggggatgacggttacggttatcctgcttaatgactggaatcccaatacgccggatttggtgtatccgggcacacagaagaattccaatgcattttattacatgttcaacgcggagaccgaggccggatttgaccagaccaaggcaatcgcgtccttcctggcccagcattacagcggcgacaatcctaattacggcaaggtgtcaaactggattatcggcaacgagattaacaaccagcagtggaattacatggggcccatggacctgacgaattatgtgaaggcataccagaaggcattccgggtcatctacacagctatcaagagcaccaatgccaacgaccgggtatatttttcactggactataactggatgaacgagattgacggcaagcttaagtacggaggcaaggagattgtggacagctttaactccatagccaacacccagggacagatggactggggtctggcctaccatccatatccatgccccatgacagagccggaattctgggatgatccgcagtccacagggctgttcacaaatgactttaactcaccggtcatcaattttgccaatctgaacgtgctgacagattactttgtacaggataccctgagggcgcccgcaggcaatgtgcgccacatcatccttacggagcagggcttcacatcctacagccctaccaggggaaacattccggagattcaggcggcggcctatgcttactcctattacctggtggacagcaacccatatattgacgcctacacggtcagccgtcaggtagacgcgccctccgaggcaaaggacggattaaaattcggtctgtgggagtgcgacatgaaccagcctaatctgattgtggctaccaagcgcaagaagatatggcaggtattccgggatatcgacaagaagaacgccaccctggaggccactgaatttgcaaagccaatcatcggcatcagcaagtggtcggatgtggttcccaactttaagtggaagaacctggagaaataacagttaatgccggattcagttgacaaacaaaatccagcgtgtaaaatatttaaatataagcgcttgctggcggcggcctttggggccgccgctttttggcgggatacaatgtatggacgaaaggaataacatatgggcttaattgtacagaaattcggaggaacctctgtggctgacgccgcccggctgcgccatgtggctgaaattatcacggatacatacaaagccggcaaccaggtagtggcagtgctgtctgcccagggggataccaccgacgagctgattgagaaggcaaatgagatcaatccccttgcctccaaccgggagatggatatgctcttgtccaccggggagcagatgtccgtggccctctgcgccatggcagtggaggcgctgggatatccggttatttccctgaccggatggcaggcgggaatggttaccaataccgtggccaggaatgccagaatcaagaaggtagatacggagcgcatcgagacagagctgaatcagaagaaaatcgtgattgtcacgggattccagggaatcaaccgctatgaggatatcaccacccttggcagaggcggatctgacacgtccgcggttgcgctggctgcctcccttcgggcggacctgtgccagatatacacggatgtggacggggtatatacggctgaccccagaatcgtgaaggacgcaaggaagctggatgaggtcacctacaatgagatgctggagctggctaccctgggggcccaggtgctccacaaccgttccgtggagatggcaaagaaatataatgtgaagctggaggtgctctcaagctttacagggcatccgggtacaaaggtgaaggaggttgcaaaacgcatggagaaatcatatatcagcagtgtggctaagaatgttaatatcgcaaggattgccctgataggggtgcccaatgagattggcacatcctttaaggtgttttccctgctggcccagaaccacattaacgtggacatcatattacagggaatcggccatgaggagggcaaggacatatgctttaccgttgcccagtccgacctggaggcggcttccgtgctcctgaaggagcatcaggagtccattggctttggccatctggagaccaacagccatattgccaaggtttccgtggtgggagcgggtatgattaatcatcctggcgtggctgccaccttgtttgaggctctctacgacgccaacattaatatcaacatgatatccaccagcgagattaagatatccgtactggtggatgaaaaggatgcggaaaaggccgtacaggtcattcatgacaagtttttttccatgggttaagtaaataatgggtttgtgacaaaaaagagttgcggcggttcacatatttcgtgaaagccacagctcttttcgtatttacgaatcttgaatttcgttaatattttcacctttttagtggaaaagagcttgctatttgacaaatttattattataattgtatgtggcaatatttctgcttttttttgcgacgggcctgagaatgggttttccgttgcttagatattgttaaacttatgaatgatggaggactggaaaatgagtaattcagcacaaacttcagcaagcagccgcatagcagccctgcttgatgagaacagttttgttgaagtcggagcctatataacggccagaagcactgactttaacatgactgagcaggagacccccgctgacggtgtggttaccggctacggtaccatcggcggatgcctggtgtatgtatacagccaggatgcgtctgtattaggcggctccatgggcgaaatgcatgcaaagaaaatctgcaacatctattccatggctatgaagatgggagcacctgtaatcggtttggtagactgtgcaggtctgcgtcttcaggaggcgaccgatgccctggacggcttcggcaagctgtacttaagccagaccatggcttccggcgtgattcctcagataacagcaatctttggaacctgcggcggcggcatggcagtatctgccggcatcacagatttcaccttcatggaagagaagtccggcaaactgtttgttaattcacctaacgccattgacggcaattataaagagaagtgtgatacctccagcgcagatttccagagcagggaatccggactggcagacttcacaggagatgaggcttccattatcgctcagatccgcgccctggtttccatccttccggccaacaacgaggatgatatgtcatacggagagtgccaggatgacttaaaccgtatctgcgataatatcgagggatgcactggtgacacggctctggccctgacactgatatccgataacagcttcttcatggaggttaagaagaattatgaaccttccatggtgaccggtttcatccgcctgaacgggacaaccatcggatgcgtggctaaccgtacggaaatctatgagaacggagagaagaaggaaacatttgagcctgtcctgtccggcaagggctgcgacaaggcaactgatttcattcatttctgcgacgcattcaatattcctgtactcacactggtgaacgtaaagggctacaaggccaagatgtgcagcgagagaaggattgcaaaggcagccgcacgccttacctatgcttatgccaatgccagcgttcccaaggtaacagtaattgttaaggaagcattcggaagcgcatacctgaccatgggcagcaagtccatcggcgctgacgtggtatatgcatggcctggtgctgtcatcggtatgatgaatccgtccgaggcagtgaagattatgtatgcaaaggaaatcgccgcatccggtgatgccgccgcactcatcaatgaaaagacagcagagtacaccgcacttcagtccagcgctgtagcagcagccaagagaggatatgtagatgacataattaaggcaggggagacccgtcagagggtaatcgcagcctttgaaatgctgttcacaaagagagaggaccgtccgtctaagaagcatggcacggtttaaagagaggtgacaggtatatgagacgattaatgaaacgagtggcagcagcagttctgatggccgcctgcctgttgagcctgtcagcctgctcagcaaaacaggatgaagccgggacagctccccggattgccacggacggaactcctgtagatgatatgatggcagagtatgccaagctgacagcggtccagtctctgggcgtcagcacggatgggctgattgcacagaaggtcatgtcggaagcccagggcaatgcagttatggcagccatctgtgaagagcagattaatgcaaggaaggaactgggggaagtcagaagcatcgacattgaagacgcaagcgtggtacagatggcagatggtacctataccgttatgctgcctgttgcattcaccgaaggttccatgcagtatgtcatgaatctgaatatgatttcccagcagatagttgatgcggaattcactgagcttgcttcaaatgaagaagagggcaagaccatcgggcagctgatggaaacagctaccgtatatgcggtaatcggtatcggcaccgtgttcgcggtccttatattcatcagcctgctgattgcctgctttaagttcattcacaagtgggagacaggccagaaggaaaaggcagcgccagcgccagcaccagttgcaccagcaccggttaaggcggcagcacctgtacttgcggcaggcgaagacctgatgggcgacgccgagctggtggcagtgatttcggcagccattgcagcatatgagggaacttcttctaacggactggtggttcgttccatccgccgtgtacagaggtctaaaggcagataagaggacgggaaacgttccataactattttcattcaggaggaattgaaatcatgaagaattatacaatcacagttaatggtaaagcatatgcagtaaccgtagaagaaggcgctgtatccggcattgcagcagccccggcagcaccagcagctccggctgcaccagccccggcccccgcagcagctcctgctcctgcagcagctccggcaggtgcagcaggttctgtcagcgtatccgcacctatgcctggcaaggtagtggctgttaaggcagcggtaggacaggctgtgaagaagggtgacgtaatcctggttctggaagccatgaagatggaaaatgacatcgtggctcctcaggatggaaccattgccagcattaatgcgtccaccggcgattccgttgaatctggcgcggtattagctactctgaactaattatagagatgagcccatagcaatgtgggattcattatggagggaacattatggattttggcaatataattaacaacctgctgaaccagatggcgtttttccatctgggagcaggcaactatgtaatgatcgtagtggccctggtgttcttataccttgctatcaggaagggatttgaacccctgctgctgattccgattgcattcggtatgctgctggttaatatttatccggatatcatgtattctccggaacagacgtccaacggaacaggcggacttctgtggtactttttccagctggatgagtggagcattttgccctcccttatcttcctgggcgttggagccatgacagactttggcccccttatcgcaaacccaatcagcttccttatgggagctgccgcacagctgggtatctactctgcttatttcttcgccatcctgttagggttctccggcaaggaatcagcagccatctccatcatcggcggtgcggacggccctacatccctgttcctgtgcagtaagctgggacagacccagattatgggacctatcgcggttgcggcttactcctacatggcgctggttccaattatccagccgccatttatgaagcttctgacaactgagaaagagcgtaagattaagatggaacagcttcgtcctgtatccaagctggagaagattctgttccccatcatcgtaaccatcgttgtatgcctgatcctgccatccacagcacctctggtaggaatgctgatgttaggcaacctgttccgtgagagcggcgttgtgaagcagctggctgatacggcaagcaatgccctgatgtatattgtggttatcctgctgggtacttccgtaggcgccaccaccagcgcagatgcattcttaaatgtaaccaccatcaagattgttgccctgggcctgaccgcatttattttcggcaccatcggcggtgtgcttttaggcaagctcctctgcaagattacaggaggaaaaatcaatccgcttatcggttctgccggcgtgtccgcagttcctatggcggcccgtgtatcccagaaggtgggagcagaagcagacccgaccaatttcctgctgatgcacgcaatgggaccaaacgttgcaggcgttatcggcaccgctgttgcggccggtaccttcatggcaatatttggggtataatggcataatatattgacaatgacagccgtttcgcctggcctgtgaaagcaccggacgggcgcgggcggcatgtatcgcacaagcgccttaaagacggcgccaaatgctcataacgaggaggattataactatggcagagatagaaaagaggccagtgaagattgtggaaaccgtccttcgtgacgcccaccagtctttgctcgcaaccagaatgtccacagagcagatgctgcccattattgataagatggacaaggtaggctaccatgcggttgagtgctggggcggcgctacctttgattcctgcctccgtttcctgaaggaagatccatgggagagactgaggaaactgagagacggatttaagaacaccaagctgcagatgctgttccgcggacagaatatcctgggatataaccactatgcggacgatgtagtggagtactttgtacagaagtccatttccaacggtattgacatcatccgtatctttgactgtctgaacgatatccgcaacctggagacagctgtaaaagccaccaacagagaaaaaggacatgctcagattgcgctgtgctatactctgggcgatgcctatacactggattactggaaggatattgcaaagagaattgaggacatgggcgctgactccctgtgtatcaaggatatggcaggtctgctgacaccatacgcggcagcagagctggtacaggctctgaaggaaggaacaagccttcctatcgacctgcatacccactacacatcaggcgttgcttccatgacttatttaaaggcagtagaggcaggatgtgaaatcatcgactgcgccatgtcgcctctggctctgggaaccagccagccggccactgaggttatggtggagaccttccgcggcaccccatatgacaccggctatgaccagacactgctggctgagattgcagaccatttccagcccatacgtgagcaggcccttaagagcggccttctgaacccgaaggttctgggagttaatatcaagacccttcagtatcaggtgccgggcggaatgctgtccaacctggtaagccagttaaaagaggccggacaggaagacaagtaccgccaggttctggaggagattccgagagtgcgtaaggacttcggcgagcctccgttagttacaccgtcatcccagattgtgggtacacaggctgttatgaacgttatcatgggcgagcgctataagatggttccgaaggaatccaagaaaatcatgcttggtgaattcggccagacagttaagccctttaatccggaagtgcagaaaaagattatcggcgacgagacacccattacctgccgtcctgccgacctgattgctcctcagcttcctcagtttgagaaggaatgcgcgcagtggaagcagcaggatgaggatgttctcagctatgcgctgttcccggcagtggccaaggatttcttcgagtacagggctgcccagcagaccaaggtggacagcagtgctgccgacaaggacagcaaggcttatccggtctaattgcagttatagatgaaataaaagaaggcagtctccatatcagttgcagatgtggaggctgcctttttgcgtgcccggcgggaacaggttctaaagtttctggaccagatggatctttttgtactttacaggggagatgccgtactcttttttaaacagatgataaaaataattgatgctctgaaagccgctttcatatattacgtctacaatctccatatctgtgtgtatcagaagattagcagcatagttaagccgttttccgttgatgtaggcagagggggtgattcccagatgcttacggaacattctgcagatgtgttccggggaacgctgtgtctggcggacaagataatccatccccatggtcaggtttttgggattggataatccctccagtgcaggaacaagccaggccggcagattggaggcatccgaggaccttttttgtttttccaattcaggaatgatataggaatacataatgtcaataaggattgctctgagatgggtgtttttttcctccatatcagaagatgacagctggttaagaaaggacaaacgattttggatcatcagcgtgtcaatggtgcttaaccggacaatcggggagtgggaaccagcaaacagttctttgcgcggggcctgagagttataaaggtaaccaaaaagagaatttaccgtataagccggaaaggccagattaatatgtacagagtccccggtctgtattttggtgtggatatcaccgggacggataagaagcagatttccatgcccaagtttgattcggtcattatttaacaaaatatccagtgaattctcagtcactagtatgatttcataaaaatcatggacctgcgggtattcatttgcatcaatcagtgtacggattgagtaatagacctcgcaatcaatggggaatacagatggagtatttacatttttagctgaaatttgcataagaatagttcctctccctgcctgaatatccagttatttttgtctaaatatcaatataaaacaataaatatcaaaagtaaagaagatttggggaataaaataagatatagtaagaacataaatgaatgagctcatttaaatgaaaacaaaaactatgtaatgatattaggaggcaggctttatgaagaagatagcgttagcagcaatgatattaggaatggccggtgtattgggtgcatgcagcatggatggagacggggcagccaagacaacaggaggaacaaccgtggcccaggggacaagccaggaagagaaaggtcagaaagagaaggccggagaaggggaagagcagacagatacatctggtgcaggaaagtcaattgcaggtattgtgttccaggaagatcagttttttaagctgatgtcggctggatatgaggcggctgcaaaggatctggggtatgaaatccagctttccaatgtcacaaatgatcagatgaaggaaactgagctggtaaatacatatacagcacaaggagttgccggcatcgccatctcccctctgtccgcaacgatttctccggaggcacttaaggtttcaagcgataaaggggtcaaaatctgtgtggccaatacggccatggactcataccctttttccatagcagcctatacctcggataattatgccttctgtaaacagactggcgagattgcagtagactttattaaggaaaaatacggggatgagaaaatcgagctgggaatccttcagtttaagacacaaattccggaaacctcagcagagagggtcaacggcttccttgctgccctggatgagggcggggtaaactatgagattgtttccaaccaggatgcatggctccaggatacagccattgcaaaggcaggggacatgctggccgccaaccctgatattgacatcatgtttgctgccaacgacggcggaaccatcggtgctgttatggcagtggaaaatgcaggacaggcaggcaagacctttgtattcggtactgacgcgtctgagcagattgtggatttgctgaaagcagataatgatattcttcaggccgtcacaggacaggatccgtttcagattggatataagacggttgagactctggttcagtccattgaaggaaaggatgtggcggaccagggaaagacagtaattgtggaaggtataccgttaagacgcggcgatacaaagcagctggatgattttatgtcagaccttaaatccaaaatgtagctgagttcgttaccggtaagaataaggagtatgccatgagcattttgagaacggaagggattataaaggattatccgggaacaagagcattggatgatgtcaccgtatcctttgacagcggaaaagtccatgcctttatcggaaagaacgggtcgggaaaatcaaccctggttaaagtatttgcaggcgccattcagcccacaagcggacatttttatctggatgaagaggaattgcatttcagtacaccggtggaagcactgaacaagggaatcgccactgtatatcaggagctgagtctggttccccatctctcagtggcggaaaatatttttttgggacgtcttccaaagaagggacgtctggtagactggaagaggacgtatcagatggcaggagagctgctgcatgcaatgggcgtagatattgacccccatgaaaaggtgttcaggctcagtatgtggcagtgccaggtggtggaaatcaccaaggccatgagctttaaaccgaaggtgcttatgctggatgagcccacatcggctctggctgccaatgaaacccagaagctgtttgaggcaatacggatgttaaaaaagcaggatgtaatcattatctacatctcccacaggctacaggagctgtgggagattgcagacagcgttacagtactgcgggatggaaaatacataggaacagagccaattagttcgctgcagcacaaggatatcattactatgatgttcggtgatgtggaaatcaaggaaagacccggagaccttaaggtacaggatggaatcatcatggatgtaaaacatcttacccgcaaggggaagttccaggacgtatcctttcagctgagaaagggagaggtattaggaattgcaggaatgctggggtccggccgtacagagctgctgcgctgtatatttggcgcagacccttacgacagcggtgaaatcctggtggatcagaaaactgctcccaaaaatgccggtcccatcggaatgatgcagatggggctggggctgacgccggaagagagaaaaacacagggagtgattttgattcattccatccgtgataacctctgctatgccagtatggataagatgacacagcgccatgtgataaatgaaaaaaccagaaaagaattttcagagagacagattagggatttacagattaaaattccggatttgatggccccggtaagctctctttccggcggcaaccagcaaaaggtaattattggaaactggttgaatacagctcccaagattatgatgtatgatgagccctccagaggaatagatgtaaaagcaaaacaacagattttccagattatgtgggagcagtccagaaaaggaatatccagtatttttgtgtcatcagagctggaggaactggtggaggtatgtcacaggattctgattatgcatatgggaaaaatcgttggggaagtgtgtctggacgaccatgtgaccatagatgcattatacgcgtattgtatgggaggaaaggtagaatgaaatctgtaaaaatcgactcattgcatatggaactattttccagcaaaaaaacaaaaaatttaattctggaccacctgattgaaattcttctgctggttctgattattggcgtaagtattgcggcgccgtcctttctgaaatcgggaaatatcttaaatatattgcggaatgcggctatgaagggtgtcattgcttacggaatgtgtctggtaatcatttctggtgaaatagacctgtccgttggctcccaggtagccttaagcggagtgctggcaggatttatctcaaagggacttgctgaggcaggaatcatgcccattgagcttggcgcgttagtgggaattgcagcagccaccctggtagctctcttgacaggattgttccacgcatgggccagacagaaatttaatatgcccagtttcattatcacactggctaccctgaatgtgatgtatggttttgcggccattgtgtgcggcggatttcctatcgccaatgccttcccaacctggtatgcctttctgggaagcggaaggattctgggaataccctttcccgccattgtctttatcttaatcttcctgtttttttggttcctgacagagaaaactgaccttggaagaagaatttacgcagtgggaggtaatgcggaggctgcccgtttaaatggaatcagtgtgtggaaaaccaggatttttgtcatgtgtatggtgcagctgatgtgtgtattgtcaggtattatgaattccgcacaggtccgttctgccacatttacctttggacgcggctgggagacgcagattatatcctctgtagtaatcggcggtaccagtatgttgggcggtattggaaccatatggggaactttgataggcgtactatttacaggtgtaatcaccaacgccatgacattgctgaatgtaaacgaattcatgcagtatgtgattaatggcgccctgatgttttttgcagttatgtttaacacatacatgacgaaaaaaagaaataattaatgagagtggcttggaggaaggaaatgaagctgggagtcggattatatcgttacatgctaaaggatgaggaatttacctttgcaagacagtgcggatgctcggatgtaattatccatctggcaaattactacgatggagaaaatgatattgtcaaagctacggatgaaaaggagaattacggaatcgccagagcaggggagtctgtttggagtctggaccacatgatggcgctccagaagcaggcaaaggaaaaggggcttaatatttacggaattgagaatttcagtccggcggactggtatgatatattgctggatggacctaaaaaggaagaacagatggagcatctgaaggaaattatacgcaatgcaggaaaagcaggcatacgatgtttcggatataatttcagtcttgctggagtgtggggccaccaaaaaacaaaaaaggccagaggaggagcgatcagtacctgttttcatgccggacagctcaatctggatgccaggattccaaagggtgagatatggaatatgacctatgcagagaatgcccggggagaatacatagaagatatcggatacgaggaattgtggaataggctaaaatggtttctggagcgtattcttccggtggcagaggaggcaggagtaatgatggccctgcacccggacgacccgcctatgccatttttaagaggtactccgcgcctggtctaccagccgcagctgtatcagaaagtgctggacctggttccaagtccatgcaatggaatcgacttttgcatgggaagtatccaggagatgacagatggaaatatctatgatgccttggagcagtattcctcccagggaaagattggctatgcccatgtcaggaatgtacggggcaaggttccggattatacggaagtatttgtggatgacggggatatcaatataaagagaacattggagattttaaaaaagaatcactttgaaggtgttctgattcctgaccatacgccgcagattcagtgccaggatacatggcatgcgggaatggcctttgctcttggatttataagggcggagttaatggggctggaaggataggaagataaaaggaggtctgtatatgcagttatttgatttgacggataagaatgtcctgattacaggaggaaccaggggaattggctttgcaattgcacagggagtgaagcaggcaggcggcagggtatggattcatggcagcagtgaggacaggaccagaaagattgcagaggaaaatggatttgactatctttacggcgatctcagagaccaggaagggttagacggaatgctgcgtcctttcctgtccagggaggacagactggatgtgctgattaacaatgccgggtttgagactcacagcgccattgaaaacgctgaggaggagtcaatggacgccatctacaatgtaaataccaagtcgccttatttcctgctgcagaagctgcttccggctttgaaaaaggccgggcaggcatccgtcatcaacgtgacctccattcatcagaaggtgccggtgcgggaaaatggctattactgcatggctaaagcatcgttaggtatgtttaccaaggtggctgccctggagctggccaagtatggaatccgtgtcaataatctggcccccggcgccattcttacggatatgaaccgtgaactggtggaggccatggattttgaaaaatggattcccataggacgggttggccgtgcggatgagctgattggtcctgccgtattcctggcttctgacgcctcctcctatgtaaccggaaccacattgtatgtggacgggggatacagtgaaaatctgctgcggtattaaaggctgggaagtggaattgcggagtggggatgcatattggcattgccaagtgcgcagaaaggagagtggcaatgtacagccgtaattatgggtgcaggatcacagaccagataatcatggatggcaacaaggcggttgtcatggaaaatcaaaagctgcggctgacatttttggctgacaggggcatggactgtgtggaaatgctgtacaagccggaggatattgattttatgtggcggtctccggcggggcttcataaaagaagtgagtatctgtctaattccggggacagtctggggaattacctggaccataattcaggaggatggcaggagatacttcccaacggaggaggagagtgcagctacaaaggcgcttgtctggggatgcacggggagatttcaagtgtgccgtgggattgcaggatcataaaggattctgaggaggaggttgtccttaaggcatgcattaccaccctgcgttccccgttccgtctggagaaggaaatatccttaaagatggatgaaagcgccatcacaatccgggaaagccttaccaatctggcaaaggagccaatggagcttatgtggggccatcaccccaccgtgggaaaaccttttctggatagcagctgccggattgacacaaatgggaccgtgggtttttccatggatcagcgcgattttgagacacagcgtctgaagccgggaaccaggtttgaatggcctgctgccggcaatggaatggatttttcaaacgtgccgggggaggatgctgatactgcggatatgatttatataaccggttttccggagcgtgcctggtaccgggtacataatgaaactaaaaacataagttatggaatgagctgggacggaaaactgttcccatatatgtggatgtggcaggtatgcggtggttcttatggatatccatggtatggaagaacttataacctggcgctggagccatggaccagttacccgtcatcgggtttaataaaggccatagagaatggaagcgctctctgtcttgaggcaggggaggtaaggcaaacagaactttgcttctggattaaaaaggaggagatataaaatggtgttaaaaaaacatgagttgctggaagttataaagaaagagctgtatactcctgtggtaggggatatactggaccagatgggattataccaccagtttctcccccaggcagtccggccccttagggatgatatgaagctggcaggttatgctatgaccgttttaatgattgatgtattcggccagcagaaaaagccctttggttatttgacagaggcgctggatgacttgcaggaggacgaaatttatgtggctgccggaggcaccatgcgctgcgcgtattggggagaacttttaacggccactgcaaaaaagcgcggggcggcaggtgcagttgtcaatggatggcatagggatacgcctcaggtgctggaccagaactggcctgtattttccaggggatgttatgcccaggattcttctgtgcgcacccaggtggtggattaccgctgccggattgaaatagaaggcgtaaccgttatgtccggcgatttgatctttggtgatgtggacggtgttctggttattccggcagagcatattgaatatgtgattgaaaaggcccttgaaaaagcaagaggagagaagaacgtaagaaaggctattgagaaaggcatgagcgcgacggaggcatttgctacctttggtatactttagtacctatctttttggaacaatgtttttcaaacaggttacggggagggatgtatgatggaatataggatttatgcaggaacatatgcgggtgcggatgaaaatggtattttcagatacaggatggatggaaacagccaaatactggaaaggcaactggctcttccgggtatatcaaacccgtcgtatctggccctttcgcagaacgggaccatgatgtatgcagtgatggaggatatggagtatcatgggaatgcggggggaggcgtttgcgccataaaatgccgtgagaattctctggagattctcaattccagaggaactacgggcacccttccctgccatgtgaccctggatgaggaagcaggggttatttatgcggctaactatatgagcggaagcctgtccatgtttcctctgatgccggatggaagtctaggggaaatgagtgactgcagacagcataagggaaaaggacccaacaccctgcgccaggaaggaccccatgtgcatttcagcggtctgtctccggaaaaggacggaatctggtgtgtggacctgggcctggaccgtatattattttatggaatagatgttcataccatgacccttagccataggccggagcgggatattatgctgccaaagggaaccggccccaggcattttgtgtttcagccgggaaacgcgcacaggatgtatgtggtctgtgaattgagttcagaggtgtttgcggtgaatatattaaaagagggatgccaaatattgcagagaatttcctccctgagcgcaccgaatgataaaagctcctgtgcagccatcaaatgttcggaggacggccgtttcctatatgtgtccaaccgcggagacgacagcattgctgtattcaggattgatccaaaaaacggccttctccatctggtgcagatagaaaaggccggcggcaggactcccagagatattctggtacttaaggacatgcttttgtctgcgaaccaggacagcaataccattacatgtttctataggaatgaagatacgggaatcctgacgcggaggacgggagagactttctgtcatgctcctgtctgccttactgccgtccccactgcatagccccgttggcatccagcattccgccgcttaataccttgccgttcaggctgtccatcttgcgggctgaggccaggattacgtttttgatgtctgtcaggctcaattccggtctggaggtatagagcatggctgctgtggcggtgaccatgggagcggccatggaggtgccgctcatgaaggcgtagccattgtccggggtgatgcccaggatgaaggtgccgggggcagcgatgtccacgctgcccgcgccgaagttggagctctcatccagtttgccgtcaaacatcaggttggctacggttatcacgttgtcaaagggaagggaggcagggtaaatgggtgaggcgtctatgttatagccgattgcgttgtcatccccgttgcccgcggctacaatgaaaagcattccggagtcgcggatagctgccttgaattcttcggtgcagttctgggagccgaagctcagattgcatatctgggcgccgttggcctccgcatatttgatggctgcaatcacattgtccggtgaaccctttccctcttctcctcccagggcctttacaggcatgatttttacgtaattgttgtcggctattcccacgatgccgccgttatccttggaggccgcaatggtgccggctgcatgggtgccgtggacgtcctccgggccttcgtatacctggttggtattgctgtaaaaattccagccgtttacatcgtccacgaatccgtttccgtcattgtcaatgccgtctccgggaatctcatcctcattgacccatatggaaccctgcaaatccggatgggagatgtccacgcctgtgtctatgaccgccacggtcagggggcgctttgtctctgtctgggagtaggcctcccatgctggctggatattgatatcaattccgggaacagcatcaatggcgctggtcaggatattggccggctccagcgggggaagggctatggcgtctacctttcctcttttgtttctgtgtacataggcggggtccagggaatcaatatccagttcctggactattttttgcgcctggccgtcatttttaagggcccactggtacgaggccttgtcgtccttgatggacaggttgttgaggccggggcctaccgcataggcggagaatgcgttatccgccgcattataggggacggccccggacgctgtggcaagtgccaggaaaagcgccgtggccgtaatgagttttttcatgactatgctcctttttgatgtttcattataccattgtaatagtataacacataagatagcataagactttgaaaattttatgaaaatctttccgattttattacaaattatggtaccagacccgtatctaacttccatatatccctgttgtactcctcaatggtacggtcagaggagaagtaaccggccttgctgatgttgattaacattttcctggcccaggccgtacggttttcgtagtcgctcagagcctgttccctggcctggcagtaagccttaaagtcggggaaggtcatgaaccagtccttgttcagaagctcgttgtacaggcgctccaggtgttccacggaaccggctgctgtcatggcggggctgatgatgaaatcaacggcttccttaaggtcagggtccgcctcatagtaggagcgggagcagtagctgccttctgcgtaccgccggatgacggtttcgctggattcaccgaagatatagatgttgtcgtcgcctaccagctcatggatttccacattggctccgtcatccgtgcccagggtcacggctccgttgagcataaatttcatgttgctggtaccgctggcttccttggaggccagggatatctgttccgagatatcgcaggcaggaatcagcttttcagccaggctcacattgtagttatttaccatgaccacattcagccatggctttacgtccgggtcgctgtcaatgacctgacggaggcagagtatcatatggatgatatcctttgcaatggtatatgcaggcgctgccttggctccaaagatggcggtgatgggagtggccggcctgctgccccgtttgatttccaggtatttgtgtatcaggtacagggcgttcatctgctggcgcttgtattcatgaagacgttttacctgtatgtcaaaaatggatttggggtcaatgtcaatgtcctgggtttccttaaggtagtctgccagctcctgtttcttactgtccttgatggctaaaaggcggtgcagggtctttatgttggctgtgaatgccctgtcatccagtttcttaagttcaaatgcatccttcttaaaactatcgcctatgagttctgatatataatcagccagctggggattgcagtgaagcagccaccggcggaaggtgatgccgtttgtcttattgttgaatttttccgggtagagcctgtaaaagttgttcagctcattctttttcagtatgtctgtgtgaagggcagccacgccgttgacactgaagccgtagtggatgtcaatgtgggccatgtgcacccggtcgcccttgtcaatgatatacacggacggatcatcaaatttcctcctgaccttgtcgtctaatacttccataatgggaatcagctggggaaccgcttctttaaagtagtccatgggccaggtctccagggcttccgccaggatggtgtggttggtataagcgcaggtatccgtcaccacctgtatggcgtcgtccatttccatgccgtgctctgtggtgagaaggcgaatcagctcgggaatgaccatggtgggatgggtgtcgttgatctggatgaccgcatagtcgggcagatcgtaaagggtggagccttttgcagctgcctctgacagtatgaggcgggccgcgttgctgaccatgaaatactgctggtaaatgcgcagtatctgaccagccctgtcgctgtcatccgggtaaaggaacagggtcaggtttttcctgatatcagtcttgtcaaaggaaatcccgtcctctacaatggactcatccacggtctccacatcaaaaagatgcagcttgttggtgcggttgtcatagccggtgacttcgatgtcatacatccgtgaggtgagtgtaaagttccggtatggaatctggtaggtaacattggttttactcagccaggaggtgttttccatccatgggttgggctcctcattctgaagattatccctgaataactgcctgaacaggccgaaatggtagttcagcccgattccgtccccgttcagtcccagcgtggctatggaatccaggaaacaggctgccagcctgcctaacccgccgttgcccagggatggctcaggctccagttcctccaggacactgaggtctttgccgcggcttgccagaatggatttgacctggctgtagattccaaggtttatcatattattggacagcagcttgcctataaggaattcagcggaaatgtagtataatttcttttttccccgggcggattcccggcccttggaaagtttatttaccaggcagagaaggcctgtgtacagctctttgtcagtgcagcttgaaatgtcttttttgcacgcttctgtcagcatttgctccaattggttctgattcatgatttacattcctccgtaaggtgtgccgtagcggcatgattgtacgtttgtctgtattataatgggatgaaaaaagaaaatcttgcataattatgtgatgatatagtacaatactatcaaatttatgataaaggtggtctgcagatgcaggacggcatgaaaatgggaagcacggagagcggttatcaggggagagacaggagcgggatgcaggggaatggggcatatggagaagtcggacgtgaggaatatggagaaggcgggcgtgaggaatatagaggacgcgggcgtgagcaatatgggtaccatgagataaaagagcatgcgggaagggatttcccttttaatatttacccctgctctattccggctgatttcaggcaggttcctgttcactggcatgaggatatggagattattgcggtgaaaaagggacggggtgtggtgactgtggatatggagccgtatgaagcaagggcgggggaggccgtggtggtgtttcccggacagcttcatggcatcagtcagtgcggctctgaggcgatggagtatgaaaatattatttttcttccttctatgcttatgtcggctgaatcagacctgtgcacctatgattttttgcggcccatgacagagggcggtatcggaaagcctcttcatattacaggaggtctgccggattacggggcttttatggaatgtatcgggatcctggaccagctgtgcgggaaaaagaactatgcctaccagatgggggtaaaaggaaccctgttctggttcctgggcctgattgcagggatttggggcccggaggccgcagggcagccccgtaaatccagggagaggatgaaacggctgctggaatacatggaagagcactacggtgaaaagataaccgtggaggacggggcagaactctgtttttacagtaattcccattttatgaagtattttaaacagtatatgggtgtgccgtttatacagtatctcaatgaattccgtctggaaaaggcggcgggaatgctgctgaccaccccggatccggtgacggcggtggcccagagatgcggatttgataacatatcctattttaaccggctgttccggagaaagtacgggaaaacgccgggggaataccgcaagaatggggagatttacttgtaggggatatgaaagtgtgataaaatgaagcggtattttccggggcctgtcagattgcggcagtgcagctgtgcggcagaatgattgtgcggcagagtgattatgtggcagaatgattatgcggcggagtgattatgtggtagaataatcgtacagcatgaaatgaatgggcacaccggacataaaggagattatcactatgcgggaatgcggtatgctgcttccggttgccagcctgccttcgcggtatggcatcggggcattttctaaggaagcatatgattttattgatacactaaaggcagcgggacagagcttctggcagattctgcccctgggtcccaccggatttggagattcgccctaccagtccttttcggcctttgcgggaaatccatattttattgatttggaaaagctgacagaggaaggacttctcacaagggaggagtgcctggacgcggactttggaaacgatgagagggacattgattataagaagatatacgatggcagattcccgcttttaaggaaggcttatgagcgctggaaggaaggccggtccccggagctggttcatgagctggcgggacggaaactgggggatgagaccagggagtattgtttttatatggcggtaaagaaccattttgattcatgcagctggaatctgtgggacgaaggtatccgtctgagaaaaccggaggcactggaggcatacagggccatgctgacggatgagattgggttttatgaattccagcagattaaatttgaggagcagtgggatgcccttaagagatatgcccatgagcaggggatccggattataggggatattcccatttatgtggcatttgacagcgccgacagctggtcgcggcccgaactgttccagtttgatgagaataatatgccgggggcagtggcgggctgtccgcctgacgggttttcagccacaggccagctgtggggaaatcctctgtataactgggaataccacaggaaaactggatttgcctggtggatgcggaggatggagtactgttttcgcatgtatgatttggtgcgggtggaccacttccggggatttgatgagtattacgccataccctacggcgatgccacggctgagtacggccgttgggaaaaggggccgggtatcgaaatattccggcagatgcaggagcatttcggcggggacaagctgcctatcatagcagaggatctggggttccttacccctactgtgagacggcttcttaaggatacgggatttccggggatgaaagtgctggagtttgcctttgacgccggtgagaacagtgattatctgccccacaaatacgggaccaactgtgtggtgtacacaggtactcatgacaatgatacagcagagggctggttcgcgtcactggatgaacatgacaggaattttgtcagggagtacataggggccggatacacaccggagggagagattcactgggatttagtcagggctgcgctgggaagcgtggctgacctggcagtgattccggtccaggattatctgggatatgatacgtctgccagaatcaacgagccgtctaccctggggaagaactggcggtggaggatgagcagggaagatttgaatgaggacactgtgaagcggtgcaggcggctggccgggatatatgggcggctgggggaggagtagaaggaaagaaaaaatatatttataatacaatcgtattatattgtgtaatgatacccggcggaataggaaacaggattccgctgggtatttgaatttactcaagatcaaaacaccgcttattggataaaggtagagtgtgtggtaaaacacagtcaatatggctggaattcagtccagaagtatttctttgctgtgaagtctgtccataacatatctatgttctttatatacctgtttaattatatcaatactgcttaacagtggcctgttcagatatttattcttgtgatacagtaaaagtgtttttctggtaccctggaattccgtgacaggaaatacattcagcgattcaaaacattttgtttgggtttcatataagtgctttaaaagcataggagtactgaaaaatatgccatgtccctgggcacagagagagactagagaactggtcagcgatgttttgattcgtataaagggcggagtgccgttttgaacaagttttgaaacaattgccttgtgcaagcggctggtagcaggatgtaaaaacatgggtacatgtgaaaaatctgtcaccgaaactccgtcaataaaaatggatttacagtaagggtactgttggctgaaatatttacaaagcagctcatccgagatgattaagtacaaatcttcggtttccaaagggataatttcatataaatccgggtcgaaatattcatgctttgagacaaggggtaaagcaatgtcaatttcattatttttgactgctgccgataagtcaggggatgttttttctacgagatgtattgtcatgttaggatattccctggaaaagtgtgggataaactcacagacgaaagcagtagatctgtttggcggtaatccaatgacaatctcgcccacaaaatcatcctgcattgtagtgaattgattgattagtctgttttctcgttctattatatcacgggcagcttctaaaagtgcttgtccggatgtagtcagcttcagtgaaggttttcgctcaaataattggactttataggtattctccaagtgtttgatatgtaggcttaccgcctgctgcgaggtatacagtgcctcggcagctttggtaaaactcattagttctgttacctttataaaacattggatatcggtcatattcataaatacatgcctccctgccataaaacaagtatttgcttgttaatttaacaaataaaacaatattttctttttattgtaaacgaactataatttaaatgcaatataaaatttagcgctacaataaggaggcggttatggtagtcggatttattggttttggtgaggcggcgtcatctattgcattggggttacataaagaaggaatcgaaagaattgtatgttgtgacgcgatgcagaatgatgaacgttttaaggaggcaatggaaaacagggttgatgcctgccaggggcagatgctggaaaataccgcggaagtttgccggaagtcagatgtggttatttcggcagttccatctaattatgcagttactgctgctgagcatgcacttgatggaataaaggaaggacagccttttatggatgtatccacagctacccctattgagaagaaaaaaatcagcgggatggtgaaagcgaagggaggattgttcgttgatggggcaatgatgggggccctgttaaaggataagcatcaggttccaatgcttcttagcggagatggcgcagcggtattccgggataagatggaaccataccatatgcgtctggagattgtagatggagaagcgggaacggccacaagcatcaagttcatacgtagtattacagctaagggactcagctgcctgttgattgaatcgcttcaggctgcgcagcgttttggtgtcgaacagacaattgtggattcgtttattgatacatttggtccggattttattggaattatcaatggttatatctccggcgccattattcacgcagaacggcgggagcatgagttggagaatgttgtgaattttttgaaaagcgaatcacttccatatacaatggcggaagcaacccggttaaaattgcaatggttaaaggatatccgggtaaaagataactttgaacatggtgtcgcacgggattggaagaaagtactggagggatggaaactgtgacacatcaataagtcatgcaaaaggagcgaataaattgaagaagattagagttccattaaaaacaggggaatgtgctctcaaagctggtgatttgattgagatgactggaacgatctattgtgggcgggatgcagtgttgccgtatgtggtagagatggccaagaatgatacacttttggatgccggtattgacatagagggtgcggtgatattccatactgctgttagttgtgcgggaattgctcccaccacaacgggcaaaccggaaattgaggggtccatcgtgccactgtcagaaaagggggcaaagtttcatcttgggaagggcaggattcttcctgagacgatagcaggactaaagcagaatggcgcatattttttaattacaccgccagttgcggcgctgttgactgctgcaatgagcggatgccgtgtagcgctacatccggaatttggtatggaggcattttatgaaattacagtaacagattttccggcaatcgttgctgtggctgacggggaaagtatctttccagattagggaggggatatatgattctattggaaaaagtgacacaggatgttgcacgggcggttgtgaatgccagctcccattggcggaaggaccaagtcacctgctggaagcaggcatgtgagaaagaaacaattccacatgcaaaatgggcgatggagaattttattaaaaatgcggaagctgcagataaacatcattcagcattgtgtgatgatacggggacgccgcatccatttttagaaattggagatgacgctgtattgccggcaggctttttatccgcgatggaggagggtatcaggaagggattaaatgaccttccagcacgccctatgggggtgcgtgggaatgagttggaacgcatctcccaatgtcagggattatacgatgagcccggcatgttaaaaccagcgcccacacagatacgccgtatagcaggaagtaaaatccggcttacgatactgatgctgggagggggaccggagattaggagcaagacacaggcgttatttcatatgcattcgctggaccatgtggtcgaggagatgattgaatgggcaattccacaggtagaggctcttggatgtcagccgtgtacgttgtcgttcgggttgggacgcactgctttcgaggcatcatcactctcgcttgaagctatgaaggaaggttgttatgatgtgcaaagtgaactggagaaacgcattacagacgcagttaactccaggggaatagggcctattggcctgggcggtgccagttccgtattagctacatttattaaaataggtaatatgcgcgccagtggattccgcgtagtatcaatgcgtccgaactgttgtatggaaatccgaaaagcttcctgtgaatgggagacggaaaatgaaaatgtttagttataagatttactatttctgtgaggggtggctgcacgggagggcttggaaaagtgtgaaacctctgcaaattagacagataaagaggcagtgaaaatataaaccatgttatggtctgaaggccattgatgaaggaggaagtcttaatgaggaagagaaccatacagcaattttcagttatttgtacagcggccctgctcctttcagcctgtgcatccaagggttctgcaccggaaaagaagcaggaagcggataattcaaaacaggaaagcagtcagttagtgtcaggtgaagatgatgaattagattatcctaagagggcgattgagatgattgtgccatttggtgcgggtggctctgctgatatgatgggcaggactgtggcacagcttatgggaaattatattgataagccaatcaatgtagttaataaagcaggtggcggtggtgtggaaggtactgtttatgtaaatggccaggaagccgatggttatacaatattggaaatcactccctctatgcctattgttgaagcacagggaagggctccaatcaatttttcagaatgttttgttcccatcggcaatttccaggtggacattcaatctttcgccatatcaaagaataacccaaatttccagaatttggatgaaatgcttgcttacgcaaaagaaaatcctgggaaagtaaaggtaggaggaacatcaccaggtggactggatgattttattgtaagtggctttgcaaaggccgcaggcatagagcttttgtatattccctataattcagcagcggaaacaaaggctgctctactgggtggggagattgatatttaccaggataagctaatatccttcttacagatgattcagtcagatgatgtggtccccatagtgacgctctatgacaggcgtttagaggaaatagaggagatgaaggatgtaccatgcactgttgaaaagggaattaatttcacgcagggttcttggcgtggtttcgctgtaaaaaaaggaacgccgcaggagattgtggactatttggaagatgtactgaaaaaatgttatgattccgaagaatacaaagaaacagctgaaaaggacaaatccgatattataccaggttatatgccggctgaggaattcggaaaactgtgggaagaacagctggctgcttttagggaagtattcgcaaaataagtgagaggcgttgcggcgtcctttaggacggaaaggagcaaacgaatggaatttatttttaatattgctattggaatcatcctttgcggattcctctttttcagtacgactatatcagatatgacagtagaggctgatttatttggttccggagggtttccaattcttttttcggtcattggcctgtttctgcttctgttaagcacattgcagacaatgaaagcaaaaaagacctctgctgacgcggacaaaaaagaggatgatgaggctgtgctgaaccggacaggtgctaaaaaagttggttgtctgattcttgccttggcaatatatatttttttgatgacaagagtaggttttcccataatgacgtttctgtttatcattacctgtgtgactgcagtcggctatcgtgactataaatggtccgtattatttgccttgctgtttacaacgctgctagtcattgtattcggccgtatattctttattgcgctgccaagaggagtggggatttttaaagaccttagttattttctgtactgaaagggggaaaagaaatggttttgcagggatttctcaacgtattacagccaatgacattacttttggtaatattgggaacagcctggggactgacagccggcgcccttccaggtttaagcgcatctatggccgttattctgatgctgccgtttacatatggcatggaggcgattcaaagtgttgtagtacttgtttctgtttatgtcggagctatgtgcggaggctctatatccgcaattcttttaaagacaccgggaacgccaagttctgtggcaacaacttttgacggttatcccatggcaatgaggggagaggcaccaaaggcattgggtctgtctattacagcatcttcctttggtggtattttttcagggcttattatggtagtctgtgctccaattctagccacttgggccatgaaatttcaaagtgcggaatttttcgccctgtcccttctgggcttaagctgtattgcaagcatcggtaatgagcagcctatcaaagcccttttatccgcatgcctgggtcttctgatttcaacagttggattggatgccatttcaggagcagaacgattcacctttggccaacagtttctgatgaatggaattgattatattcctgttatgattggcgcatatgcagttgcggaggtctacagaaatgttatgaagaacaaaatgacggccagtgaacaggaaggcggcaaagggggaaaggtaaaggcggagattattgggatttccaatattataaagcattggaaaacctatttgaagtcttctgttattggtacaattgtgggtatcataccggcagcaggaggttctattgctgcattaatcagctatagtgaggccgtccgcagcagtaaacaccctgagaaattcggaaaaggtgcagaggaaggaattattgcatcggaagcagcaaataatggcgcagtaggcggctctctggtacccacacttgttctgggtattcctggcggtaatgtagccgcaattcttctggcggcatttactatgcacggattgattccaggacccatgcttctgcggaatcagccagatatgctgtatagtatattaattggtatggtgcttgcttctttactgttatttgtactcggaatttttgtggcgaaacagttttctcgtcttgtaacacttccgtatccttttcttgcgacgattattgttacattgggggtggttggttcttattccctgaagaatagtatgacagacgtatttgtcatgtttgcattcagctttgtaggatatttttttgataagtatcattattctacttctgcaatgattcttggtatcattttgggtaagattgcagaaaacggtttaagaaagcagctgattgtcagcgggggagattttacaaccttttttacaagacccctatgtctggtaattttcatcgttagtatcatttcttttattacgccctattaccgcgcgcataaagaaaagaaaaggcaggagatgaacgcacagcaaaagtaaatactcaaaggcaaaatgtttaaatacgaatcttataatataataaagaaaactaaggagaatgtgagttatggaaaattattatgagttaccggaactgattcccgagaatatcattgagcgcgtgtcaaagctgagttcagcaaatatttgcgatggtttaaataagctggggctgcttgcgaaccggtgtatgtgccaacagattaaacctgtatctgataacatgaaggtggttggaaccgcttgtactgtagatacaaaagacggtgataatcttcccatacatatagcgatatacagctgtaagcctggatatgtgattgttgtaagcggaaaggcttacgaggagagtgcatacatgggagatttgatggggggagcagcagaggctattggtgtttcggggattgttgttgacggatatgtgcgggacaaggtaggacttgacgaaatcggaatgccggttttcagcagaggatttaaacctgcaagtccggcaaagaaaggtcccggaggtttgaatattccggttgaatgcggttctgtagcggtaaacccaggagacttaattgtaggggattatgatggtgttgtagttgtacccagagacaaaattgaagaagtgctggatgcggcagaagtaaagattgcctatgaagaaaagcgggtatttacaattgagcaatataggaagtgtaaaaaagaagggacagaactacctgagttgactccttcatgggtaaaagacatgatgggatagaaaaggcaggccttaaagcctgcctgccggtataaaaggttccggctgttccgggtgagggcccagcattttttccatccagaccatatcccaccactggcccagtttgtagccgcatttggtgaaatgtcccacggtatggtagccgtatttttcatgaaaggttatgctgcccggattggggtaggcaatgcaggcattgacattgatgacgttctggcgtcgcaggtagttttccaatgcctcgtagagaagggagcctgcgccggtgcgcctcgcgtccccggatacatagacggaggtttccacagcccagtcataggctgacctctctttaaattgggatgcataggcgtatcctatgatgcgtccatcccggattgctgccagatatggataccgtttcagggtggatgtgatgcggtttttgaattcctggacagtgggaacctcatattcaaaagtaatggcggtcttttctacataaggcgcgtatatggacaggagggcggccgcgtctgcttcttctgccattcggatggtgacggctgtgtctgacatatgggggactcctttctaaatatataaatgtttcagatatataaatgtttttgaaggtttgtattgcaacctacattctatcactgatgtcacataatttccactgtctgttaaggaatatttacaacggcatccgtcataagcggcgtctccacaaaggtcatcagggaaagccttttcatgcaattacgagtttgagctgtaaactgtgagattatttgcacgcataaataaaattaagtaattcttacacaatttttcccctttctcatcctgttatttcctttcactttctgataaaatggtactataaggaggtggaggatatgaccagacgaaggatactgacaggatgggccataggattgctgttgggagtgatggctgccggcactgcattgggtgcggagtccggatggaagacagaggacggagttcttaaatttgtggacaacaagggtaactatgtgaccaatgaatggaggacacgggacggaaaatcatacttcctgggcagcgacggggagattgagaagagcacctggatagagaatacatattatgtggacgacaagggagtcatggtgaagaattcctgggtccacacagacggcaaggacggcctgaaggaagagggctggtatttcctgggcaagaacggcaagacagaggaaggctggaagaacgtaggagacggccggtacaactttgacagcgacggtaagatgcgcacgggctggttctacgagggcgataatatctactaccttggcggcaaggacgacggtgccatgagacggggctgggtatgcctggaatttgatgaggatgatctgcctgagattggggatatctccaaggaatataagaaggcagatgagaattcccggtggtttttctttcagaataacggtaaggccaaacgctctcttaccggcaattatgaccaggagaccattcacggagaaaaattctattttgaccggaacggtgccatgctgacgggctggcatgcggtgaaggagaaagcggacagcgatgatgccacaggcatcagccgtttcgtatacctgggcggtaaggacgacggagccattgcaaagggacagtggaaacagctgtctgagcatcccggtgattccgacgacggggcagccatcttaaagaagggggatgaggagcttccaagggaaggggataaggagtggtattactttgagaacaacggcactcccgcctaccttaaaacaggcatctccaccatgaatgccgccaccatccgggtggatggcgaaaattattttgtgaaccagtatggatgcagaaggaacggactggtcaagatagtatccggcggccatgtgttggtgggatatttcggagaaaaggggactgacggcaggatgctcaccggcaggaataccggtattgctgacgatgacggcaaacgctgcaccttctatttcaacacctcgggatccaacaagggagctggcttcagcggagaaaaggatggattcctgtactacaacggtttgctggtgacagcggacggggattcccagtacgaggtctatcaggtggacggcaaatattacctggtcaatgaatccggtaaggtacagaccaatgagaaggcttataagagcgatggggattatgtctatttggttgaggacagggaagtttactatacggatgacaacgggaaaaagacgaagaaggcagacagcagcgccacgcttccggatttcacctgtgatcaggtatatgagctttgatgttttataagctttgtttctgagctttggaaagggacggcttccgccatactggcggaagggccgtcccttttaggttgtggttgaaaaaagaaatacggtctgatatactgaaatggcgggaaatatcttgtatacagtataaagatagagccggagttttcagcccgtaaaagccttataaaatgaggagaccccgattgtataacaaccggggcaattatgaaaaatctatgtgcaattttactatttatcatttgcatatgtgacttgctcttatgaaaatagtataaaaaataaatgtgaacgaaatgtgaatttgttgtaaacagattatgaaacattatatattaccatagatgcagaatcgaaggagagaaaatggagcaggaattaaagagaaagacaacggtcatcggccacaggaatcctgatacggattccatctgttcggctatctgttatgccaacctgaagcgggccattacaggggatgcgtacattccggccagggcaggccatgtgaacggagagaccaggtttgtcctggattacttcggcatggaggagcctaagctggtggaggacgtgagaacccaggtaaaggacattgaaatccgcaagaccaggggagttgcggataacatttccttaaaaaaggcatggaacatcatgcaggaaaacaatgtggtgaccattccttccgtcaggcccgacggtaccctggaggggcttatcacggtaggcgatatcacaaagacctatatgaatatatatgacagcagcatcttgtccaaggcccatacccagtattccaacatcattgaaacactggaagctgatattgtggtgggggatgcggacgtctattttgacaagggaaaggtgctgattgcagccgccaatccggacctgatggaattttacattgaaccccatgacctggttatactgggcaaccgttatgagtcccagctctgcgccatcgagatgggggctgactgcatcattgtgtgtgagggcgcaggcgtgtccatgaccatcaagaagattgcccaggacaggggatgtacggtcattgccaccacctacgacacatatacggcggcccgtctgattaaccagagcatgcctatcagctatttcatgaccagggagcacctcataacctttaacagcgatgattatacagatgaaatccgggaggtcatggccagcaaacggcaccgggacttccccatcctggacaaggagggaaggtatctgggaatgatttcacgccggaacctgttgggcgccaagggaaaacaggttatcctggtggaccacaacgagaagagccaggcagtggcaggtatcgagagcgccgaaatcatggagatcatcgaccatcacaggctgggaaccgtccagaccatggctccggtgttcttccgcaaccagcccctgggctgtacggccaccatcatttaccagatgtacatggaaaacaaggtggatattgagccgaagattgcagggcttttgtgcagcgctattgtgtcggataccttgttgttccgctcaccaacctgcacaccggtggatgagatggcagccaggtccctggcagccatagcaggcctggatatagagaaatacgccatggaaatgttcggagcgggaagtaatcttaaggataagtccgatgaggagattttctaccaggattttaagaagttttctgttggcaaggcgctgattggcgtgggacagattacgtcgttaaacgatatagagctggaaaccctgaaggagaagatgctgggttatatggaaaaggccaaggagagcaacagcctggatatggcatttttcatgctgaccaacatactgaaggaatccacggacctgatttgttacgggcagggcgcggtgcagctggcggccaaggcctttcatctggatatagaggaagccacggaaaagccggaaccggtgctgagcctgccgggggtggtatcccgtaaaaaacaattgattccggagctgatgctggcggagcaggattaggacaacggcccggcagggcaggaggattaagatatgtcaaaggaatactggaaaccaggcaacatgctctacccggtgccggctgttatggtcagctgcggcagggagggagagacacctaacatcatcacagtggcctgggcgggcaccatctgctcggatccggctatggtgtccatatccatacgcaaagaacgtttttcccacagcatcatcagggatacaggcgaatttgtcatcaacctggtgaataagcggctggtacgggccacggattactgcggcgtaaaatccggcagggatgtggacaaatttaaggagacaaggctgaccccccaggcatccaggtatgtgaaggcgccgggagtggaggaaagcccggtgaacattgagtgcaaggtggtggaagtgaaggaactgggaagccatgatatgttcattgccaaggtgatgggggtgaccattgacaaccagtacatggacgacaggggaaagttcaacctcaatgcatccggacttgtgagctattcccacggagagtactttgagctgggaaagaagctggggagctttggatattcggtgaaaaagccggtgaaaaggcagagtgataagaaaaggactgcaaggaggaaaaaagcgtgaaaccgaacattaccatgataggcatgccgtcatcgggcaagagcaccattggggtactgctggccaagaggctgggattttcctttgtggacgtggatatcgtgatacaggaaaaggaaggcaggctcctgaaggaaattattgcacaggagggtatggacggattccttaaagtggaagagagaatcaatgccggactggatgtgaccctctctgtcattgctcccggcggaagcgttatatacggtgagaaggccatggagcacctgaaggaaatcagcgaagtggtctatctgaagatgagctatgaggagatggaaaaccgcattggcaatgtggtggaccggggcgttgccctgaaaccgggttttacccttcgggacctttacaatgagcgcgtgccttattatgagaaatatgcggacattaccattgacgaggagggcaagactcccggggaaacagtggatgcgctgagggacatcattgagggaatgatggaccgcagtatgattgagcgcattgtggaggaacagaaaaagattctggaggaaaaggaccgtaaaatagaagcttacgaggcggagattgcagcacttaaggaagagctggcccttttcagggctgaggagactggcggctgcggaaactagcggctgcgtaaactgaggcgatggaaactgcgggtgaagaagccatatagaggctgggcgacggatggaaaaaggttcgttctgatctttggattattaggttatccaaagattcagaacgaacctttttattgttttatttatttttattatttgacaggcagacctacagcatttccatataagccagcagcttatccgccaggtccagtccgatgtataccagaatacccaggatgatcaaagccgctgccaggaataccagcttatagaccaggtaagccttggcaaaatcccgcagctggttctctttttttccaaaggccagacagagcaggtaaacccatcctacgatggggatgttcatgcacatgaatgtaaggaaccagcgcctgggcggcatgcggtagggattggcagtatccttttcgggttccacgggggcctttttgggcagcttcagacgcggagcgcctgtatgccctgtttttttatgtaaatcaattttcatcatccggtctgcctcctggtccgtaatattccatgttgttccacttgaatttctcgctgtttaaggaggagcggagctggttctgctgtacctgtacctgctgctcggcctgcttcatggcagcttcctcggatgcccggctctcggcctgggatgcgttccactgctcctctgtgggcaggccggagatccgcgtgatggctgcctgaagccggtcggacagagcctgctgctccgggtccccggccaccagggaaagcttgccgatggcatcctgcaccagatcctgggcattcttctgctggtattccagttcctccacagcctctaaagcctgcaggaattcgttctttttggtatccttctcagcctgcttccggttctcctcggcctgcttttgggcctcttccctggccctggcatcgtcaatggccttctgcttttcgtaaagggcaatggtatcgcccatctggctgataattccggtaaagtaatcgtaccggttttccacctgctccagcatgccggccctcagctccccgtcgtccagaaggggcagtcgggaggtgatatcctgatattggctcttaaccgagtaggtatcctccacagaactgatttccctggtggtgaattcctggatatcctgttccagctgcgcggtcagctttgcctgctccttgtcgtgcaggctttgctgggcccggaattcagcggtggtgctgaagtaatcctgggttcccgtcctggggtccgcctttaattccacactttcaggctgctcccaatcccagggttccaggccctcatgtatctggttcatgatgtttttccatatttttccggcatatgtgctcccgtatatgccgggcatcttgcgggggatatcgtatcccacccacacagccgtggtatagtagcgggtgtagccgcagaaccaggtgtccttactgctgttagtggttcctgtcttacccgctgcgggcatgccgttatccagctccagtccgcgtcctgtgccgtagggggaggtcatggtgcctttcaggatatcggtgagcatgaaggcggaatcatcacgatagacctgtttggcggcaggcggcaagtccttggtcaggtcgccgtcgtgctcatggatgatttgggtgatgcaggtccggtcgttgtacacaccataattggccagggtactgtatcccttagccatgtccaccacacggacgccgttggtaaagcctccgatgctcagggagggcacgccgttgtcaacgtatgtaagcttctggaactccatctctcccagatagctgaggccgtagtccacgccgatgtcctccagtatctgccatgccactgtgttcaggctgcggtttaaggcttcacggaccgttacgctgccgtggtaattgccgccgctgttggaaggcccgtcctcccatttgtggtcgttcaccatgcgcgtggggtagtactctccggtgtcaaaggcagggccgtagtctatgaggggcttgatggtactgcccggctgcctggcgcttaaataggcacggttgaactggtccccgcttcccctgccgcctacgatggccaccacgtagttggaccggttgtccacgataacgcctgcgccctggagggcatactttccattgtcctgcagctcggtgtaggaggacagcccctggtctatgtctgcctgaagcatgtcctggagactgctgtccagggaagtgtatatcttgaagccgccggcgcggattaagtcggatttttccgtgtaggcggttgtatagcgttccatgtaggaattgtagtcatccttgtcctcaaaggtgtagcggaactggaagccgtctttctttaacagctccagggccgcgcagtggatggcgtagctgctctggtaattctcgtccgtgccctcggattcctgcttgaccacggtgaggggctttgacagggccttttcgtaatcctcatcggaaagttcgcctatttcattcatgctctttaatacgtcgttgcgcttttcaagggatgctttgggatgggctaccggatcgtaggccgagggactgttgctgatgcctaccaggacagctgcttcctccacgttcaggtctgccgcatgcttgccgaagtagtagcggctggcagcttccacgccgtagcactggtggccatagaaattggtattgcagtaaaactccataatgtctgctttggagtactttttttcaatctcaggggccagaaggatttccacaattttacgggtgaaggtctgttcctgggtcaggtatgtattcttaatgacctgctgggtgatggtgctccctccctgggtgacttgtcccctgtgctttaccagagccagaccggcgcggaaggtggcaatccagtcaacgcctgtatggctcttaaaacgtctgtcctcctgagcaatgtatgcgttctgaatgtttatactgatgccggtgatgcccacatactggtagtggccggcattgataagccctatctgacggccgtccttgtcgtaaatcacggtatcggacagttttgagaaatctgtacgctccatctgggccagcttgtcgtaagccagctctcggcactcatccagatccggcttgaccttggcgtaaatcagcaggcacaggatggcacctaatatgaatccggcggtgatcacggccagaagggcgtggaacagccatcctgtgatgcccaggagactgactcctatgtcgcggatcaccagcagggtttttcgggcggcctgtttcagtgtatctttcatagtcctctttatcctctctgcgcccgggttatgtggatggatatgaaaatgggcgctgatatctcaatagggctggaaacaattgccagcccggtaaaccattgatattataagccagaatggaaaaaaaggatagggaaaaagtataaaaataaggactttttccgccaaaagtgggggaaaagtccttattttggaaataaatatcatattttgcgcatcaggaaccggagggtgtgggaggggattcccattcccttttcctgcatctcggtaaaggcagacagaatccgggcgatctcttcgtcgtcagagggaatcaggtggttatccagggtgatggtcagcacagtcagcacgatttgggctgtctcttccgggaagctgcactggatgctgccttcccgcaccccctggcggatgatgtcggccaggatgggtttcagtttggtgatgatgatgcgggagaacttctggtgtatgaaggcgctttcctgctgttcgttgaaggtgtgtatttcctcccggcgtctcaattccatggaggagtccaggcaggcgtggtatatgatttccagttttttaaaggcatccaggtgggaggacgcggccagctccctgccttcgtccaggacccgggagtagtttctctcaatcactgcgtctatgatatcgttcttggaggaaaaatagtaatagatacttcctttcccgataccggctttttgggcaatatcactgacggaaatggcctggacattggcagaacccataagttcctgcatggcatccagtatcatgtcctttttattatggttttgcataaaaaatcctcggttttttctttagaatacatccaagtatagcagaatataaatgaaaacgccagacttgactggcggtcgaaaacgtgttatgtttagtttgatttcgattcgaccactggtcgaaaagcaggagtacaaggttcaggaggaaacgtcatgatttatctggcttcatatgaacccggcggcagtctttataaccgggaacgggaacatatactgggcaggagcctgctgaactttggtcttatgaaggaatatggacggacctgggaggtagagcaggaagccggttcaaaaccgcgtcttaggggtgcagagggcgtggaatttaatatcagccatacaaagggtctggtggtctgcgctgtggcggacagagcgctgggcgcggatacggagcagattcgtccgtttaaggcgggcctgatgaggcgcgtgtgttccggaacagagcgcagttttgtgatggcaggaaggtctgaggcggagcgccgggaacggtttttccggctgtggacccttaaggagagctatgccaaggccattggcagagggctggcctttccgctgggggatatcacattttccctggaggagggcgttataaaagggagtattccgggctggcggttttaccagtccagggtttaccaatcatatattatatccgtctgcgcggcggacgaaaaaggagagtcagtatgagttacgaagaagtatttacaaaggtaaaggagattttcatgaaggccgatgtgagcagggtagaggagcatctggcctttcagttcaatattacgggcgagggtgaaggcgtgttttatgcagaggttagggacggtgttctgagggtggagccgtatgagtattatgacagggacgcaaagtttatctgttccgccgatacgcttatgaagctggcgtcgggtaagctggacccggtctttgcgtttaccacaggaaaactgaaggttgaggggagcctggaaaaggctctgatgctgcagatgtttgtgtaggcaggtgcgtgtgcggcgccggaaagccggtcagtccgcggtaaaggagtgaggtatatgggaatcaaaggatggatgctgggactggcggcagcaggagcagcgggagaatacggcatagcgcggtattttttccaccggaccgtggtccggggaaatgcaaagcgggacaggacacagaagatggcgggcacggactgggacgcttatattccgggtatccgcgccagcagggaatggctggcaggacagcctcaggaagatgtgtacataatatccagggacgggctcagactccacggcacattcttttgctgtgaaggttccaggagggcagtggtgtgctttcacggctataccagcgaaggactcaacgactacacatccattgcgaaattttatctgaaccagggctttaacctgatggtggtggatgagagggctcacggcaaaagcgagggcacctatatcgggtttggctgtctggaccgctatgacgccttgcagtggatggagtatgtggtggagcggctgggagaggactgcgggctgatgcttcacggtatttccatgggagccgccactgtgctgatgtccacgggcctggagcttccagaacaggtaaaggccgctgtgtcagactgtgcctttacctctgcctgggaagtgttcagccatgtgctgaggagtatgtaccatatgccggcttttcccgtgatgcagattgcggaccgcatggccaggagtgaggccggatacggcctggatgaatgcaatgccaggaaagaggtaatgaaggcccgtattcccattctgttcatccatggggacagggacacctttgtgccctgttccatggtacatgagctgtacggggcctgcgcctcgcccaaggagttgttagtcatacccggagccagccacgcagaggcctactataaggatacggaccgctatgaacatgcaattggggaactgattgcccgggttttcggaaaagaggagaacagagtatgaagacaaggaaaggctacaaggtatacccgctgacatcagcgcagaagcttcacttttactgcctgaaatactgccccaagaagcaggtgttaaacatcggatccagcctgaccatccaggtggacttagactgggacgtgcttaaaagctgcattcaggaggccattgcccgctgcgataccatgcgcctgcgctttacccatgacaaggagggcagcatctaccagtatgtggtgaaggaggagacaaaggaaatcgaacactttgactttaccggctggaaggaggaggacgcggagcaaaagctcagggagtggacagaggttccctttgagcggtacgattcccccatgcaccatattgtaatgatcaaaatgccggatgggtaccaggggctttacatctgcgtggaccacatgaccatggatgcccagtccctgattctgtttttccgggatgtgattgaactgtatgccagcaggttttacgacgaggtggaacatccaaaggaaatgtcctcctatatcaggcagctggaaaaggatttggcctacgaggccggaaacagggcctgtgaaaaagacaggcagtttttccaggaactgattgcttcctccgaacccattttcacggacatctacggtccgaagaagctgctggaggagagaaaggctgcccgcaacccgaagctgagggcagccaccaacacatctgataatgtggaggcaaatatcaccaacttccatctggaaggggagccttccagacgcctgctggatttttgcgagaaatacggtatttccatgacctgccttctcttaatgggccttcggacctatctccagaaggagaatgaccaggacgacgtttccgtcaccaccaccatttccaggcgggccaccctgtcggagaagcgctgcggcggaagcaggattcactgtttccccttcaggaccattgtgtccagggaggataccttcatggagggactgctcaaaataagggatgcccagaaccagtatttccgccatgcgggttacagcccgtcggagtatttcaattacaggcatgattattataagcttaaggacgggcagacctatgagcccttaagccttacctatcagcccctggccatgaagtatgacggtcccggcctggacaagctgggcgatatcaagtataagactgcccgttattccaacggtgtggctgcccacaccctgtatctcaccgtgagccacagggcagaggacaatggcctggactttggttttgagtaccagaccggcgtggtgacgccggagaagctggagtatatttattactacctgtgcagaatcatattccggggtgtggaagacccggagcgcccggtaggggaaatcatagagatggtgtaaaacagcagaacagctgatgcgacggatacaaagacggaatataacaaaaagagaatatcaagaaagagaattaaaaaagagaattaaaaaagagaattaaaaaagaaataaaaaagcaggaggattacaaagatatgtttgaggatttaaaagagatcatctgtgagtatgtggatgtggcgccggagactattaaggaggattcccggttcattgaggacctgggcttcaattcctatgacttcatgagcatggtgggggagattgaggagaaattcgacgtggaggtagaggaacgggaagtggtcaatgtaaagaccgtgaaggatgcagtggcttatatccagtccctgcaggcagagtaggccgaaaaggcaggaggcagatatggcagcagagacattaagggatataatacggcacggcgcagaggcttatggagagcagacagcattccggtacaaggtaaagaaggaaatcattgacaagtcctacaatgaggtaaacctggattccatggctgtaagccgtgccgtggaggcccttgggatgaaaggaaagcatattgcggtcataggcactaccagctaccagtggattaccacctatttcggaatcgtgaacagcggcagcgtggcagtgcccatcgacgcgcagcttcccgcggaagccgtgtgtgagctcttaaacagggcggatgtagaaatgctggtgtacgatgaactgcgctctgacgtggcaggcgttgtgcgcgggaaatgtccgggcatcagtcacgtggtatccatgcaggcccgggagacgatgggggatgtgctctcgctgtcccggctgatagccggacatgcaggtacatatgagacagagcttgccggcggtcagctctgcaccatactctttacctcaggcaccaccggaaagagcaagggagtcatgctgagccacaggaacctgacggacaatgcggtctgcctggacatgaggatacctgcgggaaccgtgtccatgaccctgctgcccatcaaccatgtttactgtctgaccatggatatcataaaggggctttatataggaatgattatctgcatcaatgattccattatgcatgtacagcgcaatatgaagctgttcaagccggaaattgtgctgctggtgccccttgtcattgagtctatctacggaaagttaaaggatgccggaagcctgattcccaaaaagatggtggcaaaggccgcctttgggggcagcctgcggatcatatgcagcggcggggcctacctggatccggactacgtagaccgtttcagggaatacggaattaccatccttcagggctacggcatgacggaatgctcgccggttatcagcaccaatctggaatgggagaataagaagggttctgttggaaaacttcttcccaactgtgaggccagggtggtggacgaagaaatctgggtaaggggatccagcgtcatgcaggggtattacaagatgccggagcagacggccgagaccctggaggacggatggcttaagaccggagacttagggtatgtggatgaggacaatttcgtctatatcacaggccgccgcaagaacctgattatccttgccaacggcgagaatgtatccccggaggagctggagaacgagctgagccgctcggaactggtaaaggaaatcctggtccgggaaaaagataagataatagaggcggaaattttcccggattacgagtacgcgaagaaaaagcatatcaaggatatccagggaaaactacaggaactgattgacgggtttaacaaggatatgccggtctataagcgaatttacagcctgattgtcagggagacggagtttgagaagacgccgtcaaagaaaattaaaagattttagaaccctgccgtacattatgagcggattaggggaaagcagatatatactctgttttcctgctaaccgcttttttgctgcccggaaaggtaaaaagattactataaatagtaaaagctgtccattctaaacgtcatttcctgtcctgtccggcatctgcaaagaaaatccgggcgaaaatcagtcaaaatcatacggttttccatcaatttattttattcataccggaactgaaaaaagatataatctaaaacgtgttcagatggagggaagttatggaccaggaatttttttaccggctgctctcctgccagggagtatcgggcagggaaacgaatatccagaaaacagcagcagcgtatatggaaggctttgcggatgaggttaggcgtgaggtaaacggcaatgtgaccggcatactgaatccggacagcagctttaagattttgctggcaggccacatagatgagattggacttatggtcacggaccatacagaggaaggttttctgcgggcagccagagtggggggaattaccccgcggatgtatctgggacagaaggtgcggattgacacgggaaaggacctggtatacggggcagtggcaagttccggggaattgcagaaaaaggaagaattgtctgatacagaccttgttatcgacatcggggccggaaaccgggaggcggccagaaggcatgtgcctgtggggtccggtgtggtgtttgatacggattggaggcccctgttgggggaatgcatcacctccagggccctggatgaccgctccggcgcattcattgtcatggaagccttaagacgggcaaaggaaaagaaatgcagaaacggagtctatgccgtgacaacggtgggagaggaaaccggctttagcggcggggcctgggccggcgccggtatcaggccaaacatggccgttgcggtggatgtgacctttgccagcgatggaccgggcggggatgacggggtacgcggcagggtggccctgggaggcggtcccggactctgtgtggggattatgggacatccggtaatgaaccggattctggaacaggcagccgggcggctggacatccgcacgcagccggtcataacgcccggaagaacctttacagatacggacgccatacatatcagcggacacggtgtgccggcagcgctggtgaacctgcccctccggtatatgcatactccggcggaagtgtgttccctgaaggatgtcagggactgtattgaactgatcagcgagtttgtgtgcatggtggacggacagactgatttgcggccatgctagtgcttcagccggccggaaacagcaaggtatcaggataacggtaacaacatttcgggaacatgtcccggaatgcagaatagaaaggggaattatcatgagaaaaagaccattagctttattgacagcagcagccctggcagcaggtacgctggcaggatgcggttcttcggcatccgcgcccaccggagcagcgcaaaaggcagaggcttccggtaaggaatcctcccaggcagcagagggaaagacagaggcagcgggccaggctggcggcgcagccggcgtggacgtgtccggagccaccggggaaatcaatgtatggaccaacttaagccagagcgagatgaacttctatgtggaagaattcaacaagcgggttcccggtgtaaaggtgacagtcactgtcatgccgggcaacgagtaccgcacaaaactccagaacgcattccgcacaggcaccaatgcgcctgacgtggctacctttgaaatttcagactttggtatgtacaagaacaccgacctgctggagaacctgagtacggagagctacgacgcagaggctctttccaaggatatgattccctatgtggacgagctctcaagggataacagcggtaatttaagagggctgtcctaccaggctactccaggcggtttctggtacaaaaaggctctggcaagggaatatctgggaacagatgatcccgaagaattacatgagatgttaaaggactgggattccatcatcgaggtgggcaagcaggtgaatgagaaatccgggggcaaaataggactgttggacgacattgagaccgtagagcagatttactgttcctataaaggcgctccgtgggtggatgagaacaaccatatcatctccgatgatttcctgatggagcagctcaacctgatgcagcgcgtggttgacaacaatgtggatgccagggcagaccagtggtcggcaggctggacctcaggcatgtactcccaggatatgtttatcctgatcggacttcccagctgggcccttaacttctgcatcaagccgggcatcccggagggagaaatggagaaggcagcggatacatggggctatatggaggcacccgcgccttaccagaacggaggaacctggtacggcatttactctggttccaagaacaaggaagctgcctatgcctgggtaaagaccatgacagctgacaaggattacctggtcaatggcctggccggccagttaggcgatttcccggcatatataccggctatcgagcagtgtatcgaagaggggcatacggacatcgtcacaggcgaccagcagtatttccagagcttctatgacacggcaatgaacgtcaaggcagaccccatgaccaagtacgaccgccaggcatggaccagcatgactgcccagatggatttactggcaggcggcggcgccactccggaggaggcatgccagggattcaaggaggatatgcagcgcatctatcctgagatagtaattgactagaacatgccggaccacggcagacctgagtgcggctgccggatttgtaaatgaccagaggatgcagggtgtgagataattcatatcctgcatctgtttcacggaagaaggggcagggctttaaagaagcctttggcctgccttcagatgggaggatttcatgacggagaaggggaagagcatacagccctcaaaaaggagaagcctggataagagcaatcggggattgctttttatcctgccttattttattatatttttatgttttacactgtatcccatactgtacacgtttaaactcagctttcacagctgggacggcctggggactcctgtctttaccggcctggcaaactacaggcgtcttttaaatgacgcggtgtttttcaaatctattttcaatacagtgttcatcgccctgctggccatggcgccccagatgatattcggcctgattctggcctttctgctgaaccagcaccggttcaggggcgggaacctgttcaaaaccattttttattttccaaacctcgtaaccgcagtttccctgggcgtcctgttcagcctgctgtttgactttaaggcgggaagcgtaaacaagcttctgatggccttacatatcatagcggagccggtaaactggaagatgaacgggctgtttacccagctgattgtggcctttgtgctgttctggcagtattttggatattataccatcatatttaccgcgggaatcaagggcataccctatgatattatggaggcagccgaggtggacggtgctaataaattccagacctttttccacattgtactgccccagctgcgcaatatcatgacctatgcctttgtcacatccatcataggcggactccagcttttcgatctgcccttcacctttgcgggggccacgggaggacccagcaaatctgtcctcaccatggtcatgtatatgtacaacatcgcgttccagaattatgattacggatatggttccgctatttcgtacggcctgtttgtcatcatcatcgtattttctctgatatttatgaaatatacggcagggaaggagaggaatttttaaatggaaaaaaaggaactcaagaagtacagtgtaaagacaaagtttttccgggcaattacctacggggtcctggttctgctggcactaatctgcatcgtgcccttttacaacatgattatcaactgcacccatgacaacgccgccctggccacctccttccagatgacgccgggaaaatccttaaaaaccaattaccagcacctggctgccaatgtaaatatatggagggggctgttcaacagcctgtttatctcccttgccagcacggtgattacggtttacgtgggcgcgctgacagcttacggctttgccaagtataaatttaagtacaacaagcagttattctggctggtgctggctaccatgatgcttccgggccagttgggaatcatcgggtatttccagctcatgaacaacatacatatgctggacaattacgcggcccttcttatcacttgttttgcaccgccggccatggtattctggaacaggcagtacattgattcctatgtgccggatgagctgatcgagagcgcccgcatagacggatgcggggagttccgtattttcaacgaaatcatttttccaatcataatgccgggagtggcaacccaggccattttcacctttgtggaatcctggaacgcctttgtgaagccgtccattcttttgttctcccaggacaaattcacactgcccattctggtgcagcagatgcagggagtatataagaatgattatggaactgtgtatatcggagtcgctctgtcggttatcccaatacttatcatgtttgtgctctgttccagacgcatactggaaggcgccacggccggtgctgtaaagggataacgcaggtaccggaaaaagatgctgcgagggaaggtatgaagggtttgagacatttaaccatatggatgtgcgtcttggccgcagttcttggaatgggggcatgcagcagggcggaaaaggatgaggatgtccgggtggatatgacggcgcctgcaaaggacagtccgggagagcggccggtcatacggttatggcatatctatggaagtgatgacgaccaggccgcgcgtatcatggagcagctgaccagggaggcagaggataaatttaatgttaccatagaagtggatacagctgaaaatgaaggctataagacaaagattaaggccgcggctgcggccaatgagcttccggacatcttttatacctggagccatgaattcttaaaacccatggtggacgcgggaaaggtgctggaggtgagccggtattacagcgatgatttccagtcccatctgaacgatgccatgatgaagggaatccagtttgacggcgggacctatgcgctgcccctggacagttctgtggccatggtgtattacaacatggaaatgatggaccggtatggcctggaaatacctgtgacctgggatgagttcatccgggtatgccagacttttgtggacaacggcataacccctatgccggtgggaggcaatgagccgtggaccattgccatgtattatgaccttctggcgctccgggaagtggggccggaaaaggttgcggacgcggcagcaaagcggacggactatagcgacccaggtttcctggaagctgccagaaaactgcgtcagctggtggatatgggggcgtttacggctgactcggccactgcgctcagggaggaggcagaggctcttttcatgcagggtcaggcgcctatgtatcttaacggcagctggacttcatcccgtgtctacagggagtcatccagggtggcgggcaaggtgaaggccgcgccctttccggtgacagggtcaggaaaatccactatatatgatttcacaggggggcctgacagcgcttttgcagtgagcagcagtacaaaggacccggaacttaccgtggatttggctgagtatatggccatggggctggcagtggagctttataaatgcaagtcaaatgacctcccctatatcaacgtggatacgggtgacgcccagttaaacccgcttatgcaggagattcatgagtacacggaccatgccgccagctataccatatggtgggataatctcctggaaggaaccgacgcggccagatatctggacagcctggaatgcctgtttcgcggggatatcacgccggaggaatttataagccgtatgaacgggttaaagcaagatgaaacagatgacaggagggaaacaggatggaagtgagatatgtaacggaccggcatgacaccctttgcgcaaaatacagacaggaatacagggataatcccgattatctgtactgcggggtggcggatatggacctggcgccgccggatccggttttagaagccatgaaacgcaggctggaccatggggtttttggttataccgaactgccggacggttatgagaaactggtttcagactggatgcgtgagcggtatcactgtgaggtaaagcaggaatgggtgctgttctctcccaggatcaacatggcccttaacatggcggtggacaccttcacagagccgggagattccattatcgtcaatacacccgcctatcctgcgctgacaggggcagtagaaaaatggggccggaatctgaaggaaagtcccctgattcttaaaaatgggcgtttcaccattgattttgacggtctggaaaggctggcggaccagaaaaccagggcatatatcctctgcaatccccacaatcccaccggaagggtgtggacggatgaagaactgtcaggggtcatcgccttctgcaaacgccataacctgcttctgctgtcagatgacatacacggggattttgtgtggccgggccatgtgtataagccgcttttaacgatgtaccataatccggagcaggaaaaggttattgtgttcaattccctgacaaaaaccctgaatatccccggactgattttttccagtgtcattctccctaatcccgaaatgcggcgggccctggaggaaaccatagaccggtgggggcttcacaaccccaatgtgttcgcggccgatatccttaaacctgcttaccgggaatgcggggagtgggtggaccggatgcgggcgcaggtctatgaaaacataaagactgcccaggagttcataaacagggaactgccctggctggatgcctatgtgcctgacggcacctatcttatgtggattggatacggacgcaccggtttatccgaggaggacatgagacggctgctggaagaaaagggccatttgataccgcttatgggaacccatttcaaggaggccggcagaggctggttcaggctgaacatggggacctcaggggaacaggtaaataaaatacttgagagacttgcgctgtgctggacatagggccggataacaccggtcccaggtccggcatgagccggttatggggatgtatatgaaagggttatgtgagaatgtaaaaggggcctgggactggctgttccatgaacatatttcacgcagaatcatggccgtgttcgtgatatttttcctcatcagcttttttctgacctattccctgtattcgtgggctgccaggaagcaggaggactccatgatagagcagtcatcggtgcagatggtcactggggtcagaaacaatctggatgagatggtccttaatgtgaacgatgatttcaatatgctgttaaaaggaggcaccctggatgtggtgaaccatcttcccaggccggaggacagaaaaacatatgacaacatgctgtttaccgctcttgacagcaaccattatctggagtccatctatcttctggatttttcggcgcacctgtacggcgtgggcaagcatgacatgaagcggctcagcgtggattccacattgaaatgtccgtggtacaggaaagccctggaagcaggggggagctatatactggagtatgaggcaggaggcattttctataaaagatacaattccaggtttgtgtctgtcatccggaccatcaacagcctggagacccagaagcctcagggattcattattatgaatattcccacagacgccatagcggaaatctgcagcgcggctgcttatggaagccaggccatgatagggattatggaccaggatggaaacctgattgcgggtacgcccggatttgaataccaggatttccttaaaacgccggccggaagcagtgatgaggaaaaacttctggtaagccgcaagggggatggggagcataccacttccctttacctgccggactatggatggcacctgattgccaggatacccagtcaggtgaaccgcagcgcttttaaggacctgttcctgatcgccacccttatttttctggtgaatgtggtgctgatgcttttcggctccctttacatatccaagtccatatccaatcccatctatgcgctgattggaatgatgaatacggtaaaggaccggaatttcaggaagatacctgtcaaataccccaaaagcgagattgggattttacagacgaattacaataacatggtggacgagatatcatccctgctgtccaggctggtggaggagcagaaaatcaaggaaaaggcggagctgcacgcgttgtttgagcaggtaaagcctcattttctctacaacaccctggatgctatcggctatatggccttgacggaggagccgtcccagacctatgaggccatagagacattggggagcttttacaggcagagcctgagccagggggaccagatgataaccgttgaaaaggagacagccattgtaaacgattatgtaaagcttttgaggctcaggtacggggatttgttcgatgtggagtaccaggtggatgagagctgcctcagggttctggtgccccacctgattctccagccgttagtggagaatgccgtgtaccacgggattaagcccatgggcggaaacgggcatatccgcatccggattggaccggaggagggcggccggatgaaaatacaggtgcaggacaacggagtgggcatagatgcttccgccctgtcaaaacttcaggactaccataaaatatggaatattgatattgacgtgtcgggaaccgggattggcctgattggcactatacagagaatcgtactgatatacggtgaacaggcgtcttaccagattagaagcgtgccggagggaggaacggaaatcaccttccttctaccggtgacctgcgggggagaagaggaccatggagactggatatgaccagctgttaaaagtgatgtttgtggatgatgaggagaaaaccaggaaacttctcagggtttttgtggactggcagtccatcggctatgagccggtggaggacgcggccagcgccaaccaggccatggaactgatagaagaggagcatcctgacgtggttatcacggacattgagatgccctatatcaacggcctggaatttgcccagatgctggcggaggagtatccgcagatcgtggtcatcgttctgacggcccatgacctgttccagtacgcgcagaaatccgtggagctgggcatcaagagtttcctgttaaagcccatacggagggcggaactgattgaggtcatgaaggatgtgcggaccgatatcatggaggagcgcagagctatttttgagtttgaggggcttaaaagcaggattgcggagtccaggacgctgattgtccagaatttcctcaacaacctgcttttgaataaggtggaccaggaaagcctgtggggtaccatacgctactatgatattcctctgagaagggatacagggcactacaatgtaatggtgctgatgccggagaaacacaatgacccggaggaggacgagctgagaaggcagcagtgcatggaggtgctgtccccggcggtaagccgccttacggatgtgctgctgctaaaggacatacaccagaacctgattctcctgagccagaataagaaaatcagcctcatgtcctacggcgcccattttaccgtactgattaaagaaaagctgtccatgggaatctatgcgggctgcggaaatccggtggattccctggaggagatccgctacagctacaagcaggcatataagaatgccatgattgccagctacagccacaaccaggcatttctttcatcgggcagggaatccgatatgggaggcctccaggagctgatccagaccctgacagaggagctgcccctatatctggggataccttccggggacaaggtgaggcagctggtgggcacggcctacgggacacttaagggcctgccgcagagcagcctttcggattatcttgttatatcttattccattgtcaatgtgaccctgtccaccctgagcgacaatggaattccttacatagagatatacagcacggaccatctgccctatgagaagatactccgtctcaccggggcagaggagattgagaagtatatcagccagtttacagactttacggtctgccagattgaagagtacatgaacaagaaaaacaccatgctggtccaccggattgtccagtacatgaacgagcatatggatgattccactctgtcgctggctaagatatcaaagatcaactatatcaacaactcgtatctcagcaggaccttcaagtgtgttatgggaatcaacttcatggactatctggtatccatccgcatcgaggcagccaaaaagcttctgaagggaacggatttgagaatttatgaggtggcccgcagcgtgggcatcgaggaccccaactatttttccaagtttttcaaaaaacatacccaggaaacgccggcccagtaccgggatcgatgtcaggaagccttgtaggcttcctttttttgcatttatgaagaaacaaagaacgttttattgtgcataatatataaatcacctgacaaaaacttgtgtaatatggcgccctgatttaaaaaaagtgaaagaactttctgaacatctaagtgctattgaaaataaaatcaaacctgttatactaaagctacaagagatgagcagccggaacaaggctgccaggcattcataacaaggaggaactcatatgaacgaaaaagtagagagcctgaaagggaagctgattgtatcctgccaggccctgccccatgagccgcttcattcgtcctttatcatgggccggatggcactggctgccaaggagggcggagcgtacggaatacgtgccaataccaaggaggatatcgctgaaatccaggcccgggttgacctgcctgtcatcggcatcgtgaaacgtgactatgaggacagcaaggtatacattacgcctaccatgaaggaaatcaacgagctgatggaagtcaaacctgatatcatagcgctggatgctacccacagcctgaggccgggcggcaggaccctggatgaattttacagggaaatccggaaaagctatccggaacagctgctgatggcggactgctctacggtggaggaagcccttcacgcagaccagctgggatttgactttatcgggaccacactggtgggctatacggaccagagcagagaccttaaaattgaatccaacgattttgaaatcatccgccagattgtggcaaaggtgaaacaccgtgtcattgcggagggaaacatcaacacgccggaaaaggcgaagagggttattgaactgggggccttcagcgtggtggtgggttccattatcaccaggccccagctgataacaaagtcttttgcagaggcgctggattagaacaaacatgttaaccatttcataataaaggggacccaacgggtcattgaaaggagaagtaagattatggcaaacttagaaaagtataaaggtgttatacctgcattttacgcatgctacgacgcagagggaaatgtgagcccggagagggtaagggctctgactgagtaccatatcagaaaaggcgttaagggtgtttatgtaaatggatcttcaggagagtgcatctaccagagcctggaagaccgcaagattacactggaaaatgtaatggcagctgccaagggcaggctgactgtcatcgcacatgtgggctgcaataataccaaggacagcgtggagctggcaaagcatgcagagagcctgggcgttgacgccatcgcatccatcccgcccatctacttccatctgccggagtatgcaattgccgcctactggaatgccatgagccaggcagctcccaacacggatttcattatctacaatatcccccagctggcaggcgtggccctgacacagagcctgttcgccgagatgaggaagaacccaagggtcatcggtgtaaagaattcctccatgcctgtgcaggatatccagatgttcaagctggcaggcggggatgactacatcatcttcaatggcccggacgagcagtttatcagcggccgtgtcatcggagcagaggccggtatcggcggaacctacggcgtgatgcctgagctgttcctgaaaatggatgagctggtgaaggcaggtaagatggaagaggctatgaaggtacagtatgctgccaacgacattatctacaagatgtgctccggacacggcaatatgtacggtatgattaaagagatgtttcgcatcaacgagtccctggatctgggcggggtcagggaaccgctgcctcagctgattgaatccgaccttgccattgcacaggaagcagcccgcatggtgaaggaagcggttgcagcatactgctaagaccaggtgtgtttctgacggggatgtcaggcgctctgttcacagttacctgtgcagtactgaagataatgtaaatggtccccggtcctttctggagggagaaagggccggcatgggaccggaatgcgtttgggaaaaggaggatgtttcccagggttttccgtatagcaaagaagggagattgatttatgcagggttttactacaattgatttgattatactgattgtttatcttgcggctgtattatttgccggactcttcttctccaaaaaggagatgaagggaaaagagttctttaagggagacggcaccattccgtggtgggttacttccgtttccatattcgcaacattattaagtcccatttccttcctgtccctggcaggaaattcctatgcaggaacatggattatgtggttcgcacagttaggaatgcttgtggccatacccattaccattaaattcttcctgccaatctacagcaagctggacatcgacacagcctaccattatcttgaaatccgttttggaagcaagggcctgcgtgtcctgggcgccgtcatgttcatcgtataccaggtgggccgcatgtccatcatcatgtatcttccgtccatggtactctccaagcttacaggccttaatgtaaatctcctgattattgccatgggtgtgattgccattatttattcctacacaggcggacttaaatccgttctctggaccgatttcatccagggcagcgtccttctggttggcgttacctttgcgctgttctacctggccaacggcataaacggcgggttcggagccattttccagaccatgggcgaaggtaaattcctggcggcagaccagcctattttcaatcccaatatactaaaggacagcgtattcctgctgattgtgggcgcaggtcttaacacctgttcctcctatgtatccagccaggatattgtgcagcgtttcaccaccaccacagatatgaagaaactgaacaagatgatgctgaccaacggcgctctgtccatcttcatcgcaaccgtattttacctcatcggtacaggactgtatgtattctacagccagaacgcgcttcctccggcagcccaacaggaccagattttcgcgtcctatattgcttatgagcttccggtaggtatcacaggactgcttttggcggcaatctatgcggcctcccagtccactctgtccaccggccttaattcagtggcaaccagctggaccctggatatccaggagcgtctttccaagaaggagatgagctttgcccttcagacaaaaatcgcacagtatgtatccctgggcgtgggcattgtggccattctggtgtccatggtactggcaaacggcgaaatcaagtcagcttatgagtggttcaacggattcatgggactggtgctgggcgtgctgggcggtacatttgccctgggtacattcacaaaggtggccaatgcaaagggcgcatacgtggcattctttgtggcagcggttaccatggtctgcatcaagtacatggctcctgcgggctccgtatccatctggtcttattccattatctccatcgccatctcactggtagtgggaatcccggtgagcatgattacaagaaagatggacggggatacatccaagcctgtaaaggacgctacgatttaccacaattaatgattcattaacaggaggtaatcatgatatttggaaacatcacacaggaaaagacctatgcctttcttcctgaggatttaaaggaatgctttgcctatgcaaaggagcatgatttggtgtcttacgaaaaaggatgccatcccatcgacggagaaaggctgtttgtcaatgtggtggagtatgagaccacccggcctgagaaccgcttctgggaagcccacaggaattacctggatgtacatttaatgcttgacgggcaggagcagattgatttaaactttatagagaacatggagcagaaggagtatgtggagaaggatgacttccttcccatggacggcgcacccaacagccatgtggtgctcaggccgggggatttcctgatttgctacccggaggacggacaccgcacagccgtggccgtaaacgaacctgagaaaatcaagaaggccatattcaaggtgcggattgaccattaaaagcatatagacccggatacagaggcaaaccaaagaccctggaacgcaggacggagcatcccgtctgcgctccgggcaggtttgccttttgcggcagggcggcgtaaagggcggcgtcagggtgaaaagaagatttaaaggagcggtgctacgatgaaacagtatatttgcattgatatcggaggaacggaaatcaagcacggggtgctggacgaaaatgagaaatttcttgcaaagggtaaggtgcccaccgaggcctttaaaggcgggcctgccctgttaaaaaaggtcatggggattgcagcggactacctgaaggaccggaagacagagggaatctgtgtgtccactgccggcatggtggatgtggaaaagggggagatattctatgcagcccctttgattcctgagtatgcgggaacaaagatcaaggccagcatggaggcggaattcggacttccctgcgaggtggagaatgacgtgaactgcgccggcctggcggaggctgtgtccggggcagcggcaggggcccagtcggccctgtgccttacggttggaaccggaatcggcggctgcatcatcatcggcggcagggtgtatcacgggtggagcggaagcgcctgcgaggtgggatacatgcacatggacggaagtgatttccagaccctgggagctgccagcatactggtaaaacgggtggcggctgccaagggggagcctgaggcccagtggaacggctaccgtattttccagctggccggggaaggggactctatatgcgtggaggccattgaccagatgtgcgattgtctgggaaaaggcatttccaatatatgttatgtgctgaatccccagatcgtagtgctgggagggggaatcatggcccaggaggcgtacctgcgtcccagactggaaaaggctcttgcccggtatctggtatccagcatatatgaaaagacagagctggcctttgccaggcaccagaatgacgcgggcatgcggggagcctactatcatttcctggagaggcagggaaaggcccggagctgaccggtattggccgaaagcaggtctgtggtcttaaccaggaggaggtattatggaatatctgaaatcagtgataccggtcatagaatccaattatgtgaattttacaacggtggagcgcagtattgcggatttttttatctataacagggagcagatggatttttcagctaagtcagtggccggaaagctgtttgtgtcggaggcgtccctgtcgcggtttgcaaagaagtgcggattcaggggttacagggaattcatttaccagtatgaggaaaattttgtggtcaggcaggactccatgacaggcaacaccaggactgtgctcaatgcctaccaggaacttctgaataagacgtataacctggtaaatgaaaagcagattgagagggtgtgccggtatatggccaaggcgggacgcgtgtttgtctgcggaacaggaagttcaggcctggctgccagggagatggagctgcgttttatgcgtatcggcctggacatcacgtccatggaccacagcgacatgatacgtatgcgcggcgtgttccaggacgagaactgccttgtctttggcgtcagcatcagcggtgagaaggaggaagtattatatcttctggaggaagcccacaagcggggcgccaggaccgtgatgctcactgccaggaacaggcctgatttcgatgccttctgcgatgaggtggtgcttcttccgtcgctgctccatctgaaccatggaaatgtgatttcaccccagttccccattctcctgctgacggacatcctctattcctactatctgtcccaggacccgtataagaaggaagtgctccatgacagtacattgagggccctggaaaaggggaggagagagaaggtaatgtaaatgccgggagacgcccattcccggcgggataaaatgtatctcaggacgtttcaggaccatgagggctattaaactttcggtatgctgttaatcacggcatgccgatttttttgttagagtatgaacgcttaccgcatccttggattgttttggacgagctaatatattagatagcaataaacgagatgcgacaatgttaaaaagccgctaaaacggtgtaaaaacactgtgtaaaaatgtgatattttgtgaaatatgtataaaaataagatgaaaaacagtggaaaatgactctatacaaactaatatatcagtactaatatattagtatcagcaacaaggggttaagatgaatgaaaggtgcgtatgtaaccagaacgtatccggagattcattcccgtcattcctgcgctccggtacagaaaagcagaggcataagggagtctctgagggagagcattcaactattttcatcaaaggagggttcgtatgaacatcaatgtaattatcggtattatcatgattctgtccttcttaggcatggtatggtactgtgtgaagggattcaacctgatggtgggatttgcaatcatggcaacgttctggactgccctggcattggtgggcaacgcattttcgcccacatcggccatggaaggcaaaaccttcatccaggtgctggagtatgtatatgcagagggtcctgccggatatgcaaagtccattctggtcaatgtattcttcggagcattcttcggcagggtcctggtggacaccggcatagcggccaccctgattcgtaaggtggttgagctgggcggcgataagcccagaatcaccatggcgctcctgtgtatcgttacggccattatctttatgtccatgaccggtatcggacctgttatttccatcgcggttatcgtactgcccattctgctttcactgggcattccggctcctgtggccatgttcagctttatgggatctatcatggcaggcatctttggaaatatcgtcaatttccagcagtaccagaccatatatgcgggctttaatgcggcggcagctgattacacctacaacgattacttcaagattggcgttacctgcatggtggtagccatcgtggtagtgctggtggttgccaacctttccatgaacaaaaaggcagcccacgcatgggcggccactgcttcctcggcaagtgacaatgccccggccatttcctggatttccgttatccttcctgtcctgggcgtggtgctcttcaagattcccattattttaggattctgtctttccggcatctacgcactgattacaacgggaaaaatgaagggcagctattccgaaatctgccgcctctttgcaaaactgtttaccgatggttccattgatgtggcccccatggtaggattcctgcttaccctggccatgttcaataacgcggcaacctatgcagcgccttactttacagctatcctgggaggatttgtgcctaccacagccattaccctggccatcgtgttcgccatactgacacctctcggcttcttccgcggccccatgaacctggttggatgcggaaccgcaatcctggcagttgtagtggccacccttcccaatgcaccggtagccttcctgtatccgctgtttgcagtgaccaccattgcgcctcagcatctggatatcacccagtcctgggttgcatggggatttggatataccaaggtttccaccaaggattatatgaagatgtccattcctaccggatggattgtaggcattatctgctgcgctgcagtattcgtactgtacggcggcctgatgtagatgtgaacgggagtataagacggccggctgcagcagggaaggattccctgctgtccggatgggagctggcgggatacctgccggctcccccttataagacggtttgatgatttgagatgaggaggttttaaaatgggaagatcagttaggatgggtatagacgtaggcggtacccacacaaaggcagtggcaattgataacgccacccatgagattatcgggaaatcttccgttaagacgacccacgacgaccccagaggcgtggccgcgggtgtggttaagtcctttgaaaactgcctgaatgaaaatggaatcagcccggatgatgtggtatttgtggcccactccaccacccaggcaaccaatgccctgattgagggcgatgtggccactgtaggtgtcatcggcatggcaaagggaggcctggaaggtttcctggcaaaaaaacagacaaaactggatgatatagacctgggcaaccagaagaaaattaaaattgtaaatgacttcatcaacgtgaagaaaatgaacatggccgttgttgaagatactataaatagcatgcagaagtcaggggcccaggtactggtatcctccatggcgttcggcgtggacgacggaggccctgaggcagaggtgtatgaggcggccagcgccaggggcatccccaccaccatggccagcgacatcaccaagctctacggtcttacaagaaggaccagaaccgctgccatcaatgcctccatccttccaaagatgttagatacagccaattcaacggaaggctctgtccgggaagcaggggttcatgtgcctctgatgattatgagaggcgacggcggagtcatggagattacggagatgaagaagcgccccgtgctgaccatgctgtccggcccggctgcttctgtcatgggatcccttatgtatctgagggcctccaacggcgtgtactttgaggtgggcggcaccaccaccaatataggcgttatcaagaacgggcggcctgccattgactattccatcgtaggcggccatgccacctatatctcatccctggatgtgcgggtgctgggcgtggcaggcggctccatggtccgggctaacaagcagggcgtggtggatgtgggaccacgttccgcccatatagcaggactggactatgccgtgttcacggatacagataaaatcagggggccgaaggtggaattcttctcacccaagcagggggatccggacgactatgtgagaatccggatggaggacggatccgctgtcaccctcaccaactcctgcgcagccaatgtgctgggactggtaaagccggaacatttctcctacggcaatgtggaatccgccagaaaggccatgaaagccctggctgactactgcggtacaacggtggaggacattgcaaagcaaattatggaaaaggcgtatgccaagattgagccggtgatactggagctggctgagaaatataagctggaaaaggaccagatatccctggtgggcgtcggaggcggagccgcttccctgatcgtgtatttcagcaataagatgggggtcaagtactccatcccggagaatgccgaggtcatttcatccataggagtggccctgtccatggtccgtgacgtggtggagcgcatcatgccttccccgtccaaggacgatatccgggccattaaaaatgaggcccttaacaaggccattgagtcaggtgcaacagcggaatccgtggagattcatattgaaatagatccccagacctccaaggtgacggccattgccaccggttcaacggaggtgaagacagcggacctgctaaaggaatgcgatgagactgaggcaaggcatctggcagcagaggacatgaggctggcggatggggatacagcccttctggcaacgtcaccctacttctatgtgtacggcgaaagaacagagccgggtatgccgggcgctgtccgcatcgtggataagaagggattcataaaggtacagcggggaagggccatgtgtttaaaaaccacggcagcagcctatctggacgcgctgaaacagctctgggacgatatggcagtataccagacagagctgattgcaaggccggattactacctgtgcatgggcgccagggtcatggattttacggcccaggactttgagcagctggagcttttgacggacctggaggtatcttcactggaaccggatgaagaaatcctggtggtggctgccaacatcaggcagaattaaggcgcggacccgctaaaggggccatgggaccggtctggaggacagagatatggaagagatgaacctgaggaaaatgatgaaggggctggctgccgtggacgacatgacctggggaatgtacgcattctccagggatgcgctccgggataaggtggactgcggccggaaaaaagagatgatagaaaaatccatctgctgcggctatgaaacagcggataaaatcatggaccagacgggtacttcaaatccccgggagattgccggaaagctgggactcagggtggaatatctggataaggggcagatagcggacagggtgctatttgccctttttacccctcccggcctgatacaaattatgagggagcctatcgacaaggcggttaaaggcggttcactggacggcttcaccacaagggagcagctggaagatttgattctgggccatgaaatttaccactatctggaagaggagtacgatgggatttataccaggaccgagaagatacgcctgtggaaaatccttggttttgagaaccgttccaccataagggctctgtcggagatagccggaatgtatttttccaaaaaattaaatggttttccctattccccatttgccttagatatccttttgtactataattataattcagagacagccctgaacatgtacagggaggtagcagagatctgacaggaggagttctatgggcagcacagacagcaggaattcggaagacaacatatatgacgtactgcgcacggacattctgaacctgaagctgcgtcccgggatgattttcagcatcagggatatcagcgaggcctaccaggtgggaaggacgccggtgagggatgccctcattagcctttccaaggaggggcttatcacctttcttccccagcggggaaccatgatatccaagattaattatgacaaggtgcttaacgagcgctttctcaggacctgtgtggaggagaaggtgattctggagtttatggcagtgtgtgatttaaaggccatcacagagctggagatgtccctggaccgtcaggagaagtttgtggaggaggaggacatacgggcatttctggccgaggatatgtactttcattctattttttacgtgggggtcaacaagggatactgcaacgacatcatatcggccaattcaggccattacatgcggattcgtcttttggccatggcggaccagggcatagaccgggaagcccttaagcagcataaggagataacagacgccattctggccaaggactgggagcggcttcacactattttgaattttcatctgaaccgccttgtgaatcaggagcgtgccctgctgtccaaatatccggacctctttgaacgggaaaatgtggaggtgagaagggagccggacgagctgggcgtggatttcctggtggagacaaaacttaaatatcatgcgtaaaaaagggctttcccggctgcattttaactgctgccgggaaagcccttttgaagttacatgtatgtattttaccagattcccaacgtgctctgaagtgccaggctcactgcggtgattcccacccagcagcaggctcccatgaggatgggcttgccgccggtgcggatgagccttaccagatccgtgttcagtccgatggctgacatggccaggacgatgaagaacttgctcagctccttaatgggggcaaagactgaggcaggaatccctgctcccatggcaatggtggtgatgaccgaagccccgatgaagtagagaataaaaaacgggaagatatctttaaagcttacagactgtccgctggcctgatccgccttttcttctttcctggtccggataaaggccagacacagggtgatgggaataatggcaagggtcctggtgagctttaccgtgactgctttgtccagggtggctgcccccagattccacatgctgtcccaggtggctgccgcggcagtgacggatgacgtgtcattgatggctgtccctgcaaagacgccaaaggcattgccggatgcggtgtcaaatcccaggaacttgccgaaggtggggaacaggatggctgccagcacgttaaagaagaaaataacggatatggcctgggcaacctcatcgtcatccgcattgattacaggcgccgtggctgcaatggcggaaccgccgcagatggaggagcccacacccaccagagtggaaatgttggatgggatatgcatgagcttatggagcacaaaggcaatcaccagggaggtggtgatggtgcacacaatgatgggaagggactgccttcccgtctccagcaccacatttaagttcatgccaaagcccagaaggatgaccgcccactgcagtatttttttggaggtaaacttgataccgtcctccagcccgtttttagttttcatgaatacggctatgaccatgccggcaaggatggcgatgacagcgccgccgatgatggggaacattttccccagaaaccaggaagggacagccagcagcaggcagaatgccaatcctttccatttcttttgtaatgatgccatttctttttcctcctcatattcccgatagcttgatatttgaccgtgtgccgggtgtaaaacccagcacacggtttatatggtaacttatggaaagcataaagtaaaattatatatattta

SEQ ID NO: 3192 - DNA, 15899 bp, Unknown
  gut microbiota DNA sequence
atattattttttgaatttttattttattttcaccccctgcacccccttgaacctcttatattttgtaccttacagaaaaaagcactattcagattatgaataatgcttttttataagcggattgaaccgaagcaaatcacttctttattacttctttttaaatgtaatcccggccccgctgttggactccgaatagttgtccagcttcatggtcccgctaatttccgtaagctggggctgggccttaagaatatcgttgagcgtggaaatctttccgtcaatatccgtgtgatctcccatggtaacctccatctttccgatgaacagggtagcctgtccgtgggaatcatactggatgcggtccacggcaatatcatagactgacagctgctgtgtcaggttcagtatctcctcaaaaatgttcttatcatccacgggaagggggcggtgcagcacgattctgccgaattccatgcctgtaatccacgggacgccgggcagctggcttcccgaactctccaccacaatgccgtccttgtcaaaatacatgaagctgctcatgtaggacacatatcccacaatgctcttctcatatataatcacttctacgtcaagcggattgtggaaaaccactttataatcctccacaaagggaatctggatgtggggacggaacttgtccgaaaaataagcgtgggctgaattcttcccccatctgccggtgaacagaagctcttccacctgtttggcggaatacctgtcacttcccgtcaccgtcacatgctgaatctgtacagacaaaagcaggattgccagcagcagtaccactgccacggcaatacctgcccctatatgatgtttactgccataatttctcatactgtacctcacctggtaaaatcattcttccctgccataaatccgctcccgtctgcgggaactttttccggccgtcaggagtccttccccacccagcggatatgggcgcccaaagctgccatgtccctgcatatgtcctcgtacccccgctcaatgtgatggcattccccgatgaatgtatccccctccgcggccagggccgccaccatcagggctgccccgcctcttaagtcgcaggcattgacagcagctcccttcaggggataatgcccctcaatcacagctctctggtcctccgtgcgtatgacggcacccatctgctccaggatctttgccgttgcaaatcttccctcgaatacctgttcctcgatataactggttccctgggcagtggccagaaatgccatgaagggcgactgcaaatccgtgggaaaaccgggatacggctctgttttaataagaaggggaaggggacgttttcccatgcatatccgaatctggcggtttttttcatcggcatccaccgccgcgccggccttttggaattcctccaaaggcaccttaaggtcagacgggcaaatgccacgcaaaagggcctctcctccagccgccacaacggcagccccgtaggtaccggccactatccggtctccctccacccggaagctgctgtcatgaagcccggccactccctgtaccatcagatggtcggttcccatgccgcagataacagcccccatattattaaggaagcggcacatctggctgatttccggttccctggcagcctggtggatgatggtcaccccgtctgccaggacagatgccagtatggcctgttccgttgcccccacgcttggataggacagatggatttccgtgcccttaagtccgccgttcttcctgcagctggcctctatggtcccatcccgttccctgatatcggctcccagggccctcagcgccatcaggtgcaggtcaatgggcctggctcctatgagacatccgcccggataacagcagctgccctctcccatgcggcccagcagggcgcttaacaccacgatggaggaacgcatggccgtgacatactcctcagggatggatgtccctgtgacgctgcgggcatccatcacaagacagtcccccttgtggcagcaccggcagcccaggctttccagtatgtccagcatacaggccacgtcccgtatgaccgggacattggtcagcaccgtaacccctctgtgaagtaaagccgcagccatcatgggcagtacggcgtttttagaaccttgtatggatatctctccctttaagggagtaagaccacaaacctgaatgacagacaatggggcacctcctggtatctatgccttccgtagaaaacaccttctacttaaagcatatgccgggacgtgcccgcttgtgcggtattcctgctgttacttttcaagttttatctgattggacacgcttaggacgattcccatttccatcaagaggaacagcaccgacgttcccccgtaactgataaagggaagggtgattcccgtgttaggaatggtattggtcacaaccgctatgttcaggataacctgaatggcaatgtgtcccatgacgcccaccaccagcagggccccgaacaaatcaggggcattattggctataatcatgaacctgtatatcatgaacagaaatatgaggataatggacacggccccaaacagccccagctcctcacatattatagcaaatatcatatcgttctgggactcgggcaaaaagcccagcttctgtatgctctctcccagcccctggcccaccagtccgccggaaccaatggcgtagagtccctggagaacctggaatcccttgtccgtagggtcggactccggattcagccatgcctcgattcgccggtactgataaggctggagcagtcccaccgttgtcaggaacttgcctatgggcccggcaaaggccagggtggtaagtcccagggccccgatggagaaaaagggccacttcaccttacatgacacgaacagcatgacaaacgcgattccgcagacaatgatgccggagcttaagttgttcatggccaccaatcccgctatgggaagggtcagggccacaacatatcccatatttttccatttattaattttcatgcccatggtggttatcaccgcggccagaagcacaatcagggctatcttgacgaactccgtgggctggaagctcaaaggccccactcccagccagcgcttcttgccgttgacctcgcggccaaccaggctcaccgcaatcataagtatgtatgacatgagataggcaaacacggagaaccgggcaaatatgtgataatctatcttggaaatgatgagcatggccaccagtcccactgccgcgattcccgcctgcctctgcataaaatatgcaccgtttccgttatatgccttgctcagctgcgctgaataggagctggcgctgtaaatcattaccagcccgaaagctgtcaggaaaatgatgcagaacaaaaggctgtaatcataaaaacgcttggccttcttctttttctttggcatctgctgctccatacgctccccgctcccggccggacgtctcatctggccggagggtccggctgccgtctgcacctttcccgccatacgcatttacctcctacaaagccatgacgcactccttaaagacgcgtccccgctcttcataatttttaaacataccccagctggcacaggcggggcttaacagcacataatctccgatgtccgcatatacggcgcatacctgcactgcctcctgcatatcttctgcgtacatgatttcagtaaaaccatgcttctttgcgcactccgcaatcttatccctggtctgtcctatgagcaccagatatctcaccttgccctcaaactcggatacccactcatcgtattcgctgtttttatcatagccgcccgcaatgagaagggtggggcccggcatggctctgagagcctggatggctgcatccggattagtacccttggaatcgttataatatctgactccggtgcgttcccttacgaactcgattctgtgctccaccggatggaacccctcaatgacccttgtaatatcagacatgggaactcccatctccagggcaatggctgctgccgccatggcgttctcataattatgccgacccagaagctgcatgtcatgaacattgaccacaacggtctgacggccgttctggcagtacacgatgttatccccgtccatgcagaaaccgtcctttaacatttccctgctggagaaccagataaccctgggcttaagctccggattctggccaaactccctgaggacaggatcgtcgtagttgagcaccaccgcatcctcctttgtctggttcagggtaacgcactccttgatgcggatatagttttccatggtaccgtggcggttcagatggtccggggttatgtttaaaatagcgctgacattgggcctgaaatccatgatggtctccagctggaagctggatacctctgcaacggtcacggaatcctcagtcatctccagaaccttggaggtatagggatccccaatatttcccaccacaaacgtctcctcatagcgggcctttaatatctcccctgtgagggctgtggtagtagtctttccattggttcccgtgatggcggccagcttccccaggccgcactggtaggccagctcaatctctcccaaaataggaatcttggcatcatccacaacggccacaaaaggactgtcaaggggtataccgggactgataatgcacagctccactcccagcaggtcggaacgcttgatttcccccagcaccacggtcacctttgcatccctgtcaaatttctctttgatatcttcttcctttaaggcggcattgccgtcataaagcaccacatctccgccccgttccagaaccagctttgcagcagcaataccgctgattcccgttccagccactaaaactctctgactttggttcatttgtcaactaacctcctcgttatgagcatttagagaccgtattttggtctcttacgtgcgatacattccgctgcacttagcgaggtcttttcgagcttagtgcagcggttcgttatgagcacttagagaccgtcctttggtctcttacgtgcgatactgatatctacagccccagataagccaccatgcagaggatggcggtcacgatggcgaatacagccaccacccttgtctccgaccatccgcacagctcaaaatggtggtggatgggcgccattttaaaaatacgcttgccgccggtgcgcttaaaataggttacctggataatgacggacagtacctcaactaaatagataagccctatgacaggaataaacaggggcatgcgcatcatataacaggaggctgccacaaaaccgcccagggccagggagcctgtatcccccatgaacaccttggccggatatacattgaacagcaaaaatcccagcaggcttcccaccactgctccggttatggggctgatgcccatgtcctcaccgatggccacaatggtaagaaaggtggcaaccagtatggtaacgcttgtacagagaccgtccaaaccatcggtaaaattcaccccgttatccgttcccagcataatgaagaacagcgcgggtacaaagaagattcccagggacaggaaactgcctccgtcaaaacctcccgtaaaaggaatcagcatatccgttcccacctccccgctgttaagcaggtaccaggcgaagatgcctgtgatgatgaactggcccactaacttctgcatgggcttcagcccctcggaacgcttcatcacaatcttgatataatcatccaaaaacccaataatgccaaatcctaccgtgacaaacagcacgggaatgattttaggatagctgggaatataaaagacagatgtaatgatgatgctgctgagtataatcaggccgcccatggtaggcgttccctgctttttcagatggctctccggtccgtcgtccctgacctgctgcccgaatttaagcttgtgcaggaaagggatgataatggggcaaagcaatgcgctgatggcaaatgcaatgataatagctagtatggtttcatgaatcataaaggcacctcaatctcatatgtatgtcttatttggtaattagtatacgtctttttccgggaataatcaactatggattggaaaggtgtacagcagtttcttcctgtactgcctcaattcccagataaggaagtatattcttaaataaatctccgaccaccggggcagctatggttccgccgtaataaatcccctccggctcatcaatggtaatgagggccataacctgcggattgtcagccggtgcaaagccgataaacgatgaaatatattttttaaggcttcgcggaagcttctccgacgtggctgtcttgccgccgatgcggtatccctctaactttgcctttttgccgcttccctccgataccacctgctccagcacgtaccgcatggtggcgctggtctcctccgacagaattcttcccccggaaggataatccagcttgtggaccgatgtaccgtcggcgctgacggtctccacgccaaaatgaggggtcacccggtttcctccgttgacaatggacgctgccgtggtgataagctgaaccggtgtaatctggaaggactggccaaaggaaaccgtggccagctccaccagtcccatgttctcttttttgtgcatgatggtggctgcctcgccgggcaggtcgatccccgtctttcccttcagtccgaactgggtaaaatacttgtaatagccatccacgcccaggcgctgccccacgtcaatgaacaccgggttgcaggaattcatggcgccctgcagaaaggtttcggccccgtgtccccccactttatggcaccttatcttccggtcctccaccaccctgaatccgggacaggaaaactggtctgtcagcttcaccacacctgactccaggccggctgccgctgtgatgattttgaaggtggaaccaggctcataggtatcattgatgcaggtattcctccacatctggtttaacagctcctgtttgcccgcccctgtggccccctggttggcggcagccatctcctggagactctggcttcgcaggttctggttcagggtgaaagggtcgttcagattaaattcaggaacattgaccatggccatcagctccccgttctggggattcatgacgatgatggataccttcttggcatttttcttctccagcacctggtaagccagctgctccgcatatttctgtatattcacatccaggctgatgtgaagatcattgcccggtatgggttcaatcctgtcctctgcggcattctctatctccacgccctttgcatcggacatggtgagtatctttccgttcattcctttcagatatttctcgtattttacttccaggccgatgatgccctggttgtctcccccggtaaatcccaggaccttggatgccaggctgtcgtagggataataccgtttgtagtcctcatccaccttgacccctgccagccggtaggaacgtatctggtcccccagctctttgtccacattggtcttgatgatttccctggaactgcgcttctccacccgttttctcaccagctcctcatccagatccagttcatcgcacagtacccgtatgacctgctcccggtcctttacctgattgtatatgacggaaatggtacaaactgtcctgttatcagcgatgacgaccccgttggcgtcaatgatacgccccctggccgccttaatggtacgctccctctggtgcaggtcctcggccatggcgctgtaatgctctgaacagaacagcatgagataaccaagccgccctgacaggctcaccatgacgatggctatgagcagtgccaggacggctatattctttctgtgtttcgttaaattagaatacatgagcagctccggtgtccatcattgttaataatatattggagcccgtcacattttatgaatctttctcctgattactcagatggcttggccgtctcccctgctgaggagggttctgttgcctgggtgctttccccggcaggacctgcctgagtgctgctttcattggattggcggggcggcgccttcaccggaagggacgaggggcctgtcccttctccgtttccgtccccagccacagtgggaactgcgtccggcacaccgctgcccgcgccttctccttcctctccgcccggcatgtattcatctgtctcatactgcttctctgtctcagccggagtctcctctgttccctctgcgccctctgtctcagataccggctcattaatgccctctgaggatggcaggctttcctggattgcctcattttcaggaaggtccttggtggggaatatattcagataaggaagtatttctgtcatgattttggagaaaacagcgcttgcataggagctgtgggcctgctgctctcccggcggataattgggcgtgtcaatgaccacgtacacaaatacctgcggatcctcaatgggcgcaaatccggcaaaggacaccagataattcttggcgcttcggggctgcttctcagccgtacccgtcttgccgcccacatcatagccaatgacctgggctgcctttcccgtacctgtctcaacggtctggaacatggcctccttcaggaaatcagaggtggactgggatacagtctcccgcaccagcacaggctcctttttctccaccacggacccctgctcattgagaatctgcttcaccacatggggttcatagtaggaacccccattcagaacagagcagaacgccgcggacagctgcaccatggtacagttgtagttctgtccaaaggcattggtggccaggtccgtaggcccgatgtcgtccgcgctgtaaaccagaccgctggtgtctgcctccccgggaaggtcaatccccgtcttgtcgccaaacccaaagatgccctgatatttggtaaatcgctctcttcctatcatggctccaatgcgcatcatggccacattgcaggactgcatcagtgattcctggaggttcagccacccgtggccgcccctgcgccaggccgtacatttgatgttataatctcccacatggaggtaaccggtacactcaaagctttcatttcctttaagcaccccttcctccagtccggtggccacggtaaaaatcttggaaggcgatcccggttcataggtatcgctgacgcagaaattcctccatatctggttccacgccacctgctgtccgtaggagatcacatcttccctggaaaaatgctccgtcacctggtcctcggtaatgactgcaccgtcattttcccgccggtacacagccgctgcctcctttttccccaggtcaaacagctcctgctccgtatagccggatacatccctgggattattcaggtcgaatttattgctggttcccatagccaggatttccccgttgttgggattcatgacaatggccgccgtcaccttgcttcccacattggtctgccactcgtcaatatatttctgtacaatgttctggatgttcacatcaatggttgaaaccaccgtattgccgttggaagccggtttcaccacgccctccaaattggaatcctggtccaggtatccatattcgcgtccgttgaccccgatcaggctgctgttgtaatactgctcaatgccgccggtgcccacgcttccgtcactgctggtaaagcctatgacattgcaggccagggaattgtagggataaatacgcttgtactcatcctcaaaccagatgcccttaacccgcttcttggcctctgcgtcattatcgctcttgcggtaggcttcatttgtctctttggccatctgttcaaatgccaccctctggtcataggtgagctggcgtcccttattatatctgagataggctgactccttccgctcctcaatcagggtccgaagctccccggcatcaaaaccaaaattggtcaccagggcctgaatggttggctccagataattttccggatccgacatgatctgtcccggatcaataatcaggttatacaccttctcgctggtagccagataggtgccgttcctgtccacaatatctcccctccggtatgggatgacacggctgtcatactcctgctggcgctgggagagcacgattttattgtactgctcgttgttgtcctttatgatccggtacaaaatcatgactaatgcaaataaagccagcgtaatcaccaggacggtgattgccagcttctcttgtatatacttgggataataatactttccccgttgattgttccgttgttcatttctgtattgttcctgatccctggggccgttcccgctgccgctgctgcctttccccatacggcccccggatttagtgttccgggatgtcttcatactgtcttacatactcactttctgtcttgtcatataacagcacctggtcctttttggcatacaccattcccaactccttggtggcaatctcatatatcttgttgaggtcgatgctggtattgatgctggtctccagagcgtcgttctccgccctgagctgttccagctctgcctccatctgctcaatatggtgcatcctggccgtgatggaggactgcacatggaggtagttgatacagaggtataaggtaaacacagacgcaatggtaagcatgatgacatatggaaggtccatatacatggcacgctcctgattgcggcggatccggtgattactccggaccgactggctgcctgatggtttccccggcctggtctcctgctttggagcagtctggggccttagctttggtgcggcagaaccctgtacataatcattgccgtacacgggtctggtatttctatgtgtattcctgcgtcctgacgacgcctgcgcccttgcagccataaccttatcctcccttctatctgaatccggcagcggacaccggcatgggccggtcttttctgctgcctgctgtctttcgtattttcataaccggaaaaaggtcttgtcctcttactaagactgtccccgctcaaagacgcgcagctttgcgcttttagaacggctgttttcctccagttcttcttctgacggcaatatgggttttctggataccaccttccccttgcttttccggccgcacacgcagacaggaaaatcatgaggacagatgcagggattctcatttaaccggaaacggctctttacaatcctgtcttccagtgaatggaaggtaatgatactgaggcggcctcccggattcagaaggtctatcatggtatcaatggactgttccaaaacctccagctcatggttgcattcaatgcggatagcctgaaaggtccgtttggccggatggcctcccgttgcccttaccctggccggaatggccccctttatgatctccgccagctccccggtggtctctatggggtgttcccctcttgcccttacaatgtgctttgctatattctttgcaaaattatcctccccgtaatcccggataatcctgtacagctccatctcgctgtaggtattaatgatatgggcggccgtgacatcgttcctctggtccattctcatgtcaagaggcgcgtcctcacggtaggtaaatcctctggaagccgtatccagctgataggaggatactcccaggtccagataaatcccgtccactccctcaatttccaactccttcagtacttccttaatattggcataattgcttctgacaatggtcaccttgtcctgaaacggcagaagccttttcccggccgcctcgatggcgtccgcatcctggtctatgccaatcagttttccgctgcccaaacgcttacacacctcataggcatgtccgccgccgcccagggtgccgtccacatacaagcctccaggcttgatattcagacttcccactgtctcatataaaagtacggacttatgtacaaatgttgattcctccattaaattcccaaaccttccatatgttctgcaatctcttccatatcatcaaaggtgtttgcatccagccatttatccttactccatatttcaatgcggctgcccacacctaccagtactgcatccttctcgattccggcaaactcacgaagcacggccggaaggagaatccttccctgcttgtctacttcacaggtggtagctcctgctaagaggaaacgtgaaaacttacgtccggccgcattggtcagaggcagtgtgcgaagcttttcttccagggcggcccattctgaattctcatacacaaaaaggcagttatcaaggcccttcgtaacaacgaattcatcgcctaactgctctctgaatttggaaggtacgataagccgtcccttcgcatcgactgtatgattgtactcacccatgaacataacttatcacctgccgtacaccggagcggtagtggactattgtgggagacatccgaaatcccccacttcatccacttaacaaccatcttctaccactttgcaccactttctaccacttgtatgtccatcatagtacagattttgggaaatggcaagaagtttttacggaaatcttataaaaaaattgcgaaaaaataaggcagctgcgggcttttccgcaactgcctctatatgtgggacgagtcccgcaacagacacaaaatattgattttttcagtctttaatgcccctggtgggggacaatcccatgatttctcccaccactttcctgccgtttacccaaaagtgggggcaggcagatgccgggaatgattttcaggcacactctaggcggattcctccactttgtccccctttttcgggtgacgatggcggtaaataatcactgccgccgacacgcccaccagcgcagccgataaaagctgggacacggcgaaccccgttcccggaatctttagctgatccgtcctcagtccttcaatccaaacccttcccagtccgtatccaaggaaatacacccacagcatctctccttcaaacttcttgcgcttcctgtaccacagcatgaacaccagcacgcccaggttccaaagtgattcatacaggaaggtgggatgcacctggatataggcaatgccattttccacaatctcattgtccacaagctgctgggatatcatggcaggattcaccaggcttttccggattcgcatggcaaacaggttgtccgtatacccgccaaaggcttcgcagttgaagaaattcccccacctgccgatcatctgtcctgtaatcagacccaggacaccgctgtcagccatggagaaaaaggacagctttcttttcttcgtaaatacgatgagagtcagggccgccgcaatgacacccccgtaaatagccagtccacctgccctgaggttaaatatctgcagcaaatcatccttataatttgcccagtcgaaaataacatagtaggccctggcccccataatggaaaatataatggcgtaaagcgcaaaatccaaataaatatccgggtcctgccctcttctcttagcgtctgaacacgcgatggccatgccggccagcatcccaagccctataatgataccgtaaaaggcaatcctgaatccaaacacagtgatgctgttaggcagatgctctatggtaatacccagattcacaaaactcaaatccgctcccgtaactgcttccataaagaaaatctccttcctaagtgatatactttcccattttaccccgaagcagtataaaaagcaagaaggtatttaccagcattaatcctactcagcccccagcgcagccatggtcacatagttatagggcttgttaaaatgagggaggaagaacagatcaaacagcttcagcttatctatggtcacctgttcctccactgccatggagaacatgtggatacccatggatacgtcataatccgagcacatctgggctcccagtatgattctggatttcctgtcatatacaatacgtatcttcaccttatggtttccgttctccataaactctgccttctgccagtcctcataatccgctgccgcagcgtcgtatcccatccgctttgccctggccaggctgattcccgtgctgagcatgtgaagtccccatatactgattccgttggatccctgaacgcccacggattccagaaccttgccgcacgcgttatgggccgcgatgattccggagcgcaccgcgttggtagccagggcaatgtaatccgcagcctgtatggcattgttataaaccgtagcgcagtcccccaccgcatacaccccgggcacgcttgtctcctgcctgcggtccaccagaaaggccccatttccaaaggtcctgagtctcccctgtccaagggatgtgttgggcctaaatccaatgccgaataccaccatatccgcctcataacatccctggtccgtcaccacacgttccacccgtcttttgccctccagtctcaccaccttctccccaaaagccagcttcaccccgtgctcctgcagattgtgcgccatcctgtcagaaaactccctgtcataatatccggacaggcatgtatccgccaggtcaatcaaaaccacctcccggccattcctcttaaacgcctcagccagctccaccccgatatatccggcgcccaccacagccaccttcttaacagaagtatccttaagcttctcaatcacatccctggcattctgatacagcttcacaaactgcacattatccagctccatcccctcaatctcagggcgcagcggaacagacccggtggccagaatcagtttatcatactcctgcacataactctttccgtcctttcccctggcatacacagccttgccgtcaaaatcaattctttcaacctctgtctccatatgaatgacagcgcccttttcctcaaaagcctccttactggaatagaacagcccctctggcccggaaatctgtccgccaatccaaagcgccataccgcaccccagaaagctgatatcagagttcctgtcaaaagccaccacccgatttcccggaaactggtccaaaatagtattcaaaaccgccgtccccccatgattcgccccgataacgacaattgtttctttcatattcaataacctcctgctatcctgaaatttaaaatcctgcctgattactaacatacccaaacaccatacggtcaatattacagaatacactcataactattattgccaaaaaagcctatattatcaatccccccgcatcccatcccccgccaaacccaaatgtgttatataaaatatattatataataagaaggaatcccacataggattattaaaaccccgcagccagccattatatctatccacattccacctcatcccctattggccgagcaaaaatctcaccttcaaagctctgctcatctccaaacaacccataagtccgccctcatccaaaaatgaggaattttctcctcatccttttttacatctccgccaaacgccctcgacgcttcacgcgagaaaattcctcacacccgcaattatcctcacatccatcggccatcactcctctccttatgggaggatgagacagcggacgagcaaaagagcagccggaaaatgagcgggcgggggcggggagattcggcgatttttaccgaggggtgctgtcacttaggcggaaccgggggcaaagcagggggcggctgagggcctacacggcccgaagccggtggcacatggaggagaaatcatccagatttctccggaatttgccgcggtccccctgctttgtccccggttccggcttagagacagccaccgagggaaccatgagccaaatctccccgcccccgcccgttcattttcccgatccccttccccgtccgcgtaccatccctcccatctcc

SEQ ID NO: 3193 - DNA, 4047 bp, Unknown
  gut microbiota DNA sequence
aatgtgtacaggaatatatattatataccagccctgatttctctgacagccgttggtattctgtttacattcatttatcagccggacctgggtatgctcaactcatttctgagagctataggacacggggatatggctcgttcatggctgggagattccaagattgccatatactgtatcatagccatgagccagtggcagtttaccggatatatcactcttctcatggtagtggccatacagaatgtgcccaatgattatatcgaggcagcatctattgatggcgcgggacctgtaaaacgtgcactccatatcatactgcctcttgcaaaggagcagcttctggtatgctcaatcatcacggtaatcggagcgtttaagttgtttaccgaggtatattccaccacaggaggagggccaggaaacagtacacaggtattgggggtgtttctttaccagaacgcattccttcacgatgacttgggaatggctgctgtaaccggcgtatttatattcatggtaaccatggtgctgtcgctgattcagatgaagatcaccaggtctggggaagtgtagaaaggagaggcatatgaagaaacgaacagcagtaaccatacttttgaatatattcttcatactgttagtgtttgtgattatactgccggcagcctggctgattatgaattcgctgaagaccaatgtggaactgtttaccgattctctggcgctgcctgcgaaagtacagtttgccaactatatatcagcatggaataaaggactttacaaatactttggaaattctgtcattgtaagttccatttcacttatatccattctgtttctaagctccctgctggcctatggcataaccagattcaacagcagattcggaaacctgatattcctgattacattaggaggcatggctctctcggagcaggtggcactggttcctctgtataagatacttcaggccacacacctgtataatacatattgggcggttatcctgccctatgtggcattcaggataccgtttaccgtattcctgatgcgtgcttattttatgtgtataccaaaggaactggaggaagcggcagttattgacggctacaacagctttcagatattcagaaagattatagtccctatcagcaagccgatttttgcatcctgcgccattgtgaacctgaatttcgtatggaacgagttcctgtttgccaatgtgttcctggagagtaagagtattatgaccattcctatcggtttgatgacatttaaaggcgatatgagatcggactatgtggtaatgctggcaggcatcaccattgcatcccttccaatgatcatactttatctgtgtatgcagaaacagtttgtccggggtcttacctctggtgcggtcaagggatagataattagaatgtcatatatcagcaggaggaacaggatggttcctcctgtttactgttacaggaaattacatgtatgatacagaccactaaatataaaagggaataaaaaacatggaatataaaactgcagattatcacgtccacagcacaatttcccccgatgccaagggtaccatggaggaaatgtgcaatgcagccatggctgcgggtatagaagagatcgcatttacagatcactatgagttttacgcaggcgggataaccgggaaatattttaaccggggatatcttatccgttattttgaagaactggataaatgcaggcagatgtatgaaggccggcttattatccgcagcgctatggaattcgggcagcttcacctggacccggagaaggcatccggcattataaagagctggccctttgactatctcattggttccgtgcacaagattgataacattgacttaagtcagatggagtttcggaaggatacggtgcagcagattgcggacgcttattacagtcacctgctgaagctggcacggacaggggattttgactgtatgggacatttggatctgtacaagcgtcattgcaggaaagcgggacttccggatgattatgataaatatgaggacaggatagttcaggtattgaccgcgctcattgagaggggaaagggaattgaggtcaacacatcagggctgaggcagggagcaggggaaaccatgcctggaatcagatgccttaagctgtacaaagagcttggaggcactgtgattacagttggttctgatgcgcatctcccggaagatgtgggaagcggtttcatagaagccctcggcctcgtaaaaaaagcgggctttgacagaatcgcccgctatgaaaaacgtatgtgtttgttccagcctctctaaaaacgcttctcaaagtggccggtgacgtctatattgttctggatggcaataaaagcattatggtcagcagtgaggaccagttgccttaatggttctatctcgtttttggaaatgacagtcatgtagacataggtggactggccggtatagccgccggaggcattccagattgtgacaccacggtgcaggttgttaagtattatattctggatgtctggatgccgggagatgattgtgacacaggctttgatgttctgataatgaattttatctgtggctacccctgcaatgatggcaaagagggcagagtatgcggctgtggccagattgtaccggaatgcgcagaacagataaatcagtacattaatcaaaatggatatcctgcctacgctgaacctgggaaaccgcttggtacagtagattccaactatatccacaccgccgcctgaaccgccgcaggtcagggtcagacccactccaaagccggatatggcacctcccacaaggaccgatgcaagtggatctgtgaacacaggaatctccggcgatgggataaacgcaatgaagagggactgcaggcatacacatacaattgtcttatagaaaaagctatggctgatgagtacataggataacaggaacagggggatattaagcatccagaaaatgattccggtccagtcgattcctccgggaagcgggattttgagaatgtcctgaaagaccagatgtatgatttgggcaatgcctgtgaaacctccgctgtaaagccccagaggccgcagaaacacacagaatgaaaatgcaaaaaggaatacccccgcggtggcaccggccatggataagagagtattccttccggataatttagacatagtcctacctccataaaaagggcttccggcaaagcatcagcagccggaagcccttttgaatgtgaaagataattagtattccagtttccacatgtatcttctctgggtcaagggatgattcctgaggattgccagctgctctgcataaacccgcagcactgcggtaatcagcatcgggttgaagtaatctttgaccgtggatggtattacggaccctaatccaaaatcctttgcatcaatcagggtggtcttggcctggaaacggttcaggaagtccagggctctggaatccaatgctctggtactgccgtcgttcatcagcagaaggaagggcacatccttatctacgatttcaaatggaccatggaaaaattcgccgtcatggaaggagcctgaattgatccactgcatttccatcagaaggcatatggagaaggaataggccaccatatgggtagctccggagctcataacgtaaataacaggagcatccttgtagttttctgcaaacttttttgcggaagggactacgaaggaaactgcgtcttctattaagtcaaagatcttagcaaaaccggtcatcatatcttggtaatgttcatacccttcatactgattgagaatttcagctgccagctgcagacagaaggtcattttttccagtttggccgcataattcttctcaaatccgtgaagtaccacatagtgtgcgctgttagccagcggtgaaccgggggtatgtgtgatggctattaccttagcgcccatattcatggcttttttggaggcttccactgtctcgggggtattgccgccaagggagcaggtaatgataa

SEQ ID NO: 3194 - DNA, 22902 bp, Unknown
  gut microbiota DNA sequence
ttaagttataccgataattgcaggattatccccctccccatcgtatttttagcagcaatttacagcaaattacttttcttcttacgccccgaaatatatatctatttagatatgtatttagatatacaaacagtccaaaaacctgatattgcttgaaacgcattcaaatcaatgatataatattcaaaatattacctatgaagggaggttatccccttgtccaatacctcttttaatcaaaaaggagtttctctttactatcaggtagagacttatatccggacaaaaatcgaatcaggtgagtggccttctggatttaagcttcccacagaaacagaattatgccagtattttggggtcagccgcactaccatacgccaggctgtaaataaaatggtagagggcggccttttaatgcgcaaacagggttcgggcacatacgtcacacagcccgcttattccaggaacagactttccacgcagcccagtgattctgtatgcaaatatatttatatgcccattcttcaggatgacatggagcattcctaccagaaccttctgctgacccacatcagccatatactgatgctgtgcgagcaaaagctgatatcccaggaagacggaaaaaatgccctggatttcattgtccccctgatggatatgcatccccagaccattggctttaatccgcttaacgaggattatttcttaaattttgaacaatatctgatttcccatctgggaatcgatctggccggaaaaatatataccggcagaagccgcaacgatatgactccaactgtaatgcgaatgagcatccgtgacagcatgcttgcggtttacgagcggcttctggcactgatacgccgcttgctggctcttgccgaagaaaatcagggacgtatcatcacagggtatacccactgcatgccggcccagcccataaccctggaccattatttcctggctatagcagaagccctggtgcgggatatggacaggctgctgtctgcttaccagaacctgaaccgttccccccttggagcctgtgccatggccggaacttcctttcccatcaaccgtgaatacaccgcccagcttctgggctttgacggcattataaccaacacgctggacgcggtggccaccagggattatcttttggagcttgccgctgatttttccaccctgggatccaccctgtcgcgctttgcccaggatttgtacctctggtccacagcagaatttaactatgtaagcttttccgatgcttattcctgctgcagcagcatcatgccccagaaaaaaaatcctctgtcaatcgaacacataaagagcaaatcctcccacctgaccagcacttatctggatattgcaatgtgcctgaagggaaccagctatggtcattgcagggacctttttgaatgtatgcccccattctgggatgcggtggaacaggtcaccggaatgctggaattgtccatcggaaccctgcaggacatcaccttccactacgaccggatggaatttacagccagcatgaatgactccatattgacggatatggcggattttctggtgcaaaaggaccgcataccgttccgcagcgcccacaatatcatcgcctcagccgtccgggcccagggtgataatcccagcagcaaaatcaccttaaagcagctcaacaaaagcagcaaacagcatctgggccatgacaccacgctgacagaatcagaatgggcatccttacagtcaccgcgcagctccgtggcaaacaaacgcagcgaaggttcccccgcccaaagctcctgccggaaaatgctgctgtccctgcgcatggccgccgaccgctgcaatgaacagtacaataaaatcatcaactccctgcagctggccgagcaattcagaaaggaacagattgatgtgctgaaaaatgggacgcattttgagcataattaatttctatcagtttttatgagtcctatatatgcgaacagcggactccgggattatgtcccgggtccgctgttttgttctgcgctctgttttactctgcactccgttttactctgcgctctgttttgcactgcactctgatgcatagtgcatcctgtcatatgtcagaacacttcctgcttcaaacgcctccactaaatatcccatccgatgtcccctgcccgcagcccatcagactcccaggcttttaaacatcttgtctctgtattccttgttcctcgccccgctccattccttttttctctccatcctcaaaaagcatctgtcccagtattgtcattcctatcttctcctttacatccattagctggttccgatccaaaaatttaactgccaatgcgtacagcacggactgcattctcttgacgtcctcttccttcatatccaatcccggattctccagtatatccatgccgcggcagatgcgttcgctgatttccatagtgcctgacatcaaaggcgtcaaaagaagcgaaaatacatcgcagcgtttcagccgttttttctttctgatttttcgctctgatttttggaatactttatctgcattcccgtccttcagacgtatgggctcaatgcggtatatgctgtttccgttcatccgttcccgcttcagcacctttacatttgatgtacacagtgctaatgttgcaaccggcacattgtaaatcatgcctatatatgcctcgtactcacgaaaacgccgcaaatcacgttccgttatgctgtcactctcaaattccagatgtattcatgatccacccatacatcctcctgttccggcaaaccatacaggaacctgcctccattatacttaatgtcaccctgccagacaaggacgccctgcctgatatcatacaatttatagttacttattttacttgattcgttggatttcacacccggtacagcgggaagatttttacatagatactacgtaatttgatttttgcagaattctgttatcagaacttagatttttattcttatacaattatggcggcggtccctcatatgcgttcacgccccggcgtctgttttttaatatagcatgtcagtgtgcctattgcaatctcaaaatagaaattcatccatacccccagccgcaaaaaacttcatttccaaacagcagcggccgggaaatgaatcacatggtttcccggccgcaggctgctccttacttaaactccaacctcaaagtccaatccttccctccggccattcatccgctaaaccagctggttatattttccccgcttcacatagtgggtatgcagcagatgatgggacaaatgtccattgggttcacccagatattcgctgtagagcttcatcagatcagggttctcatgggatttgcgcagcaccttgcgctcatcctcactgtagagagcgtttgaacgtttttcacggtaattctcttccgtgcatcttggctgtccgccgccgtttatgcagcctcccggacatcccattacctctatgaaatgatagggcgatgtgcctgccgccacctcatccataagcatggaagcgccttccaatccgctggttaccgccacattcacggttactccctttaaatgttcgtatgcaggaagcgtatcctcaattgtgatggaggctgtctttacctgttccagtcccactataggcgccacatgcagcttgtcaaagggaagttcctttcctgtcaccacttcgtataccgttcgcagggctgcttccataacgcctccggttacaccaaatatatcagctgctcctgttcccagtcccagaggcgcgtcaaactcaccctccggaagattcacaaaatcaatgcctgccgtctttatcatacgggccagctccctggtggtcagtacggcgtccacatcgcggttgccgtccacttccatttccgggcgctgtatttcatacttcttggctgtacagggcatgacagataccacaaacatgttttccggtgcggttgcggtgcgctctgcatagaaggatttcaccacggcgcccagcatggtatggggactcttgcaggtggacagatggtctaactcctccgggaactgatgctcaatatgcttgatccagccaggagaacagctggtaatcataggaagtaccgccttttccttttggggctcatcccccttcagagctgcgttcaggcggcctaaaagttcagttccctcctccaatatggtaaggtcggcggaaaacagggtgtcaaacacatcgtcaaacccgatttcgtgaagagccgttgccattttcccggtgacaggggttcccaccggcaggccgaactcttcacccagggcagccctcactgccggggccacctggaccaccactctcttttcagggtcagccagtgcccgccacaccggtgcaaggccgtctgtctccttcaaggctccggtggggcagaccacagtacactggccgcacatggcgcaggctgtggagttaagaggcagccccatggccgggcttaccaccgtatcaaatccgcggttctgggcctggatcgctcccaccttctgaatctgggtgcacacagtgacacacctccggcagagaacgcatttgctggtatcccttgtgatggacggggaaatatccaccatgggcttggtcatggctccctcaaaccggctctcgctgactcccagctcatagcccagctcctgaagctcacagttagtattcctgctgcagttgagacaatcctttggatggttggacagcagcagctcatacagtacctttctggcagccagcaccttgggagaatgggttcttatgaccattccctcccttaccttagccatgcaggaggcctgaaggttcttcattccctccacttccacaacacagatacggcaggagccgtactgatgcacattcttcatatggcacagactgggaatcctgattcccactgtctcagccgcttccataatggtggagccctctgaaacctccaccggttttccatttatcgttacatgtatcataatctacctcctatctcctgtcgcagtgcaggcacctgagagcctcgcccatggcatccagcttgtggaatccgcagttcacttccctgaaattgtccttgcgctcctccacagacagacacctggtcgggaaacgcttatgaggttcattgacttcaatatccgctatctcaggtatatcaaaccactcgcccatattcagctcgcccttgcctccaaggtactgatcaatcttcatggcagctttcttgccgtccgcaatggcgtgaatcacaacattggcgccccatgggcttacatcgcctcctgcaaacacgcctgactctcctgtctcagatgtaaacctgccgatatccagcttaccgttcttagccacctccacatgagtggtgcggtaaacctgatgatccacatcctgattgatggctgtaacgatgccgtcacactccaggaaaaagtcagaatccggaatatgggccgtgcgcctgcgcccgtcgcttccataatcagtctctttcctgcggaccagatgaatgcctgtcaccttaccttctgctcccagaaattccaccggtgacgccatggcgatcagcttcacgccttcttccctggcctcgatgatttcatcctttccggcaggcatctccttctcagacctgcggtaaattacagtcacttctgaggttcccagacgcaccgcggtcctggccacgtccatggccgtgctgccgccgccgattaccaccagcttgttgggcacggacatatccttcttaaggccgatgcgctttaagaatccaagcccgctttccacgcccttaaggtcctctcccggcacatcaagcagcctggatacctgggttccggaagcaatgtacactgcatccgactgtttcttcatatcctcaaaggtaatgtcagatcctatcctggtattcaggtgaatctgcacaccgctcctctcaatggcatgaatctccttctgcagcacggcctttggcagacggtactccggaatgccccagtacagaacgccccctgccacagattctgactcatacacatgtacctcatggcccatattcgccagatagtaagcgcatgtaaggcctgaaggacctgctccgataacggatatacgttttccggtagccggtctgggttcaaccagaggcacattgtactcatcccgcagcgcataatctccgatgaaacgcttcacgctgcagatagccagaggctcatccacctgggcgcgccggcaatggtcctcgcatggatgggtacagacacgtccgcacactgccgggaacgggttatcctgccgaatcaggcggtacgcgtcctctgttctgccggctgccagcagggacatatatccgggtataaatacattggcaggacatgcattgcggcagggtgaggtctgaagctcggcgcagacgcctgcgctgcaatgcttctcatagatgtgggcctcgtattcgctgcggaaatatttaagggtggacaggacaggattgggcgctgtctgtcccaggccgcacatggctgtctgctgaatggttccggccagctcctccagaagctccaggtcctcaggctgcccctttccctcggtgatgcgctccagtatttccagcattcttctggtgccgttgcggcagggaaggcatttaccgcaggattcatcgcagataaagtccatgaaataccgcgctgtatccaccatacaggtatcctcattcatgacaatgagtccgccggaacccatgattgcccccaggctggacagggattcataatccacaggcgtgttcagatgtgtcttggtcagacatccgccggagggaccgccggactgaatggccttgaattttttgcccccaatgattccgccgccaatcttgtatatgatatctcccagaatcgtacccatgggaacctcgataatacctgcattgacaatatctcccgccagggcaaatacctttgtgcccgcgctcttttccgtgccgaatcccctgtaccactgtgagccgttcagaataatgggcgctgcatttgccagggtttccacattgttaatgatggtgggactttcaaacaagcccttttcaaaggggaacggcggcttctgccttggctctcccctttttccctcgatggacgccagaagggaggtttcctcgccgcagacaaaggcgcctgcgccgatacggatttccaggtcaaaggaaaaaccgcttcccatcacattctctcccagaatgcccgttttcctggcctggtcaatggcattgcccagccgctccactgctatgggatactctgccctcacatatacataacccttggaggctcctatggcatatcctcctaacatcatgccctcgataatgctgtgcgggtcgccctccaggatgcttctgtccataaatgcgccgggatccccctcatccgcattgcagaccatgaatttgcgtccgtcctcagacacagccttcatacctgcttcccacttcactccggtagggaatccggcgccgccgcgccctctgaggccggcagccttcatctcttccaccacctgggccggcgtcatctccgacagtgctcttgccagggcgccgtatccgtccctggatatgtatgcctccagggaagcatactccatgtgtccgcagtttctcagcgccacacgtacctggcccttgaagaacggaatatcctccatcctcggcacatggactccctcgtcctcgtcaaaatatgtatattcctcgcacacctcatccttcagaagatgcctggccaccacgtcctctgccttttcaggattcatctttgtgtagaagattccctccggctcaaccaggatgacgggacccatggcgcatgtacccatacatccggtgaccatgaccttaacctcatcatccagcttatatgtactcactgactttataagcgcatcccttacttccccgcagttagaggatatgcaccctgctccgccgcacaccagcacctgacgccggtaggacttttgccgtctcagatattcttcttttatgcttaataaatcatcacggttttttactgcatccattactcctgcccctcctcttcatagtagcgttccagaatctgttccagtttgtcaggatttacctgtttgtaaacctggtcgtcaattgacatggccggagccagaccgcaggccccgatacatctggccacctcaaaggtaaaccttctgtccgccgtggtctcacctatttccacatccagcagttcctttaaccgctctacgattttcttcccgccccttacatagcaggccgtccccagacagacacgtatggtgtgttctcctctgggctgggtagaaaagaaagaataaaacgtcactacccccgatacctctgccagactgatatccagagcgtctgctatgaccttctggacctccagaggcagataaccatatattccctgcgccatatgaaggacctgtatcagacttccctctttccccctgtactctgccgccaactcgccaatccgctttaacagcgcttcttcactgtggtcacagcagcatgcatgtgtgttttcacccatcacttcattcctccttgttatgagcacttaccgcctgttatacggcgcttgtgtgcaatacatgccactggcacgaaaacggccgtcccttgaccgttttgcgcagtggctcacctctaaaagcgttgcgctgctggccgggcagacagctgcagtctgtctgtcggctccctcaccgcaggttccccccattgcgtccggaggattgtattgtgaaaaattatacaaagttaaggcgggagcaaccttaccggttactcccgccaaaaagaccctgtataacttttactgactttttaaaattatctcgtctgcggtatcgtaaatgaccgcgtccgcctttgattttcataccgcatccccctgtcttgatttcacgtaaaaattaatgtgcctaaaaatttttgtatattctaactttttttgtattttttccataatatcacaaggacattgtacttgtcaatatacaatctaatatttaacaatctcaaaaacagcccaacacttatttattctgactttatatatcagaaaatttattaatattatcctacaaattctgtcgattttcagaacctctattccttaattttccagcatatgttacaatagtacctatcaaatacaaaaaattttcatatgcagaaaggagtccttatgttcgatttagactttattctcacctcgctgggatttattgtcccggtcattctggtcatcatcatcattacccaggggtacgtcaaggcgccgcctgaccacgcctacatcatttccggcctgcgcaagcagccaagggtgctcataggacgggcaggcatcaaaattccgttttttgagcagctggataaactgtaccttggacagattacagtggatatcaagaccgatgaatacatcccaaccaacgatttcatcaatgttatggtggatgcggttgccaagatacgggtggctgacgacgacgaacggatgaagctggctatgaggaacttcctgaacaaagagccggcaaacattgccgccgacctgcaggactcccttcagggcaacatgcgtgagattatcggtacgcttacactgagggccattaacacggaccgtgattccttctctgaccaggttatgattaaggcttccaaggacatggagaagctgggtattgacatcctttcctgcaacatccagaacgtgacggatgaacacggactcatccaggatcttggtatggataacacctccaaaatccgcaaggacgcatccatcgcaaaggcagaggcagaacgtgatattgccattgcccaggcagctgcggacaatgccgccaatgacgcaagggtggctgccgagaccgagatagcccagaagaacaacgagctggccatcaagaaggccgaactgcagaaggcgtccgatacaaaaaaagcggaggctgacgctgcctacgagattcagaaacaggaacagcagaaaaccatccagaccgccacggtcaacgcccagattgccagggctgaacgcgaggccgaactgcgtaaacaggaagtactggtacagcagcaggcattggaagctgagatcaacaaaaaagcagatgcggaccggtatgccattgaacaggctgccgctgccggcctgaccaagcgccagcgcgaggccgaagcaaagaagtacgagcaggagcaggaggccctggccaaaaaagcccaggctgacgcggaacagtatgagcgtgaaaaagacgctgaggcgcagaaggccattgctgaggcacagaagtattccatggtccaggaggcagaaggtatcagggccaagggcgaggctgaggctgccgctatccgtgccaaggcactggctgaggcagaaggtatggagaaaaaagccgaggcttatcagaagtataataaggcggccatggctgagatgatgattcaggtgcttcctgacatcgccgggaagattgcagagcctctgtcacagattgacaagattacaattatcggaggcggcagtgattcggataatggcgtaggggccattgccggcaatgtgcctgtggtcatggcaaagctatttgaatccatgaaagaaaccacaggcgtggacctggcagaaatcatgaaggcggatacatatgacgccaaggtcaaccggaacgtgaacctgaccggcgcccctgatattatccttggaagcggacagaaggcccttaatcctaatccggattcggataatatccagccataaatcctttgtgcccatagcggatattttaaattagtatagcagaaacacctcatagaacaacctgtgatatggatacaggggatttctatgaggtgtttcttttttcttctattcttctctgtctttcttaccttcccgggcctccttagcgccccaaaccacgccttccatgtcaaatgtgcctgcggatatgtcaatgtcatggtctgcttccgctcccgcagactctcttacattccctttctgcacatctgctgccgtctttcccggcccatctgctgctccaggcatttccggcatattaggtatttccggcatattcggcatacatgacatatccggttctcctgctgctcccggcacagccgcagtttcccgttcttcccgcacaggctccctctcaggatccctcccaggctcctgcccggctccgcctggttcctctatcttccagcggatggatacgcggaacaaatcatcctccacttccagcttcatggtaccgccctggacctccacaaagcttctggcaatggcaagccccagtcctgagccctctgtgttgcgtgatgtatccccgcggacaaaccgttctgtcagctcctcaggagatacctccagctccctggctgaaatattgcgcatggttatcagtacatggccgccatcttccctgaccacctggatataggcccgtgtgcccggcattccgtactttgttatatttaccagcaggttttcaaatacacggtaggtcttctggctgtccagataaagaaggattttctcctcaggcagattgtagcggaactcgatcccgcttgcctcaatcttatcagacagctcaaaccgcacctgctttaaaaggctcacgatatccacgtcctcctggtgaaggctgactgtgccgctgctggctttgctgacctcaaacaggtcctctataagcgccttcagacgcatggatttctggtccagcacccggacataggactttctctcctctgctgtcacattctcctgctttaacagatttacgtaagtgatgatagccgtaagaggtgtctttaagtcatgggatacattggtaatcaattccgacttggtcctctcgcttttcacctcctgggccactgctttcttaaagccgtcctgaatccggctcagctgctccttgaacgggttaaagattcccagatcctcctgaatctccacatccaggtttccctctgctatctcattgatactttttaacagcgtattatatttctgctgcatctgcccccaatatttctgtaataggaaaaacagaaccagggagtaaattaccagggctccgattccccagaaccagagacaggagataatggtcagtatgacaaaatttgcaataatggccttgcctataatcttggtggaacggcgctcccaatcagtctcgttaaaaacattgagggcatttaatgtccagcgcttgatgaagcgcaggaaacgtcccagccatgtgcgctctttgaaatagcgccaggggcccagggaaaagatagccctgtaacaggtaattccccagtaaaacattccgtagctcaccatccagaacgccagattaatgaccactgccatcacatccgcggaccagggaagaaattccgctctcataagttcgctctttaagctgccgtccatggtagaagcaatcagcgccatgggtatggttccctcaccaataatacccagccaggccactccgatacagctcagcggctcaaatgaaagcctgcacagcgcgctcttaccaatctcaaaccgtttcacagccggcaaagccagggccagcacggtcagaagtcccagtacagatgcgcctattgcaaaatagccgttgctgaaacggtaatcccggatagtaagctgctgatccgcgctgttagacctgacatccgtatagccgaacatctgggatggactgcaccggaacaccactgtcatgtccttgggtccctggaattccacgccgctgtagcgatagttctcgtccagtcttacctccagcggatcgtaaaattcaaatctggtcaatgactccttgatgcgcgtaatatcatcatccctgtttccctttatatccagaaccttcagtatgccgtttgaattaaagtttatggtgaactgaatctggtcatccttcaggggttcctggaaaaatgtctttggatccgtcacattgctgcgtccataggtcccatcctgctcacagatcccataggacaagctggaataatactgcctgtagaggctttcccattcgcttcccgcgctgtcaatggtctgctgcatggactggtaatagtaaatgtcatagggatccccactgtcgtagaccatggtctgttccccatcttccccatactctatctgtaccgcggcttcgtcttccggctgctgctggcggatcttttcctccagccccggcaggaatgtctgggcataggtcagacgccgtcccgtatcctcctgcattttctgatgccagatttcataactgaaattcataacctgggttgccaggtttccaaaattactgctctcctcaacctggcggacggacctcctgttgtggtagctctccgcctttgttttcatataggggtataatcctatggttccggctgatgccaaaagcaatgccagaataataatcaatattcccagcctatggctgcttttcaattttgtatccaactccccacaccacctttacatatttgggctccctgggattcacttctatcttttccctcaggttacgtatgtgtaccatgaccgtatccgtattcactgccctctcgttccacacccgttcgtagatttcctctgcgggaaatacacgccccgggttctgtatcaataaaagaaggattttgaactcgataggggttaccttaaccgttttgtcatccacggtcacctctaccgtctcctcgttgacctccaaacctcccagcctgtgcaccttcggattctccgtctgctttgagttcaaacgatccagaaaccggtggtaacgccgcagctgtgagttgaccctggccataagttccattggagtaaagggctttgtgatgtaatcgtccgcccccatgttcaggcccagtatcttatccacttcctctgacttggctgacaggaaaataacgggaaagtcatatttttcacggagttttgctgtcatagtaataccgtccatacgcggcatcatcacatccacaatggccagatcaatctctctttcctccagcaccttaagcccttccactccgtctgctgcctggaatactgcatatccctggctctttaagaatatttccacgccttcccgtatctctttgtcatcctctaccagtaaaatccggtccccattcatgttcatttcctccttacgctatttatactaacaactaaaacaaaatttaaccttcataaaaaacaaaagaatatctaaagtcttattgtaacattcctaaacacattgttcaacgggggatagctgtctgatccggctgctttgccccaggcagcggtatataatgggctgaaaatcactgtcaatacaggtgttatctgttaaaaattgtgcgatattgttatttatttatttaaattgacaaagcaatttactcatgatattgttgtagtaaattttttattcagaattatcaatatttaacaaattattttcaattaaaagggaggaattacattgagtacatacgtgattacaggcggcactaccggcataggagctgccacccgcaagctgctcctgtcccagggccatgaagtgtttaacattgattttaagggaggggactgccttgcggatctgtccgctccgcaaggacgccagggcgctattgacgaggtattccgccgctatcccgacggcattgacgtactgatatgcaatgccggcgtaggacccacggctccgccccagatgatatttgcgctgaatttctttgccagcgtcaagattgccgaggcactacgtcccctgttaaagaaaaagaaaggcaattgtgtggtaacctcctccaactccatcaccaacatgacggtgcgcatggactgggtggatatgctgtccaacgttatggatgaagaacgcatcctggaatttgtaaaagacattccccgtacccaggccgcatcctgttacagctcctccaagcatgccctggcacggtgggtccgccgggtttcaccatcttgggcagtggacggactgcgcattaattccgttgctccgggcaacaccactacgcccatgacacagaacatgaccgatgcccagatggaatccgcactgctgattcccattcctacccgctatggacgcaaggaattccttgacgcggaagagattgccaacggcatcaccttcctggcgtcacccatggccagcggcatcaacggggtcatactgttcgtggacggaggcatcgacgcgctgctccggtccgaacgtttctaaatgaaaatggaggatatggatatgacaattctggaaagctatattgactgtatgcaaagaggcgacgaagcggccctggcggatttgttcaacgaatacggagtgcttcatgactcgtctctcattaaggcaggtatggacaccctccacctggaaggcagaatggcagtggaaatgatgtttcaccacaagttcggctttaacggaggtccctttcccatacacagcgtaaaatatctggacggcaatacggtatggtatttcatcacctacaacgagcatgtggttcctgtaaccgccttcctgtccggggtggatgaggacggcaaaatcctgcggcttaatatctatccgctataaaaaaaggaccggagctggaggaaatcgtttatatcccagctccggtttgcgttctattcaaagatgaccagtttctccagtgttttttccacatctatcagggaatacaggctgccattccacataaaatatgctttttcaacccataaacctgactcctgctgttccggccccttgatttgttcatccacgccaatctgagtcagatatggctcctgatacagaaggatgcccagaaaatatttctgatgacggaggaccagtaccatctgcctggcttctgcctcttctccgccggacgcagagccttcctgacaaaccaccggcacaatgctccccttatagttgcagacgcctgcaaaatgtcccggaagacatggcatcagggatatcatcatatccttgcagatttcctccgcatagggaaactcaacagcgtaattcctgtgctttcccggtaaacagagcaatgtctttaacgcctcatccgccataccttccctccttctcatatctgcttatgataatttccgtatccagcgctgcgcagatacggccgctgcccatgatgctgcagccgcagatgcctgtcctggaccgaaatcctgttcccagaagagcaggaagattcttcaccacaatgcgcttctgttcatagatggaatctatgaaaaagcagccttccttctccgcacccttcacatacaccagaatggcccgctccggaatctcccctcccagggaatagaacctgcggagattaataagaggcatcatcctgtcttcatacaggatgtaatcccgtccgttaatttcacgaatctgtccccggaaggactcatactctagaaaatgatatacatgccgggccggtatggagaagcggtactggcccacgcggaaacgcacgcactcgatagatgccagattcaagggaactgatatggaaaaggcgcttccctgtccaatagtactgcggatggaaagatttccccccacgtcttccataatgttctttaccacatccagacccacgcccctgccggaatattcagtaactttttcattggtggaaaagccgggatataggataaactccctgattttctgggggtcatactcctcgtccgcactggcaaacagccccttttgcctggcccgttccctgacccgctcctcgtcaatgccttttccatcgtcgctaatggtcattctaagttccccggccacattatcagccgaaaaggtaatctttcctctcctgtccttaccggcagccagccgttcctccggggattcgattccatggtccaccgcattgcgcagaatatgcagcagtgcttctgatacataatccaccacactcttatccgcttccacgtccgaacatctgaccaccaggtcagcctcctttttctggtcacggcaaatatccctcagtgccctcttaagctttggcacaattctggacacaggcacaaggcgcatctccatcacggaccgctcaatctgtcccaccaaaaggctgatctgatggcccagtccgctctctaaatcctccatcccattccgtttaagttcattttccagcacctgcatctgcagcagaagctctgaagccaggttttgcagatagtccagacgctctgtccgaacctccataaattcgccttccctggaatctgtattttcccgctcaggcgccgccttctgggcagccgcagccgtatcctgaggctggctgtcagccaataccctgcactgtgccacaaaaagccccttcctcagagtctccagcaccttctccttatcgccgctctcaaaacggatgaacacaccatggccttcaatgtactgcgcgctttcaccctgtttctccaggttttccggataagtctccaccagggtacagagaccggtaatggatcgcaccagcatgaaagcacgtatattctccatgcggcagccttcctccagcgtcacattgactacggttccgcttttggagacaaatagttcaggtatgacaggcagttcctcttttccctcttcctccccctgcgtcttcccgcccttcccgctgtccttctcctcttccctgctgacatgccccagaaagtcatccgtcatctgctcaagcacagacgtatccccgggcgcataatcctccctgttcatctgttccagttcctgggcaataaaatcagaggcagcaaacaaaaggtcaaaaaggtccggttccggatgctccagcttgtccatattttccctgtagtaagaaaacaaatcttccagcttatgggccagggaagaaagaccgttaatgtccatcatagcggaggagctcttgatggtatgcatgaccctgaaaatactgtgaatactgctttcgttaaatctgcccgctctctcagcctctaaaagtatctctgacagctggccgtttaactgcctggtctccaacaggtatacttccagcatctccagggcatctgactcaaaatatcccataatacactccgtccattactgctccttataccacacgctctggttcttgccatgccgtttgccataatacagtgccttgtccgcacagccaattccttcctccagcccttcctgctcatggaagatgtgaagtcccagagtcatggtacagaaaaagcccttatcgccgtaaggtatcacaaattgttccacctgccggcgcaccttctcactgagttcatatgcctcgtcctttgtcacattaaaaagaattaaaagaaactcctcgccgccccaccggaccactctgtgtctgcggcagtttgattccaggatattggcaatgcataccagcgccatatctcccgcgtcatggccgtatgtatcgttcacctgcttgaagtcgtcgatatccgccatgataaatacggtttttacctcatcctgaccgcaggaacgcatatcctccatcagatctcccaccacataccgccggttatacagccccgtaagcccgtccctgtaggccatatagttaagcttctccatattattgcgaagctccctgttctggcggtccaggtcgtccctctgctttttctgtatcagatgcgcacggattctggactgaagctcctttttcacaaaaggcttcttgatataatcacatgcccccatagaaaagccttttaccacatcctcgtcgctggacctggatgtaagaaaaataatgacggcatttttatggtctaagtcctgtaatatcttatacagttcatatccgtcggcatccggcaggaccacatccaaaaggatcaaatccggctggcactgtctcagctgctcctgagcctccagtccgctgtgagcctcacagattatgatactctcctccttcagcgctgtcttgatttgttcacaaatcaaaagactgtcatccacaattagtattgtctgtttttcatccatggacattatttcccctcccggccttacaatacgacggctgaatgcctgaccgtattcacttccagccttccgttttctgcgtaaaatagtatggtcctgccgtaattctgacctgtatgctgggctaccagacgaatcccctcctgagcaaggcattcccttacggccactacattctgctgtcctatatccaacattccggacggcgcaccaaacattctggcgcccccggcaatctttgcaatcagacctgcgggccgcgctccctgctctctcatctgatttatcagctcatgtacgccctcatcggcaaacttgtaggcgttatcccaatggattgaatacttcctttccggaagtataatatgggccatgcccgctatgcgctccctgcggtcgtagagacaaatccccacacaggagcctagggcataggatataagcacctgattttccctggcaacctttccttccgcgattcccacaatgattttatccatagcgctgctccctgagccgtgaaagcatagttcccaaatcttcctgctccggaaggaaaagaatacgtcccttaaagatttccccggacatatggaatatattttctatgagaagtatgtcatcgcttacaattacccacttggacatgggataggtgagaattgccccgcccatatcaatgcacagctccggcaccgacacatccatatccatgtccatcagctgggacagggcccgtatgtaggaaccgcacatgatgttccccagctcgctgatcaaagaacactccatatcatccagagacgtaaggttccgttcctcctcccccaaaatggtatttattacggtcttggtaaaggcttcgctcagcataaacaggaaaatcccctttagctgacccgtaacttcaatcagaatgcctgtctgcaattcctccggctgttccaggagttcatgcatcttatagtactttaccacttttagggaaggcatatccaactcaatgggctgttccatcatctgtgacagtgaagtcactgcgtttcccgtccccacatttcctatttcttttaatatatccctggatatctcatccaactgtacataaccatccattccctgtatctcccgtgattaaaattcaaacctttccaccagctccttcaacaactgggcctgggcagacagctcctcgctagctgccgcgctctcctcggatgtggctgaatttccttgaacaatctcagaaatcagttccacgctctttcttatctgtgtaatggcatccgcctgctgtacagatgtctctgagatcttatccatcttatggctcacctgtctggcgccttccacggaagtcttcagggtttgtgctgttaaattcactgcatccatgccgtcgcttaccgcatcggaattcttttcaactaattcagctgtcagcttggatgcacctgcggtcttggtggccagccgccttacctcctctgccacaacagagaatcccctgcctgcatctcctgccctggccgcttcaacagcagcattaagcgccagtatattggtctggaaagcaatgtcctcaatctgtctgactatgccggtaatctttcctgaattgttcttgacctcatgtatggacttcatcagagtttccatctgcccatcacattcctccagcttctgtcccaccagagccgcctgcctgctggaatccacggcgctgtcagcattatcctttacgctctgcgcaatctcgttgatgctgaccgccagctcctctatggaacccgcctgttcagatgctccctgggccagagcctgagaactgtttgatacctgctccgctcccagtgacacctgctccgcactgctgttaatctgttgaagtgaattgcgcagcagacggctgatttccttaagcccattgcccaatgccacgaaatcccctttgaattccacttcagagcggtaattcagccggccatttccaagggcggtcagtccgctttgtatctcagacacatagctgttcagaacctttgcagtacggcggatgtcatctgccagctgacccagctcatctttggacctgtacccaagggcaatattcaaacggccgttggatatggtatttgaagcctctttcacctcattgatggggcgcacgatatttctggtgaccatggaacatataaggatggtggctgctatacataccgccgacagtataaccagcatgattatgacccgatggttgctgtggtgctctgtttctatgcttgcagctgtttcttcagctgacaggtccgccacttccgagagcactatccttacatcattggaacggggcagatactcgtctgcatataaggacagcaccctctcatcctcgcccgcttccagaagggtcattatcctggcccttgtctctgccagtatctgaaacttttcgttcagctcctccaccttttccggcgctgtaatatatccggtggacagctcggacaatgcagcctgttcatcccggatcagctccctggtattctgcaggtattcatcctcgtccaccagcccctccgtggcagccaaaatagcgatatttctcccaactgcccgcagactggcagtcatccgcagggatgactgcacattggcaaactggtcagcgtaaatggcctccatacgcgacgatatcgtttccacgttgacaatggccactgtcactgtcactacatacaaaaggataatggaaaaaaatgcaatgaccatcttccttcctgtcttatagttcctgaaccgctctctcatcctttgtttccccgcttttctactgttccaggcagcgattgactatcctggagaactcatccgccttaaatggttttacgataaaatcagcagcccctatggtcagggctttctgaatcatcatctcctgcccaacggcagagcacataatgaccctgatattggggaccaggctcagcatctcctccagcacctccaggccggaacgtcccggcatggtgatatccagaagcaccagatccgggctgacttcccgaaacagctccatggccttttccccatcctgggcctcccacacctgggtatatccgtcctccttaagtatcttgcgaatgatgctcctcatgaacatggcatcgtctactaccagaatcttcttatccatatagtccccctctatcctcattctctttgacaggctttttatatacagccggaaaaactgcttccagcctggtctcctccctggacaaaagctctgcatggcccaccagaaggtaaccgcccggactcaggcagcgttccagctgctttataagcttctccctggatatccggtcaaaataaatcataacattccggcataatatcaaatcgaatttctccggcccaggaggcatctccatcagattatgccttctgaaacgtatattgtattttaatttctcatccacccggaatgtatggttgtcctccaccgtacagtactttctcttccaaagctccggaagatcctccatttccttcagcggatatattcccttttctgcctttctcaatacttctgcggatatgtctgtggcaagaatgcggacagcc

SEQ ID NO: 3195 - DNA, 10821 bp, Unknown
  gut microbiota DNA sequence
tatatatttaaggaggaaattagttatggatatgacattgcgttggttcggggagggtgtggattctgtatctctggagcaaatcaggcagataccgggcgtgaaaggcgtgattaccaccctgtatgacattccggccggggaggtctggcctatggagcgtatccttcagatgaaggaacaggtggaagccagcggattaaaggtcctgggaattgagagtgtgaatatacacgatgctattaaggtgggaactcctgacagggagcagtatattgccaactacataacgactctggagcgtctgggtcaggccggaattacagtggtgtgctataatttcatgccggtctttgactggacacgttccgatctggctaaggagcgtccggacggttccacggtgctggcttacaaccagaaggagattgataagattaaccctgaaaatatgttccagtccatgggagaaaagtccaacgggtttgagcttcccggctgggagcctgagcgtatggcgcgcataaaagagctgtttgacatgtataaggatgtggatgaggaccgcctctttgacaacctggtgtatttccttaaggcaatccagcccgtatgcgaaacgtatgatattaagatggccatacatccggatgacccggcctggcccgtattcgggttggcccggattatcaccggcaaagagcggcttctcaaactgatgaaagccgtggactcgccctttaacggcgttaccctgtgcaccggttccctgggaagcaatccggaaaatgacatcccggatattatccggtccttaaaaggaaggattccctttgcacatgtgcgcaatctgcagtataatgctcctggagatttccaggaagctgcccatctctcagcagacggcagcatggatatgtatgagataatgaaagcgctgtacgacattggctttgacggaatcatgcgccctgaccacggaagggctgtctggggagaggtgtccatgccgggatacggtctttatgacagagccatgggggcatgctacttaaatggtctgtgggaggctatctgtaagcagaaccgataggcgcatacagaaggaaaggatgggtgccatgagattaacctttgatgaaattaagagtgagattaagagggtgctggttaaatacgggatgtctgaggaaaaggcggagacctgcgcccgtattcacacggagactacctacgacggggtatattctcacggcaccaaccgggtggccaggtttgtaaattacattcagaaaggctgggtggacgtaaatgctgagccttccctggagcgggagtttggcgcccttcgggtttataatggaaacatggggcccggcgtcctgaacgccctgtactgcgcggaccgggccatggagctggcggatcagtacggcatcggcatggtgggaatcaggaataccacccactggatgcggggcggcacctacgggctgtacgctgcaagaaaggggtatgcggcaattatgtggaccaatacagagtcctgtatgccgccatggggaggcagggaatgccgtctgggcaacaacccctttgtcatggctgtgccgtctgcggacggaggagaacctctccagctggacatggccatgtcccagtattcctacggaaagctgcaggttacccggctggccggggagaaactgccctatcccggcggatttgatgatgagggcaatctgacggacgatccgggcgccatcgagcagtcccgccgtgtgctgcctgtgggttattggaagggatcggccttttcgtttatgctggatatcctggggtccgtgctcacggacggtataggggcagccggcatggaccagaagggatacggcagctgcggaggctgttcccaggtcatgattgtggtggatcccggcaggaccactacggatgcccatatgaaagaaatcgtggatacagctgtcctgtatgtaaagagctcggccccgtcggaggaaggcggcagcgtcagggcgccgggccagggaagcgcccggttccatgaggagcatgacaggctggggatttacgtggatgatgatgtctggaaggagatacagtccctgtaggccctgggaactggtattaggaggttttacccatgaagatagaggaaaagagacatggagagactgccagacagtatgcgtaccggaccttgcgggagaacatcatatctctggatttggaaccgggagcgccctttaacgatgtggaaatgtcgcagatgattggcattagccgcacacccgtgcgggaggcagtcatacagctcagcgaggaatccagaatcattgagatattcccccagagagggatgcgcattgcgttgattgatgtggatctggtggaggaggcgcgctttctgcgcctggtcctggaaaaggcggctgttgagctggtctgcggacaggcggatgaagaggacctgcagtggctggatgagaatatcaggctccaggagttttatctggagggaggttcatcccggaagcttttggagctggacaatgagatgcaccggaagctgttttccatctgccgcaaggagcttacctatgagatgagccagaggctggcgattcactatgacaggatccgcagcctgtccgtggcagcggttaaggaccataagataattgaggaccataaaaaactgctggaggccatacgcagccgcgataaaaagctggccgcagagacaatggatctccatctgaacaggtggatgttgaacgagcagatgttcagagaccagtacccggcatattttaagtaactgttccgggctttcagggaatctaattccaatcagcatgaaatcgtttaaggcaaaataatacccctgggtcgatacggcctcaggggtgttttcaatcgttcaatatgtttagctcctaaatcctggcaagattctgaagggcgttatcctgaatgatgacctcgtagtgctccttaaaatatgcctcgctggcagattcccctgacagcttggtggcatactctgccaatatgttgcacacgcgggagaaatccaggtccccgcagtccaggcgttttacaatgagataatactgtctggttccgggcttcttatacagcgtgttaacgccgtcatagattccggatacggcccgggaagcctcgcttatgcggtccaggctattgaagcggaaaatgcggctgctggctacggagcctgtattcttcttggcaggagcttcagaggcaccgtccgtaccgctctcatccccaacctgttccacggaacctggctccaggtagttcagggaatccggagcaccctccaggaactcgctggccagctgcgacacaagggaattctggttgtcgtccgtgaaaggtgagaacttggcaaaacgggtatccagttcttccggatcttcgattttagtgatgaccagcatgatgctctcgctggacagcggaatcgcctcaaccatcagaggaatgtcctccgcctcaaagcccacttcattggatgctttctgaatcatctcccggaacagcttcctggctttttctgttccataagccagctctaccaggtttatgttgcgcgcacttaaatcaaagctggtcaatgtacagcgaatctggttttcattgatacgttctatcttcattaggatcacttcctgttctgtgtcaaatgtggtgacatctgcttagggccaggacatttttggaaacttcaggccgaaagtagacttctacactttaaatatactacattacaggtggaaatatcaatcatttcataaaaatttaaaaaatatcgtgccgcaggatgttttcaggttgtataaatagcatatgaaaagccatggaagatataacgaccatagacaggtgacaaagaaaagggtaaaattgggatatgagatgatattgtaacgaaggaggggtgaataaggaataccattttatttggcaaataccgtctgctgcacaaattgggaacaggccgggcaggaaccgtatggctggcagcgcacattggcctggaggaatacagggctataaagcgcatttctaagagggatgccgactatgacactttccgaagggaagcattggtgctaaaagaactgcgccatcctgggattcccatgatctatgatttagaagaagattctgaatttttttatttaatcgaggaatatcttgaaggatattctctatatgccctgattgcgaatcaggggcctattcaagaggcagaggcagtccgttacgggatgcaggtctgcgggcttgtggcttacatgcattctgcgtgtgaattacccatattacatttagatttacaaccaaataacctgattatctgcaacggcaccgtaaagctgattgattttgatcatgccgcaggctgccggtgggcaaacattgccccaaagcgattcggtacagtgggctgcgcggctcctgaacagtatgcttctgaccgtatgttggatcaaaggaccgacatttatgccattggtgcagtcctccgttttatgacagccggaaccctgagagaggaggccggacagtctgccgccctgtcggaggtctttgagcggattatcagaaaatgcatggactccaatatggagaaacggtacgcttccgccggtgaggtggaggatgcgcttcaggcgctgtgtaccaggaagctgacagaagaaaaggaacaaaagacaataccatctcatattttgcttgtgaccggaatgaaggctgggacgggcactacacatttggcctttgggctggtatgttttctgaacaaaaacggataccgggcgctgtatgaggaacataacgcctcccgggcagtggacaccatggcccgcagggcaggtatgcgtccggaccgttttggaatctataccatgaacggctgctgcttaaagccgtggtatgggcctgccgtaaagctggatgaggggacaggatttgatatcatagtaaaagactatgggacagactggcagcaggcggagctggaattaaaggcagggaaggcagatttattagggacaggcagcgccagcgcctgggacggccggtacatcaggcagtacatatcctggatgaatcaggcatgggcgggccggtgtgatgggaaccgtgtgcttgtattccgggggacacggaccatatgccaaaaggaacttaaggccatgacaagctcagacaaggccttaaagggaataaagctgtttgtttcgccggagtatgaaaatcctttcagacagaaaagagaagaggccttttttcagtcgctgtggtctgccatagccgtcagcggcaggagatggaaccgaaaaagaggcttattaaaatcatggggttttctaagagaaatcattttaaacacagccggcagcctgcgaaagggtgcagggttgtcggaatcacaggaacaggacggggaacaggggtgactcatctcagcgtcctggcggccaattatatggccagtgccctgcagcgcaggactgcggtaattgagtggaacgaccatggcgcgtggaaaaccatgaaggatatatgccaggccggttccgtaaagcaggcggattctgcggattacagatacaaaatcttcggggttacatattatatgcagggggaccccagcatactggcgtcctgtctgggtggaatatatgacgaaatcataattgattttggagaattgagaccatccatcagggcggagtggctcaggtgtgaagtgaagattgtcatggcggcactgagcgaatggaagctggaggcatttttggagcttttatcagaggaggaaggacgcagagcagggtggatatatacggctgcctttggcagcgaggacaccagaaaacagatagagaggcagtttgggatttctctggtcagggttcctctttcagtagatgctttttcagtggattataaaaccatgcagtggtttgagaggattttgtgaagaaaaaagagacagaagggaacggcgcacaaaagtatgtcacggaaacaactccttggtgctgccgtccggctgtcccgcggtaataggggagggcttatcggtatgataagaaatgtcgagtatggagaccggaagaaacaccagagaacctatctggacggattgaagagatacaagaacaaaggggtccggattaccattgacggagtcgagtgcccggaaaaggaatgggaaaagatattcgagatgggagaagacggaggcttttatatgggagactatgtcggcgccgaacagggctgtctgaaggaaatcagatttgacaaagtgtatctcagcgaccctcccaaagagaaaaaagataaggattcataaacaggcaataaaatcagataacaaaagcccggattatgccgccgccatgagtaccgtctcagcctgtgcagccaaagcaaggcggcgcataccgggcttttgtgcctgtttcctccataatgactgtaaattgtaagcaaataattggtacatacactctgttttgtggtagaataaaaacaatcattaggaaactggaggacaggatgagcagaagaagacaaggtcacggctgcggaatcacggtgctggttctgctgttcatatttatcctggcaggcagtggtctgggagtgttttttgccaagaaatacatgcccagcaatgagctggcggataagagcagggtatttggtattaagggcggccaggtggcccttattttggataaccaggtgcaggaggagaagggaatctacgaggatggccaggtatacctgcctgtggactgggtaaatgaacatctgaacgagcgcttttactgggatgagggcgaaaaactgcttgtgtatgcactgcctgaatccattgtgtatgcggacgaaagtacccagggcgagaagggacctctctttaaggtcacacaggatggaatgtacctgtctcttggagttgtggtaaattatacggatatccgcacgcaggcctttgccacaagccagattaagcgggtgtttattgacacctcctggcagccctatgacacggcagtgctgaaaaagacaggccaggtcagagtgaagggcggtgtgaagagccagattatcacagaggcagcggcaggagagactgtggatgtgctggagacaatggacaagtggtccagggtcaggaccgcggacggttacatcggatatgtggagaaccggaagctggaggcaggagagcagattgcgcctgtcagcacctttgaggcgcctgtatataccagcatttccatggacggaaaagtaaggctgggatttcatcaggtcacacggcaggagggaaataatactcttgaggactatgcgtccaatgccagggggatgaatgtgatagtgcccacctggtttaatgtggtgtccagcgatggaacctacacatcattagccagtaaggattacgtggataaggcccatgacatgggactgaaggtgtgggccatggtggagaatgtgagcacccaggaaagtatcaagaaccttaatacaaagactttgatgtcctccaccagtaccaggaaaaagctcattgaaaaactgatgaatgaggcggatacctatggctttgacggattcaacctggattttgagagcctgaaggcggaggcaggaccacattatgtacagttcataagggaaatgtcggttgcctgccgcaataagggacttgtgctgtccgtggataactatgtaccgtcctcctatactgcgttttataacaggaaggagcagggaattgtggctgactacgtgattgttatgggatatgacgaacactatgcgggaggagaagccggctccgtatcctctattccctatgtgagggagggcattgagaataccctgaaagaggttcccaaggaaaaggtcatcaatgcggtccccttctataccagagtgtggactgtaaatgagggaaagacgtcttccaaggcatatggcatatcagatgccaggcagtgggtggaggaaaaccaggtggagcttacctgggataagctgctggggcagtattacggcgagactgtgagcggaagcggacagcagtatatatggatggaagaggaggattccatgaagcttaagattgacctgattaaggagtttgacctggcaggagttgcctgctggaagctgggatttgagccagcggatatatgggatattgtgtcaggggttaaatagacaatatgggtgacgccggaggaaggaaatgagacgaagaaaaagggtaacgggaatcatgacagcaatcttaatggctggagtcatggcagggtgcagcgtacaggctggaaagcaggtggagcccaccactggaaaacagcagacaaaggaaacggttcaggagacagttcaggaaacagagctgcaaaagcccacccatcctgcgccttcgcagatacagccttttcctgatgtagaaaaggagacaaaggcagagcctctgattggaggaaaacgcattatccttatgacagatatacattatctggcagaatccctgacggaccggggaaatatgtttcagtctatggtagagcacggcgatggaaaactgaccaattatgtatgggagatcacagacgccgcactggaggaaattaagctgctgagtccggatgccctgattatcagcggagacttaagtcttcagggggaaaagaagagccatgaagaactggcgaaaaagctggatgaggtggagaaagccggtatcacggttttggttataccgggcaaccatgatattaacaacccaagcgcctccgtgtattccgggggagaccggtacccggcggaacctaccgcaccggaggattttgagcgcatatataaggaattcggatactcggaggccagcagcagggatgccaattccctcagttacacctatgacctgggaccgtctatgcgcctgctcatgctggatacctgccagtatgaaccccgcaacaaggtagggggaatgataaagacagagacctatgagtggataaaggaacagcttaagcaggcggcccgtgacagcgtgattcttcttccggttgcccatcacaacctgctggaggagagcaaggtatatgcggatgattgtaccatcgagcacagtgaggagcttattcagatgctggaaggggagaatatcccgctgtttctcagcggacacctgcatgtgcagcacttcatgagaaataatgacatcggtatctatgaggtggtcaccagctccctgtccacgcctccctgccagtacggcgtgctggattacatggaagatgagacattttattactattcacgcaaggtggatatggagaaatgggccaggaaaaacaagagcacggatgagaacctgctgaacttcgacacatacagtccgcctgttttaaagaggatattctataatcaggcctatgacgccatgaagaactctgcggaggaggagacgggcagcgtatttgtgaagctgacagaatcagagaaacagcagatggcaaaggtatacggcgacatcaatgccgcgtgttacgctggcagggcatatgaggtggtgaaggaggcagtaaagcagcccggatacgccatgtggaaggagtactgctatcccgccatcctgtatgaatacctggaatacatcatagaagatgcggtacgggattataacgttctgagcatggagtaaaaacaggttcattttcatcaggcgggtgaatatactggaataaaggttatcagggagcgcccattgatgaagcattcagcatggcagacagtgatggggattctgctgctttgtatcgtggcattgatatcatggcaggcaggaacattggtggctgtccataatcaggcagcggaggcagacaaggcaaggccggtggtggtcatagacgccggacacggaggcagcgatccgggtaaggtagggataaatggtcagctggaaaaggatattaatctgaagataacagagcagctgaaagcatatcttgaggcctccgatgtagaggtgatccttaccagggattcggaccaggggctttacagctccggagacagtcataaaaagatggcagatatgagaaaacggtgcgaaatcataaatgaggcagtgccggatttggtggtcagcatccaccagaacagttaccatgaggagtatgtatccggaggccaggttttttattataagacatcagagaagggaaagtatctggcggaaattttgcagaagcgctttgattatgtgctgggcgaggccaacaagaggatggccaaggccaatgacaactattatctcctgcttcatgtgaaggagcctattgtcatagtggaatgcggattcctgagtaatggaaaggaagccaaacgcctggaagatgaggaatatcaggacagaatggcctggaccatacacatgggaatcatggaataccttaatacggtcaaacagaagaggtagaagccgggggctggcccggcaatcagaaataagatatgaaaatgggaaggctgacccgcgtgagggcgccttcccattgttgtatttaggctttaaatgtgaagaaaacaaaaggccggagaactggcagagcagtcctccggctggaaataaaaaaagcgcgagacgggattcgaacccgcggcccccaccttggcaaggtggtgctccacccctgagccact

SEQ ID NO: 3196 - DNA, 5053 bp, Unknown
  gut microbiota DNA sequence
ttttatttcatacccattttatatgcatttattaaatctctgcatccgtcccttccggctccctgctgcagacgtcattcccgtcgttcagcgcaggcctgatcattccatccttcagcaggccgatgaataccggcaccagctccggatcaaactgtgttcccgcgccccgttccagctcattgacagcgaattccaccgacatgctgggcttgtagctgcgcttggataccatggcgtcaaaggaatctgcaatacaaaggattcttgctgccagaggtatatccttccctgcgatgcgcctgggatatccccttccgtcataccgctcatggtgtcccaggacagcgggaatcacataatccatggaggggaggtggcgtatgatttccacggatgcctccacatggcgtttcatggtactgtactcctcatccgtcaattttcctgttttattcagtatgttttccggtatccctatttttccgatatcgtgaagcagggccgactccttaagaatctcctggtattcctcgctggttttcagggcctgtcccatggcatgggcatagtaggccacattcttggaatgctggaatgtataatggtcctttgcgtcaatggcagctgtcagggcatagatggtgggagcatactcagaatacatgcttcggtgcttctttgccagtccctcgtccgtatccctcaccccgatgattccgtccgagtatacccggattccgttctttccggaacgcttcacatggtataccgcacagtctgcgttggatatgagctcattcatggacgcggctgcgtacggagccgcacagattccgcagctgacagtcaggggctttaagtaagtgtccgtacagtccagattcatattctggatctgccgcgaaatgttctcagccaggttctgcgctgaatagatatcataatcaggcaggatgacggcaaattccttgccgctgtagcgtccgcagtagccgttatcccccacagtcccctgtatgatacgcgcaatatgcaccagtgccttatctccctcatgattgccgtaaagctggttgtacagcttaaaatcatccacgttgaagatgacaagggccagggaggtccgcctgcatttttcgtaattttcctccagtgtctggcagaaatatttccggttcaagagtccggtaagctcatctgttctggcttcctcatatgccttttcataaagcctggagttcttcaccgcaatggagcttacggattcaatggagttaaggaatatgatgtcctcctcggaatacccctgggtacgcatctttccccgcttctccctgccccctaaaagcaccagtccggccagatcgttcccatccttaagaggcagaatacactcaatcttaaggacctccatctggtatttttcttcctcccacatggacttatattccacggtcctgcggaaatccttaagcagcagacaggaatcatggcttttaagccagttgataagcggcgcgctgccggccagagaaaaattcttgtcatccaggggactgctgctgaatacagccggataattcccctgggaatccctgatgcaaatataaatcttccttgtgtgcagggtatttcctatgacgttcaccagggcattcaggatttcagtcagtctgagggattgggacacaatggcggtgtattcgctgagacgttctgtctggctcacctcctccttaataaaaatccggtcaaaaaatcctttggccaccatgtaaatcagcagtgtgaccagcatggtcatagtagccacaatcatgacgctgaaaggggccagcattggtatatccctgcggatgatgccgtccagggtctgggccacattgtaaaaggccagggcgcttactgccatggcaatgatgtagcagttgcctctggataccagcagggtcatgcggaacacatgcctggaataaagcgtatagaacatcacccctgcattcagcacccctgacagtatatcaatgggaaatccattgaacagaggcacagccatattgcctgcaaaaagcaggagtatacctgacagcagcggtaccaccttggccttcagggccctgtttttccggctgctccatatgatggcggccgtatgtatgattaccaggaaacagagtccgtacataatgctggcacgccagtccatatgatagacaaacacggcgctggctccattccactcgatagcaggcggctggaccaggtttcctgtccatatattatagagattcaccagaaggataagcaccagccatattttatgggagcttttcgccttatggccgcagaaatccctgataaagcagaaaaacgcacacggcaccaagctgattcctgccagcgaaagatgaaaccacagctcataggacggccaggcccgaagcctcatcaaaagggaaccgccggtccacagaatcatggcgcccagcacagcgataaaatcacgaatcagccgtgattttttagccgacataaaagccagcataagaaaggtatagaaatataaagctgttatggatataaaaacatagcttctcatacaatcagtatctcctaatatctcctgtgcccgtcaaaagccgcctgcatctttatcatttcctgtatatcgtggatggacgggttgatatgccgcagtgtctttcctgtcttttcccgataggaggcaaaggtgccgcaccgcaggacagttatctccagcgggtccatacccaatatacgtttcagatcatggtaatcctggtccacgtatttaaaataaatggtcaggtgttccttcagaagttcccggcttacggcccggttcaccacgcagcccggcgccagctccacgtacatatggaggtatggcctccctctgtcctcagtaaactccttaagggctgcccagtccgtcacatcaattccggaaaggctgataacattcttaatggaattttccgaaatccttgtaaaaccggcaatatcaataatatccggtacccggtcaatgtactcaaacctgggaatccgtgtctcatcctccttgctggtaagtcccagacagcggtagacatcccccacccggtaccgggcaaatgccccgcctttcagcacggtaaggacaatttcatacacctccccggctgccacctcatccatacatatggtcctgggaacataggagggatcatccagattcttgtacatttccgcttccggtataaattcataaaagcatgcatctggaaaaaagtacagtccgttgcagttccatgtctctgtcccgataaaactgggctctgtccccgcaaacacctccacgggcctgatgccccacagctcctccaggtcatctttatagcagcggttatctgttccggcgcacagaaatcccttcagcctgaacagatccttgggcatcaatccccgtccttccttttcacactgtttcttagccttaagataccgcagggtcatggaggggggcatggtaaacagctttttaaggaaagacccgcccttcttaccgccctcggacagactggcaatactcatactcacaaaataagccacgctgcccatgccaaagaagaagtcaatcccctttcccaaccccatcttgaatcccttcttattccgctcggaaaaggtcatgtttacggcctcgtccaccggaggaagaaactctatatggagctcgtccgacaatcccaggggaatcaggcccgtgatatagggcaaaggcgccaggccgtataaaaatgtatcgccgattccgatgtcaaaacttcccctgcccttgctggttgccatcatcaggcaggtaaggatattatttttataggtcttcagcatgccgctggtgtagggcgccaccttaatgggatgcttgccgccctcccaggtggtctgtatccatataatgggtttatcaggaagcatgtcctccttcttaaggagaagaacatccgcataatcctcataggtagtcaacggcaccatggccctaaactcctctatattctccggcctcttgtcctttagaattttctttccaagagggctggcgcaccagagtcccatctgctcctccaaaagccttctctggattttcatataagacgccatgtccaggtccagaaatccgcagtattcctgccatatcctgtcatactcctgattggtcagcttttcctcaaatgtcattctgattcaccgccttttccacagtctgggtaatagaaatggtacctgttcctgatactccctgtagtcagaaaactcctctacaaatataagcctgtcctgataccaggcatacaaaaggttcaacaaagaaaggcaaagactgagcatcacccggttcggattcccggtggacaggcccgtacagaaaaagcagccaaaaaaccaccagatgcctggatgacggcaccagccatacatacctgagcggcagaccttgtgccgatccgcctcctggcagtatgtattatcaaagggcaatgcaaaatacagcgtataaatcaatacagccagaaaaaatgcgccaggaaggagccatacagattgttccttaattcctgaggagacgcaggcatataccattcttcctcccaccacagccagcagcaggttccctgctgcaaaaagcggtacaaaccactttttcttcaaaaaaacccgattccagtcatacaggaaaaacattccaaaggcccctaatccaaagccccaatccaacacctatatccccccttccccatatataaaagggagtccgctctcttcatgattccagactcccaaccgtatctaaaataaatcctcccatctgttctcaacctttgggaaattatgtaaagtatcatgtaaatagcaactatttgccgaatagtataaattctatcataaatatgccgaaaaaggaagggatttgtccaggtattatttatcttttcttataaataattaggttattttgtaatcatgctaaatttattgtttt

SEQ ID NO: 3197 - DNA, 15368 bp, Unknown
  gut microbiota DNA sequence
tttttctgtttttcctgctgctgtattcctactgctgctttcctacttctgctttcctacttctgctttccttccgtctctatgctgtaccggcatacgccgtccacataagtggcttccaccggaatgcgggccagctcctcaggagaggtctcaaagggattggctcccagtatcacaaaatctgccagcatccccggagcaatcctccccttcacattttcctcaaaggatgcataggctccctccgcggtaaaggaatccagggcctgttttatgtccagggcctgttccggaaggtaggggcccacgtgatccttcaccgttgtcctggtgactgcgcactgtattcccttcatcacatccggcagctccaccgggcagtcggagccgttggaagcatgggtggtctcataaagggtcctgaagtgatagctggatgccgccctctcctttccgatccgttcctccacgatatggatgtcataatccaggaaaatggactggaaatatgcgtggagggacagttttgcaaacttatcaagctggtccggccttgtaatctggcagtggacaatgccgtgcctgtggtcctttccgggatgccgcgcaagggccttttcgtaggctgtcaggatatcatccagaattccgtcccctatggcatggatggctacctgcattccctgggaatctgcatattccaccatgtcttcaaactgctgcctggtgaaaatggggattcccctggtggatccatcgtctgtatatggctggctgagataggcgctcctggctcccagggaaccgtctcccagcattttaagcgggccaatcttaaaccaatggtttccccagcccgtgttataccctttttccacaaaggccttcagcccgtccagggtagtaaactgggactgttcatagaccctgaccgtcatccttccctctgcatccagttccctgtatgcctccagcacccgctcatagggaacattgttaaaagccagcaaatcatctgtctgggaggaggtgactccataacggttgagggctttggacgctgccagtatcatctcctttatgtcctctttggcgggctcaggcaggcatccgtatatcaggtccattgcattttcccggaatatcccgttgggctcgccgctttcatccacctcatagagcccgccttccacctggggcgtgtttcctgtgatgccggccagctggagagccatggtatttaccacacaggcatggccgcaggttctggtaaggcagatgggatgctccgtggatatcatatccaggtcacggcggttgggaaaccgcctttcatcctcaaagtaatcgtggttccatcctcttccccttacccaggtgccgggctttggggactgctcccggataaattccttcatatattccttcatccctgacagggactgggtgtgctgtgacaaatccgctgcgccaagggcatttccatagttcaaaaggtgcatgtgggaatcattaaagcccgcgcacacaaatcttccctttaagtccgttacctcatctcccggttccttcatggccagggcgtcttcgtcgctgcctgcgcatataaatcttccatcctccaccacaaaggcccggcacaggggaagctccccagtgtatacggctccattccggtatattgtcctcatgtcgtccctccccttattctgccttctccagcttctttttatcctcataaaacagcggcatatccttatcctccagtgttccgatgttcatatagcgggccttgtaatccttcagaagcctgaaatatgtgcctgacagtataagaaccacgaacacattgatgaaagttgggataccgctggtgatgtccaccagggtccatatgctcaaatcacccacatgaatcaggtaaagggtgagcaaaaagggaggtagggcataaaaatacttgaacatgcgcagcagccatttcttcaccgtgggatggttcatagccagatggcgcagggttgcctcatagtacacataccatccgccggaagtggtcacggagaagatcaccatggtggctgtcatgaacacagttccgaaaaatcccagattgttctggaacacgttaagggcaagggttgcattggttgccccggaggtccattcaccggtaatcagcacgctgagcgccgtaatggtacacacaatgaaggtgtccacaaatacctcaaaggatccccagagcccctgctccacgggatgacgtgtcttgctggaggcgtggaccatagggcttgtaccccagccggcctcattggaataaacacttctctgcatgccggtggcaatggccttggacaccgtgactccggcaaacccgcccatggcagctgtcccagtaaaggcctgggtaaagatagagacaatggtgggaatcaggttgccgatgttcagcacaatgattaccaggccgaatatcaggtaccccagactcataaccggcaccagcttcacaaatatcttgcttaaattcttaacccctctccagatcagggcatagataaacaccactaacagcagggacgccagctcctggggaattccaaaggactgggccagcacttccgatgtggtaaagttggaagcgctgataaaaaaggtggaaaagatgccgagaccgaacacaaaagccagcggaagccatttcttaccccaatggcgctcctccccaagtccgtactccatgtaataggtgggtcctccgtatggatttccctcctcgtccgtgcggcggtaatacacggccagagtaacctccacctgcttaattaacatgcccatgaaggctgtcagccacatccagagcacggctccaggcccgcctgtggtaacagctgtggccacgccggcaatattgccaaagcccacagaaccgcctacggctgttgcgatggcttcataagggcttaaaagacccttgtcgttttcatcggtgacatggtcctttctcaggatacatccaagggtccgtttaaatatgtaccccagatggcatacctgaaaaaatccggatcggaccgtcacgtagatacccgtaatgataataagcgcaatcagaggcggcccccatatgatttcaccgtttagccagtttaaaaattctgtcattctttacttccccctattggtcctggattgcgatatcatggctgtccggcacaatatacaaaaagcaatgaccccaggccattgctttccataatcacatatctgcttaagaaaatccagccaatagcgccaccactttaaaaagtgagagtacgcagcctgttagactgcatcccaacacattccgccggcagacagaatccgtttcggcagtaatccctttccctgtgtgctccggcccgccggcctccgggacaaaatcccctctgtccgccaccctggggatggcatccattatcacacagatactaatgcttactgcgcctctatcgcatcctatattttaatattgccttaacatcatactatttaaggctgaaactgtcaacgtttttcgacatttcctgaccggccctgactggctgcgctttctgcggttgtcccgccttatgcctgctgtcctgcatcctgccagcttgtcccgcctcacgcctgctgtcctgcctcacacctgctgtccaccgcgcggaccagctttcctgcctcatgccttctgtccaccgcatggaccagcacatccatcagctcctcaaagcacacgccattggcaatggggatgtcaagctcctccgacctggcgatgcaggcttttacaaatgaggcagccagacgcacagcgctgtccagactccatccccttacggctgccgccgacaccacggaggagaatacatcccctgttcccggccgctcatggcccacgcgcctggttctggggaaagctgtccgctctccctcagccaccacattcataatatagccgccctggttcacacctgtaataaccacgcattccggccccatggcctggatttccccggccagctgccccagctctttcctgctccatccatcctttcggtaggtccgtcctgtcaggatacatgcctctgtcagattaggagtcacaatatcacccatggataccagctccttcatgcggctgcacatggccggcgtataggtggcgtaggtctccccgtggtctcccataatcgggtctatgattacctttgtatcctcctgcccgaactgccgtataacatccatcacaatctcaatctgcgcctcggaacccaaaaaaccgctgacaatgccgtcaaaggtcagctccagctccttccacttgtgaataaactcccccatcttctccgtgtagtcgtcaaagaagtagaccgggaatcctgtgtggttggacaaaatggaggtggggatggggcagcactggaccttcatcgcagataaaatgggaatagccactgtcaaagaacagcggccgtatccggataaatcattaaccatggcaatctttttctgtcggtaagcactcatgtcaaatctcctgtcatctgaaccggtcaaagagtccggatcttataagtgtactgcgaaggggcatgtagatgactacagccgcagcggcagacgtcaccgcattgatggaggtggaggcaatgttccatgccagcaccagatccgctgccggtttgcccagaatcgccagcttgtaaaaatatcccaccaagggatcaaatatcacgttgaacagcagaccgcagacagaggccgccacaacaaagcggaacacatgcctcttgtcagaactctcattgattctgccaatcttgtgagccaccagaccggttatcagaccgatacacagcttcagcaggaaggttttcggcgcgtacaccacatagatggggtcaaacaaatctccgatggtcattcccagggccccgcctaatcctccgtaaaagcctcccaatatcagggctcccaggacgcagaccgcattgcccagatgaatggaggtggcgtctcctccgggaagggtaatcttaatctgcaaaaatgtaaaaaccacataggataatgctgcaaacaggccggtcagggccagcttgtatatacggctgtcttccaggcccctgtggcctgctgtcactgcactggatgtcttcatacaaattctctcctcatattgtagatttcttaccggaacaactgcattcgttcatgccacctatggtatcactaaagtggaatgttttaaatatccagtttgagaagttttggccagtccagttctgtggaagaaaaatccttttgtccgggttgtcaatcgtgggattccaccacaatcagcaccccgtccgtaaaggtaatggcgccttcctcccccacaagttcattgctgatgcagagacttgtccctatctcgatgtccttttcatggagaggatatttaaaaccggtgagggtaatgcccctgacctcctcagtaagagggaggaaggagatatattttccccagatctcacgcctattaaacgtccgttccttgtcaatgagatagatacggttctggctgtccaggatatatgcctccattcccttttgcaggcagggaaatagcagatggatattgcccagcatatggtccatgcgtcctccggtggcccccagcaccaccacctcggtgcacccggtggcctgggcctttaagagggccagctccgtgtctgtctcatccttttccggctggtgggtgtcccatacaatgtgttccatcctcctgtaatatgccagcacctccggcttcaccgtgtcaaaatcacctactatcatatccggttccagtcccagggccttcacggcctccagccctgcgtccaccgcaatgattttatcaaaggtttcctgtcccaaaaaagaaccggcgaaggacaggtccagttttccgccggttataatcaaacaacgcttcatttctcatattcctttaaaatatccatgaattctctggttctggcagaagggtcccggccaaagacagcggagccggccacgaatatgttggcccccgcctctatgatctcccggacatttcctgcgtttacgccgccgtccacctggatatccgttttcagtcccttctcattcagcatgtgcttcagttcgcgtaccttgtcaagggtataagggataaacttctgtcctccgaaaccaggattcacggtcatgataagcaccatatccagctgccccaggatacactccagggaacgcaccggtgtggcgggatttaaggccacgccggctttcagcccggcttccttaatctggttcaccacacggtccagatgcgtgcaggcctcggcctggactgttatgatatccgccccgcagttcttcatatcctccacgtagcgtcccggctcctccaccatcatatgcacgtcaaacacagccctggtacatgggcgcaagctcttgatgaccggcataccgaaggagatgctgggcacaaaggccccgtccatcacatccaaatggagatactcagcacccgccccgtacacctccttcacctgttctcccagacgggtaaaatcagccgcaagaatagacggcgctaatttgtaatacatctctagtacctccttttatttttcaggtcctcatacatgaggatgtaattgtcatagcggctgcggctcagttctccccgtttcagggcttccttcacaccgcagacacgctctcccacatggacgcaccccagaaatttgcattcttcctcataaggcccgaactccggaaaataatccttcagttctcccggctccagacagtcgataaacatggagctgaatcccggcgtatccatcatgtaggtattctcttccacataaaacaattcagaatggcgggtggtatggcgtcccctctcaatcttgcggctgatatcccctgtctccatggcagcctggggctggatgcagttagtcagtgaggattttccgacacccgaaggtcccgccagaaccgaggtttttcctctgagaaattttctcatttcctccaatcccgtatcctcgtaggtgctgacaaagtggacttcataccctgccctctcgtaaatggcgcggtacttatccacaagcccggcctcccccagatccaccttgttaaaacagatggtgaccggcactccctgaattcccatcatcaccagaaaacggtccagcagattcagattgggttccggatgggtgatggcgaacaccaccagggcctggtccacattggccaccgccggacggatgaggacgttggatcggggaaggatggcgtcaatattgccttccttttcctcctcgtccaatacagaaaactccacattatcccccacaaggggtttgattttacggttgcggaacacgccctttgccttacactggtacacatggttccttccgtcattgatataataaaagcctgcaattcctttgattatcttacctgtcatatacgcctcttatcccaccggaaaaaatgccaccggataggacttgattactgttaaattgtctgcatccaccacttccaccatgccgctgtccacgccgtacgcccccttgattctggggaataccacaggtacggtctgggcgcccacaaccagtcttggactcataagggttgtgtaaacggaagctccctcatcattggtctggttcaggcgaatcagcacgcgcacgctgctggtctgggaagccggtcctatatagttgcttaaggagcacgcctcgtcaatggatccgatgtaatagcgttcatctgccgcctgggtctgtgcaggctctccgctgaccacataatccaccgcagtgcctgggggaagtatggtacccggcagctccgactggctgataatcaggccttcctccaccgtatcactggcttccacggttacattgcctgtcaagagtcctgctcccgccagaagggcatccgcggatgtgggagtctgtccctgaaggttgggaacacgtccctccacgttctgtgagcccttgctcacatagaggctgacgctctcgcctaccttcaccacctgggggctgaaacgaatcacattgccctttatggcggtatcgctgttctcctctctgacttctacaaccagtcctttctgctccagcagtagcctggcatcctcacccgtcatctgagtcaggtccagggcatttaggtctaccttgtcgctgcccttgctgatggtcactcccacagtgctccacttcttcaccacagtccctgccaggatatcctgacccatgacctggccttccgtatagttatccgaatactcgctgcctgtgatttccatcacaaggctgctctccttcagtttttccctggccatatcctggggcagtcccaggacgctgggcatatttatctggtcctccgtattgatatccaccacggtggtggaatcttcggtggtcatggaaacggtctctgtggtaggcttattgctgccctgtctgaaaatcccggtgagccgcgaaaatacaaacagcaccaccgccacgataatgatggctgccacgatgccaaaggccgttatgatgcgctcaaactgggtacttacatcatccccttcattctttttcctggtatggatgcggccttcttttttgcgcggttccctggcccggttcctgtcctgatgcccgggctgttcctcctccggttcctccagggcttcctcgggatagctcttcctgccttcctggatgctgttgagctcatcccttgtgatgggcctggtcttgccaaactcatcctcttccccgtccttgcgggcatagatgtctgcgtccgggtccatcagggcagcccgcaggtcctcaatcacatccgtcacgcaggcatagcggcggtccggacgtttctgggtacattttaatatgatctgctccatggcgcgggacatgtccggcacgtactggctgggcggtgtcaccggttcctccagatgggccagggccactgtgaccgtgttatccccctcaaagggcacacgtccggttaccatctcatacatggtaataccaaaggaatagatgtcgctgcgctcgtcgcagtagcctcccctggcctgttccggcgaaatatagtggactgaacccacggccgtagcgttcatggtctgggaggacacggccctggcaatgccaaagtcagccaccttcaccttgccgtccctggatataatcatgttctggggcttgatgtcgcggtgtatgatgtgctgttcatgggccgccgcaatgccctgccccacctgaagcgcgattccaatggcttccttgctctccagatagcccttgttctctatataattcttaagggtgatgccctcaatcagctccatcacaatataatggtacacatcctcatccactacatcataaacacttacaatattgggatgggacaggcgcgccgccgactgggcctccatcttaaacttgcttacaaaattctcgtcaaaggcaaattcctcttttaataccttgatggccaccagacggtccagggtatggcaacgtgccttatacaccacagacatcccgcctgagccaatccgttccagaatctcataccggttctgaagatatgttccgggagctaacatacgcctgcctcccttcctgacggacttacaagtaccaccgcaatgttatcaatgcctccctgacggttggcttcctctataagaagggctgccttttccttaaggcttccctctcctgtgatgatttcatacatggactggtcctccagcatgttgctgagaccatcggaacagagcagaatataatccccgccctccagatccacctcaaagaaatccggctccacttccctgccgattcccagagctctggtgatgatgttctttcgcctgttataatcctcgctgcctcttctcatctgtccgatggccaccatttcctccacataggagtggtctctggtgacctgacggatggaatcaccgtggatgagatagagacggctgtcccccacattggccacatagaggatattgtcctccaccacgccggccaccagggtgcatcccatccctttcagttcttccctttttagtgattcttcatacagcatcccattcactgcctcgatgccctttttcagctgcatgacaggagagccgtcccctgccctgtttatgtatatcaccagattctcaaccgcgaaccgcgaggcataatcgccggccctgtggccgcccatgccgtctgccaccagaaacaggttgggcagggagcccaccttttccggtgaggaataaatataatcctggttcatggttctgacccggccaatgtctgtcaaagcatatgcttccatggtcatccctctccttccgtgcattggggtactgccgaagcttccttataacttctgcgcagctggccgcaggctccgcctatatcccggcccatttctcttctaatagtaacatttataccgtttttttcaagaagatttttgaaatcctgtatggccttctggcctgactggacgtaatcccgctccttgatggggttgaccggaatcaggttcacatggccgtgctggtccttgataagcttcgccagagccctggcctcatccagattgtcgttgacgccccggaccaggctgtactcaaaggtgaggcggcggcctgtcttttcataatagtaatggcaggcctccagcacatcctgcagtttatagctgttggccacaggcataagggtttttctcacttcgtcgttgggcgcgtgaagggaaagcgccagggttacggccaggccctcctccgcgaatttacggatgcccggaacaattccgcaggtggagatggtgagactcctctggcttatattcagccccttctcatcggaaaccagccgcaaaaaacggatgacattgtcatagttatccataggctcccctgatcccatgaccactacattggaaacacgttcccctgtgatggactgaatcctgtatatctgctccagcatctcggagggacgcaggttccgttccagaccgtccagagtggacgcacagaaacggcagcccatgcggcagcccacctgggatgaaatacacacggaattgccgtgatggtactgcatccacacgctctcaatcacatgaccgtcctccaggccaaacagatacttcctggtgccatccacctgggaaacacgctcatccaccatcttcagacaggtaaggctgtaattttccttaagcttctgcctcagcggtatggacaggctgctcatatcgtcaaatccttctgccagcttcacatgcatccagtcataaagctgttttgccctgaaagatttctctcccagggcagccatctgtgctgtcacttcttccagtgtcatggattttatatctttctttccgttgcagtccaataaatccagcataaaaactccttccaaaacacgctctaaatcccctccgggccggtttcatcctccgcacgtctgaatacgctgatgaaaaacccgtcatagggatgcacccccggcaggaactgaatccatccgtcctttaacgagggctcctggggcagtccgccgaaccggtccgtcaaatccaccggcacaagcgggaaccgatcccttaaccaggccgcattgtcctggttttccagcctgtcaatggtgcaggtgctgtagcagaggagaccgcccggctttacgtactgccagacaacagacagaatctcccgctgaagccctgccagctcctcaagcttctcaggcgtcatgttgtacttgatatccggcttcctccctatgattcccagaccggaacagggcaggtccgctatgacaatgtctgcctttgccatggctgacaaatctgtctccagcgcgtcccacaccagggtcttcatgttggtcacgccgcagcgggccatattttcctcaatcagggctgtcttctggtatgtaagatccctggcctccaccatgccggtgccctccagcttatccgccagatggagactcttacctccgggggcagcgcacacatctatgatataactgtctttttcaggggacgcaatctcccccacaaaggcagaggtcacatcctgtacctgtatccagcccttcctaaaggcatccagtccctccagataatcgtacccgtcaatggctatcatggactccatgaaaggcagctccctgaccgatgtcccctgtgccttaagggaggccagaatgctctcccggtctgcccggtgcaggttgcacctgacccaggtaggcttatcctcaagaaaagaggcggcaatcttctccgccttttctttcccaaattccttttcccacatggcgtacatccactcaggaatactgtaccgcagggagggagtgtcaaaggtcagattctccttttccctggaaatggtccgcagcacgccgttcacaaaacccttaagcccggagaaatgacgcttcaccgccatcttcaccgcctcattgcagacagcggaatcaggcacgcggtccatatataatatctgatatacgctcatccgcagaagactgcggatgaacggcttcatcttgtttatctttgtcttggaataccggtttatgacctcgtcaatctgtatcaggtattccagtgttccttccacagcgcgtgtgataaaggaacggtccgccttgcccaggtactggtacttctgcagggcctggttcagtacaaggtggacaaaagcgccctgttccagtacctccgtcaatatatccaggacaatttcccggttttccagtcctctgtctaaggtctttgccatctgaattttctcctctcagggcctgtctgtatatgagtccccataaaatctgccgtacccggcgccttaatcattcctgcggttgccgaataatatcagcaggcggagaagctgaaggatggaagcagccgctgccgccacataggtaagggccgctgcgttcaggacctttctggtctgtcccacttcctgtccggccaggatgccggtggaatccaaaagggtcaccgccctgtgggaagcatcgtactccacaggcagggtcaccagctggaacagcactgccaggcaaaacaaaaggatgcccagattcaacaggacagagcttcctcccagtaaaagtccgatgataatcaggggccagcaaagctgggatcccagattagccgccggcaccagggccgcgcgtatccttaagggcgagtaatcattggcatcctgcatggcatggccgcactcatgtgccgccactccgatggctgcaatggatgtggaattatacactgcgtcggacaggtttacggtcttgcttctggggtcgtaatggtctgtcaggttgcccggtacccggcgcacggtcacgtcataaattccctgattggcgagaagccttttagctgcatccgcgcctgtcatgccgcacatgctcctgacagcgctgtagcgctgatacgtggagttaagcttggcagaggctgccatggatatgactacgccgatcaatatcagtacataggttgggtcaaaataaaacatagggtaaaacatcatcaatcactctctttctttacaaacacgtcccccgccgggatgggatatccgcggagaaatgctggggtatccatgcgtttttttccttccatctgaagctccctgatggacagcaggccgccgccggtgcagaccaccagtccccgcttatccgaacacactaccgtgccgggagcagtccccgtttctgcgggaacacctgattcggacagaaaatctgccgcctcccggcctgcaatcacatctgccgcccatatctttattgtcttcccattccacatggtatatgcactgggccacggatttaagccgcgaatcaggcgttcgatggacacggcgccctgattccagtcaatgtccccaagggactttgtcagcatctttgcatagcaggtgccctcatctgtctggggcgtgcggaccagagtgccttcctccagcttcttaagggtggataaaatcaaatctccgccagccatggaaagcttgtcatggaggctgccgccggtctccttttcctctatggggattaccgccttttccagcatgtcacctgtatccaggcccacatccatcatcatggtggtaatgccagtctccctttcgccgtctatgacacaccactggatgggtgcggcgcccctgtacttgggaagcagggacgcgtggatgttgatgcagccgtacttcggaagctccagcactgcctttggaagaatctggccaaaggctatgaccacatacacatccgcttccagtccctttaggacctccacaaaggaggcttcccgcaccttcgccggctggtacaccggaatgccgtattccatggcctgtattttcacaggtgtcatctggacttcctttcccctgccctttggcttatcaggctgggtgaccactgcaattacctgatgaccggcttccaccagggccttaagggcaggcacggagaaatccggtgttcccataaatacaatgcgcataaactacactcctattctacgatttcttcctcgtccgcagccgtatccaccagttcgccttccaccagctccacatacatctgtccttccagatgggcgcattcatggcagatggctcttgccagcagcccctcgccttccagctcatagggctccatattttcattaagcgccttcaccttcacgtagtttgggcgggtaacgatgcccgacttgcccggcaggcttaagcatccctcgtagcctgtctggctgccgtcggtggctgtgatttcagggttaatcaggacatactggttcccgtcgtccacatcaatggttacaatctgcttcagcacccccacctgcggggcggccagaccgcatccgttggcctggtacatggtctcaaacatatcttctatcagctccatggtgcggtcattcatcgccttcacgggcttacacttctttgtcaaaatttcgtctcccataattcttatctgccgaactgccatctcttttcaatctccttcatcatgttaaatcgtactgcacagtcagtccatcacggccttctaaccccttcaggccctcttccgtcattttcctaatctgtatcagtatatcataattttcatgcttaatatataaaatttttctataaatatcattaactt

SEQ ID NO: 3198 - DNA, 5187 bp, Unknown
  gut microbiota DNA sequence
aatcttatcgcatttttcattttcaaattctgtgttctgttttatattgcaattttcccttatataaaactagttcttgtaatttattttgtaaatatcttcctaataacattgactttcttacaaaaacatactattatattaaatataaagtatattttttcttacaaaattatgaaccaaaaggagaaatacgtatgagaaagcacacaaaagcacttgcaacaattatggcagcagctacattagcaatggcatccgcagttaccagtttagccaataccggttggcttaatgtacagaacaaatggtactattatgatgagtccggcaattctatacgtaatcagtgggtagagaatgacaacaatcttttctggcttaaagataatggtgagatggcaattcagtcctgggtaaactatgagaatagttggtactgggttaatgctcagggtgcaatggtaaccgacagctggatcccaattacaaataactggtattatgtaggtcaggatggcaagatgctagctaatacctggtttgagtataataatcgttcatactatcttactgagagcggcgctgctgcgaaaggctgggtagagttggatggtaagtggtattattttgacagaactaatggagatatgaaaaaaagtactacaattgatggttatactgtcaataaagagggagtttatgttaaatagttttaccagcttcaatgcatttctataggattaggatatgtttgtgtttttaatccgataagatttagagtaaaagaaaataggttatatactgaatgttggggtgtgctgaaaagcatacttccagcattcttttgattgtaacactatatatccagaaacttccccgcaaaaaaaccgccccgcctcaacatgtcacacacgtctcagcgcagcggtctttccatctaagtcatcctcagctttatcaactgaattccgatgatttccgattatacgattctatcagccctggtctaaaattacttcaatgtaaccttagcgccctcagcctctaatttagccttaacatcctcagcctcttccttggaagcgccctgcttaactaccttaggagctccgtcaactacgtccttagcttccttcaggcctaagccggtaacttcacgtacaaccttgataaccttaaccttgttaggaccaacctcggtcagctctacgtcaaattcggtcttctcttcagctgctgctgcgccagcgcctgctgctgcaactacaacacctgctgctgcggatacgccaaactcttcctcacatgcttttactaattcgttcagttctaatacggataattccttgatagcttcgataaactcagcggttgttaactttgccattttatgttcctcctgtttaatatttaataattgtgtttttcaatattgtccggcccctgtttgctgccgggcagataagcctttttctgtcaaaaaaattatgcctctgcggctccaccctgctgctctgcgatctgattgagtacgcgtgccaggttggtgattggtgactggatgcttccaagcagcttgccaagaagttcctctctggaaggaatggttgcgataacctgggttcctgcctggtcatagtaggttccttcaactacagatgccttcagttccagctttggagctgtcttagcgaaattagctaagatacgtgccggagcagtagcgtcttctttggaaactgctaatgcggtaggtccttccagctgtggtgcaagtgctgcaaaatctgttccttctgctgcacgcttaatcaaagtattcttgtataccttgtaagcaaccccagcttcccttaactgcttacgcagctgagtgtcctgctctactgtcagaccgcggtagtcaacaatgactgcaccggcagcgccttccagcatagccttgatctcatctacgactggctgttttaattcaacttttgccatgaatggtttacctccttatatattttcgcattgaaaaccgtcatagcacgggaacgattcataatccgggaccacagactactgtaccgggcaggcgacgcatgttgggcgcaccggacataccgggtatgcggatatgccaacagcggcagatataccaggtacaacagctgcaaagaccggacaaaaaacctctccgccgtaaagacagagaggttcgcaaaatctcatcataaataatcagagttttgtatgttcctcggcaggcgttttcgccttacaccttacggtacctgctgtctcagggcattcaatactgtggtatcatatcatattgtatgaatgatgtcaagccccactcagaattaaaacctcaagaataaaacattcgatttaaaacttcaaatcaaggctctaaaccttctgatgaatggggttttgtgcttatagcactatattatagcaatcaattagtttacaagctttgcaacgttcagcttaacgccaggacccatggtagaggtcagggcaacgctcttaaggtatgcgcccttaacggtgcttggcttagccttcatgatcgcatcaataagcgtctggaagttgtccgctaactgctcctctgtaaaagaagcttttcctactggcacgtgaataatgtttgtcttgtcgagtctgtattcaatcttaccagctttgatgtcgttgatagccttggtaacatccatggttacggttccggcctttgggtttggcattaagcccttgggtcccagtacacggcccagacggcctacaacgcccatcatatcaggggtagctaccacaacgtcgaaatccagccagccgtcgttctgaatcctcgggatcagttcctctgctcctacgtaatcagcacctgctgcctgagcctcgtcggcctttggtccctttgcaaatactaagatacgtacagtcttgcctgttccgtgaggaagaacaacagcgccacgaatctgctggtcagcatgacgtccgtcacatcctgttctgatatgaagctctacagtctcatcaaattttgcggatgcattcttcttcactaatgtgatagcatcagcaatgtcataaagtgcagcacggtctacgtttttcatagcctctgcatatctttttcctgatttcattctaaataacctcctagtggtattgacggggaatctccctcccacgttcatataacgggtaaatgccttagcaacccagaaaccttgctcgggtgtctccggattcatgcaccaattgtattattccttggtataattcccagatatgattctttggaattattcctcgatggtaacgcccatgcttcttgcagtgccggcaaccatgctcatggcagcctctaagctggcagcatttaagtctggcatcttagtctctgcaatcttttgaagatcagccttcttaagaacagctacctttgtcttgttaggaacaccggaaccgctcttgatgttgcaggccttcttaatcagaacagctgcaggcggggtcttggtgatgaagctgaagcttctgtccgcatatacggtaatgacaacagggatgatcatgtcgccctgatctgctgtccttgcgttgaattccttggtaaactgaacgatgttgacaccgtgctgaccaagtgctggtccaactggtggtgctggtgttgctttgccagctggaatctgtaatttaatatatcctgttactttctttgccatcttaggcacctcctaaaattatgtggtattgtcgggaatgtccctcccaccagcccctgccctgcagaagctgattccttgtgttacaaacggacgcctacatcttcttgacttcggcaaatccaagttcaaccggtgtttcacggccgaacatctcaacgtgcatggtaatggtcttcttactgtcgttgatggccttgatggcccccacagtatccttccatgcaccggagataacaactaccatatctcctacttcaaagtcgactaagacatcttcttctctatggaatcccaggctggccatctcttcttctgtcagaggaaccggtttggagcccggacctacaaagcccgtgacaccgcgggtattccgcactacataccatgtatcatcgttcatgaccatgttgatgagtacataccccgggaacatcttcttgtccgcctttttctccacgccgtttttaagttcaaccacagggagcatagggacggacacctctaagatctggtcctgaaggttcctgttttcaattgttttctcaatgtcgaccttgactttgttctcatatcctgagtaggtatggactacataccaatgtgcttctgacatacaatcaccctcgcctttgtttcaatccgtactcgtttgctttttgtctgcttaaattaaagaataaagctcaaaccaaacttcataacgaagtccaggacagcaatcatcacgccaatcgcaatcgacatgaaaagcactgccacagtctgttttgccacggtttccttgtcagcaaagacgattttcttgtactctttcttcagcccgtgaaaaaagctaggctttttgtccttcttagctgccttcttctcaaccttgtcagccttggccgttttctctgtggtttctacagcgttaactgtattctcttccataatttcacgtcctttactgagcaggattactttgtttccttatgcatggtatgcttcttgcagaatctgcagtacttctttgtttccatacggtccggatgagttttcttgtccttagtcatgttgtaattgcgttgtttgcattctgtacatgccagtgtaatctttgtgcgcacgacttccacctccacttatattatcgtagttaacatttgccgctcaggtacttaattttgagcataaaaaaaagacctaagctcttccattcgcccgtttactataccatagaaatgtccgtacgtcaagggatttttgtggatttatggggtgtagaccggggtatgttggttccgtctgctggtttgaaatcctgccgtacaccccatatatcataaaatcatcattgtccatggccaatgaatacggttacaaaatatacatgctctgccccggcctttctgagagcccgtgtacacgcttcaatggtactgcccgtggtatagatatcgtccac

SEQ ID NO: 3199 - DNA, 18576 bp, Unknown
  gut microbiota DNA sequence
taaaaagggcccttttcatagaattggggcgggattttaacaaatcccaccccaactattgacaaagagccacaataacaaaacaatatgaacaggccgcctgtcaaacgacagacggcctgttccaaacacaaaggataaaggtatttacccgcaatgggtacgaattatttaccgtagtatgcttttaaatacatttctttaatctcactcataagcggatatcttgggttagcgccggtacactggtcatcaaatgcctgctctaccatatcatccagcctgtctaagaagtctttttcatcaacgccgtaatccttgatgcatgacttgataccaacagtcctcttaagctcctcaatcttaacaatcagcttctgaactgcctcagcatcatccttggcctggattccgcagaaccttgcgcactccgcatacctttcacgggtatgtggatactgatactgggagaaagtacccatcttacgtggattctcagctgcgttgaaatcaaccaccagggaaatcagcagagcattggcaacaccgtgtggcaggtgatggaatgcgcccagcttatgagccatggagtggcatacgcccaggaatgcattggcaaatgccataccagccatacaggaagcatctgccatcttctgacgtgcctcaacatttgtaggctcattgtaagcggttggaaggtaatcaaatacgttcttcatggccttaagcgcaaggccgtctgtatagtcggttgccatgacggatgcatatgcctccagtgcatgggtcagtacgtcaacgccggatgcgctggtcagtcctcttggctggctcatcatattgtcagtatcaacaattgccatattaggcagcagcgcgtaatctgccagaggatacttgataccggtctcctggtctgtgataacggcgaaaggagtaacctcggaacctgtaccggaagaagtaggaacagcgatgaaatatgctttctcgcccatcttcgggaaggtatatacacgtttcctgatatcaatgaaacgcatagccatatccatgaaatccacttccggatgctcatacagcacccacataatcttacctgcgtccatagcagaaccgccgcccatggccaggattacatccggctcaaattctctcataagcttggcgccggcctgtgcattagccagtgttgggtcaggctgtacatcggagaatacagtatatgtgattcccatttcattgagacggtctgtaatggcatgggtgtatccgttcttatacaggaaggagtctgttacgatgaacgccctcttcttgcctaaaacatccttcagctcttgtaatgctacaggcagacagcctttcttaaagtaaaccttctcaggtgcacggaaccacagcatgttctctctcctttcagcaacagtcttaatattcagtaagtgcttaactccaacgttctcagatacggagttgccgccccaggaaccgcagcccagtgttaaggacggagctaacttgaagttatacaggtcaccgataccgccgtgggaagaaggagtgttgattacgatacggcaggtcttcattcttgctgcatgctttaaaatcttctcttcttcatttacattcacatacagggatgaggtatggccgtagcctccgtctgccaccagacgctctgccttatccagagcctcgtcaaacgtcttagccttgtacatagccagtacaggagacagtttctcatgggcaaactcttcgctgatatccacagactcaacttcgccaatcagaatcttggtatcctccggaacctcaacgcctgccagcttggcaatggttgccgccttctgtcccacaatcttggcgttcagggcgccgtttacaatgatggtcttgcggaccttatcaatctcgcccggctttaagaaatagcagcctctgtattcaaattcttttcttacttcgctgtaaatggattccatgactgtcacggactgctcggaagcacaaatcataccgttgtcaaatgtcttggaatgaatgatggagttaaccgccatcttaatatctgctgtgtcgtcgatgataaccggtgtattgccggcgccaacgcccagagcaggctttcctgaagaataagcagccttaaccatgccgggaccgcctgttgccagaatcagatccgcatccctcataacctcattggtcagttccagtgaaggaacatcaatccatccgataatgccctccggtgcgccggccttcactgccgcgtccagaaccaccttggccgctgcgatagtacagttcttagcacggggatgtggggaaatgatgattgcgttccgtgtctttaaggcaatcagtgtcttaaagatagctgtggaagtaggattagtggtaggaataacagctgcaatcagaccgattggctcggcaattttcttaatgccgtattccttatcttcctcaatcacaccaactgtcttggtatccttgtatgcgttatagatatactctgcagcgtagttgtttttgatgaccttatcttcaaccacgcccatgccggtctcttctactgccatctttgcaagtggaagacgcatcttgtcggctgcgcttgctgctgcaaaaaagattttgtctacctgctcctgtgtaaaggtagaaaaagctttctgcgcttcgcgcattgcattcatttttgcattcagtccgtctacgctgtcaatgatttccggaacaacctgctcgattttctttgccatttccttatcctccattttccttgtgtttgaatcagtacatttaggctgtacctgcctgtcaagtcattttaaattgttactcaattgctattgataattaattaacaatctcactgtttgcattataaaccttcgttaaaaaaatgtcaatatgtaaatgaaagattttataatttttttttggagggaaaccagggcaatcctcagacaagaaaacagctatcccctattgccatagaagatagctgtaactaaaaatcaaacatattccgaagctctaatcattgactcaaccgaaatcctttaattacttattaaaatagggggttcagtcaaatcttaagcgccttcctatagataactttttaacaattcaaccttatccagtctctcccaaggcaggtccaaatcattgcggccaaagtgaccataagcagctgtctgcttataaatcgggcggcgcaggtccagcatcttaatgattccggccggacggagatcaaaattggaacggataatgtccaccagcttctcattgctcaatttaccggttccgtaggtatccaccatgatggaggtggggtgagcaacaccaatggcataggacagctgaatctcgcacttgtcagccagaccggccgccacgatgttcttagcaacatagcgggcagcatatgcagcagatctgtctaccttggtgcagtcctttccggagaatgcgccgccgccgtggcgcgcataaccgccgtaggtatcaacgattattttacgtcctgtcagaccgctgtctccctgaggtccgccgataacaaaacgtcctgtagggttgatgaaaaactttgtgttcccatcaatcatatgctgaggaagtatctcgtcaaagatgtattttttcacatccgcatgaatctgttcctgggtcacgctctcatcatgctgtgtggacaataccacagcatccagacggaccggcttgtcattttcatcatactccacggttacctggctcttgccgtccggacgcaggtacttaagcgtaccgttcttgcggacttccgtaagacgcttagccagcttgtgggccagggaaatgggatacggcataaattcttctgtctcattggtggcaaaaccgaacatcatgccctgatcccctgctccgatagcatccagttcctggtcagacatcttgttttcctttgcctctaacgccttattcactcccagcgcaatatcctgggactgctcgtcaatggctgtgataacaccgcaggtatcgcagtcaaagccgtatttggcacggtcatagccaatctcacgcaccgtttcgcgcaccagcttctggatgtccacataagcgttggtggttatctctcccataaccagaaccagtcctgttgtggtggctgtctcacatgccacgcggctcattggatcctgctccatcagagcatccaggatcgcgtcggatatagcatcgcacattttgtccggatgcccttctgttacggactcagatgtaaaaagtcttctctccattttaatctctccttctttcagataaatgattaatagcagctgtaacatcaaccatttacaaaaaacaaagtccgcagcaattgcggacttgaaaatatcattaaatcttcaaatcctcttattgctcgaccaagtatgctccatagcatactcctcgctcaggctggcaccttccggccctttcgcatatcttgccgatatactcaaccggggttgccgtgacttcacaggtcctttgtacctccatcactctgaataagggatatttacgaactctttaattgtaaaatgtgttaccttccatatcttatagcaattatatatatatgtcaatactaaaatccatcatttcctatcctaccttatggaaatccttccctgtcccccgggatttgcatactcagatgtcacggaacctcccatccttctgatataggaagacaatatatccacatccaccataacctcatcccggattacattacatcctttaaacatggtcatgccgtcgcctccctgtttcagcatataattatgggacgctacggtatacgtcttgttaaggtcaatgggttctcctcccactttaatgtccattaccctgtaagcaccggacacaccggtgaaattccccttgtcatccgtctgaacgccggacttaacagatgtgtcgatggtgtaggtcagaccggaaacctgaaggaaaccgccgctctcctcaggacaattcctggacgccatctccagcgcatccttaatctgctgtcccgtggcctctatgacacatcccatattcccataagggaacacggccagggtgtcgttataggtaatgtttcccggcttaataacgcttcggattccgcctccattgctgagcccgatatcagcacccagctccgcacggtaagcatctgccgtcaaatctcccagattcgtctcagcgtttctgataatacgattccccgtggcaggatcattgactgtcagctcatatggcgtggtacccagaactgtctttaatgtctcattgtactggttctcgatagactggataaactgataggtcccatagtctgcggcctttccgtcaggattaatatagcttttgccgggaatcacaatattaagacccacaggaatcacgtccgcattctttatcttatccagattgctgttgtaaatatcgatccagcggttatagctgcccaattccctcttcgcaatcctacttaaggaatcatgttcctgtaccgtatactccctgtccaggtccgcagcaggcacctctgataccagctctgtgcgtatggatccatcggcagatatggtcagctttccgatatgattcagcttggtacccgtctgggtcagaaccacattctgtccgtttttattctttacgttctccgacgggaccgtctcatgggaatgaccgtcaatacacgcgtcaattcccgtggtattggcaatcacactggcggaggaccatttctgggtaatgccgttttccccaaggtgtcccgccagaatcacataatcagctcccgctgtcctggctgcatccacgttggcctgcacctgatcgtacagcttttggccgctctcgtcctcacagaaggaataaatataattgccctggctgtcctggaaatatgccggtgtggattttgtaaagctctcaggcgtggtaacgcctacaaaagccacctgagtagccccatatgtaaacatcttatagggcgcaaaaacaggcgcgcctgtggcactgtctataaaattgcaggaataatacccacaatttaatttcccggccagctccagaaatctggacatgccatagtcaaactcatggtttccaggaactgcaaaatcatatcccacatagttcatgatatcaataagatacccgccgtctgaaagcgtgccaatgggcgctccctgaatggcgtcccctgtatccaccagggttacatacggcgtctgctgctgcatctccttcttatacaatgccagacctgcatagccgatgttgtcatccactccgcagtggacatcattggtgtacagcaccacgatatccttgtccgctgccagtgccgtgaccggaccgcctgtgagcggcaggcccatcaccgttacagtggtcaggacaattgcaagaaacaggctgcgcagccatttgaagctcttgtttttcatgattttcctccttattatgttttttccaaaggttcctgccaccatcatatcatatttaagcggataagtaaaaaacgctgataacggttctgataataaaatggggaaatcatcctgcctgtggattctttccccattttttgcgtatccttagtccgccgcctgatttctgcctccggcatttcggttattcacaggccagctcgccctcattcgcctcttccctgcatatctcctgcccggacttataatccgtcacagccagctccattacggcctgggaatagttcacggacatcctgacatattttcctttttccctggctgcctcagacgcaatccccgcaatctgctccagcacatccctggtcagatatcctccccgccagtggaatacataatagggctgtttcttcctcagcacagccttaaaacgtcccgccacgtcctccagcttggtcagggacagcctgttttctttataataaaaccttcccccgtctgtgcacgcaggcaccttatacaccaggggctgatggtccttgaatatcatcttgtcgtccagattaaaataatcaaaccgtctctgtccataccgccccagggaattatcaaaggtcgtatccagatggtaccatgtattcttcaattttaccagattccatgcgtggcggtaccggattcccctgtcaggagctgattcacttatggctatcaggcactccagccccatcctgtcgcacagtattttcacggtcttggcaatgccttcgcagacgccgatcccctgctggagaggccctataatttcatgggaatactgttttttcagcttgtcataggtcacattggagcagatgaagtcatgcacgtacttttccttttcctccggcgccattccctctgcctgccggaccagccggcttatcctggactccagggctgttttcatctcttttattttcttcttctcaaacatatattccggaatcatctgtacatactctgaattctgggcaaacctgtagtgaaagccctccacataaaatatggccggatggtccaggcggagccggaaaaaaatatctgacagctccttaccatccaagcgcagaaccggaaattccggcgacagtgactcaaatccatccaacatggccctataggcgttctgctgagctttattcatttgctggtaataaaattcttgtttcatattcgttccacatatccttcttaagtctgtttgtcctgcctctgaaagaaaaggcaggaaccatgcaccttccggtacatcctcctgccttgtattctctcctgttatcaaccaacccttaatttaaacttttgtacttcccggtcggaatctactttttcaatcatagctcccaatccctgaagcttttcctcaaaacactcatatccgcgctggatataaccgatttcatccaccaccgtatacccgtcagcggctaatcccgcaatcacaagggctgctcccgccctcaggtccggtgcattgacctgggctcctgtcaggccttttacgccgtctatgacagccacattgccctctacctttatattgctgcccatgcgggccagctcgtccacatatttgaatctgttctcaaaaatactctctgtcaccatactggtgccgtttgccaggaccagggcaaccgacatctgaggctgcatgtccgtaggaaagccgggatagggaagggtctttatatccgtatgcctctgggcaggttttcccaccacgcgtacagcgtcatcaaattcaatcacctcacagcctatctccgtcagcttggccgaaatggcttccagatgcttgggaatcacgttcttaaccatgatatcgcctctggtggcagctgcagcgcacataaatgtgcctgcctcaatctgatccggtataatggaatactcagtgccgtgaagacggttcactcccctgatacgaattgtatccgtaccggctccctttatattggcgcccatgctgtttaagaagttggcaacatcaacaatatggggttccttggcagcgttctccaggatggtctgtccctctgccagggccgcggccatcatgatattaatagtagctcccactgacaccacatccaggtaaatgtggcttgccaccaggtcgatggcatgggcaatgacagccccgcgctcaatggtcacctcagcccccagtgccctgaatcccttgatatgctggtcaatgggcctgctgccgatattacatcccccgggaaggggaacctgcgcgcttttatatttgcccaaaagagctcctatgaaatagtaagaagcacgtatccggcggatatactcatcatccacagatacctcgcttatattgcttccatttatctttacagtgtgtcggtcaatccggtcaacccttgcaccgatttcctgaatcgcctctaacagtacattgatatcccttacatccggcagattatcaatcaccacatcatcgtcagtcatgatagaagcagccagtattcccagtgcggcattcttggctccgcttatggtcacatctcccaccagtggattcccgcctttgataatatattgttccattccacacctctgatttttatttaaacaaatccaatatataaggaaaatactcctaaagaaatctttaaaaatttgttcataatttatttacatcttcttagattataccataagaatcagatttgtaaagtaaaacgaaaatgcacaccctaaagtacactgtctactccactgccaaagcacacaggaaatcattttgcaggttcttgaaatactctgtggcatcattcagccccatcttctgtgtctcctgggtctgagggtcatagagcgtcacattgtactggtcgtagccggataaaagcacgtactggcctgattccacataggcaatcacaggaatacccttgtcaatatagtacagtatctggctcaggctgcatcctcctgcgtcaatgagaataagtccatcctcatagacgcggcttccgtcaaatgaatccagatattttgtcaccttcctggcctcatccaccggggatttgatattgcgtatgggctgtctgttgattctgtcccacacaatatgctggctgctgtccgtcacataccccatctgcccataggccatctccactgcctggctgaaggttctggatgaacctaaataatgtccgcctccgtatgccctgaatatcatgctgttatcagatgatgcggaagcactgcttcctgtatccagaacacttgtatattcataagaaaatgcctttggcgcagatgtacggacctcatttccgtgtatttccgaatctgcctgtacaaaataaacctttcccttatcctgggaggcaaaccagccgattccctccaaggggtccttctcaaccctctggttgcatacaatggtatcctcattctgatacagatattggttctcacccaatggcacaagccgtttcagatgaatccgtccatcctgtgcaactacatccgttatataaatgccgtcctttctgtattcactctccacctgcatctgcgtatcgacaatgtacattgcatacataggcatacccttcatgcggccattgacaatccacttatccttggaactgctcagtccatatatcaaatcatttccaacaaatcccaatactctgacataatcatttacctcccctacgatttcctgtttctgggaagtattaaagtccataacatggaccttttcggattcatagaggttctggccttcctgccatgcaaaccggctggcatcgccgctgacagcatagcttccctctgtcagcccctgggccactaccagggattcattgctcttgagatcgataccgtacacagtaccctgaagcataatatacatcatgtcattctcgctgagataggacagtttatcaatgtctgctttcaccatatcataggattcagatgcaggcaggaagaacttttcctgtaccgtatcctgttccttatcatagtggtaatataccactcccatccgtccttcgtacttcccccggttcatatatccatacaccagaaaatccatagaaccgtcatcctgcatggacaatatctttatgtcgtacctgtcataattgcttctcacaccgtcgtccgaattgcttctgaacgaaaatacgcacaccgcctgcttatcatcatagtcatagcaccacagatctcctcctgttttaaatgccacatacttggattttggactcttcatggttcttactttgttgtcatttgtaattccaagaagaatctttttacctgaaaatgactggtgacctccgtcaaacacttcattggcattgcgttcgtaattcatcaggtagattctctgctcattccatttcatggtaaaattgtcttctgcgtcaaccatggaacgtgttccgtcttcctcattaatggcgacctgataccgaatctggatttgtcccataatgccgtcaaactcctggagagtcatcagaggctctcccaccatctccacatccaggccgtcccatgttaaatggctgaagctggccctgatggtaacatgtcccagtgagctgttatcctctgtgtcattggtttccagataggataccaaatctcttgcctgattatagtccagactcttcctggtaaactcctgggccagtctgaccatatctgacgcataagcgttatccggccacatgattctggtgtaataatgcagctccttttctcctgtggacacggtaattgaaaggagatatgtctcatttctggccagcaggttttgaatcgggagcaccgcgctgacgcttccgtccccgcttacccagtcttccacttctgtcctctccaccagcctgtccagagtaagatttctcacttcataactgatgcctgtaatggtatttccatactcttcaatccggatattcagcccacggtcttcaggcagcacagagatactctccctggctgcctgattccccatatcctgcatgtatccatgcaggcaattgatttcctgaccgcccagctgggtataaaccactggcaaagacggttcttccatagatgtatatacagctgattctttttccatcgtgtttctggcactgataaaataaactaccagcgctcctataaatatcaggaacaaaatccctgctttttgcaatatttttttcatatgtgattttatcctttatactggttgctctgtatcatttctattttatataatatccagtaaaactacaacttaatcttttcggaattttattaataatatctttgctgctcctataaggcacacagacctctggcacaccttctgtggaacatttcattcagcagaagtaccttgaccatgtctctaagccaggatggcctgtttccgggtttaggtggcggaaccggtctgggcggcattggcggtctcggagggggaggtgttggcctgggtggctgtggcctcggcggtctcggcgggggcggaggcgttggcctcggcggctgcggcggtcttggcggaggcggcgttggcctgggtggctgtggcggtctcggcggaggcggcgttggcctcggtggctgcggcggtctcggcggaggcggcgttggcctcggcggctgcggcggtctcgggggcggaggcgttggcctcggcggctgcggcggtcttggcggaggcggcgttggcctcggtggctgcggcggtctcgggggcggaggcgttggcctcggcggctgcggcggtcttggcggaggtggcgttggcctcggtggctgcggcggtctcactggtccgggtcctcccactggtggtctgtcctgattaggtcctgacggcggtctcactggccctagccccatgggagggcgttccgggcctggccccataggcggacgttccggacctggacccataggcggcctgcctggattatttcccatgggtggtcttcctgggcccggacccatattaggtcgtccacccattcttccatttcccgaaaatccaggttctctccctctcatttcctgagtctccattataattccggacgggttcaccactgattccctataacccaggaactcattctggctattggaaacagactgttcctccagtgattcttctgtggttaaaacctcagcattacctatgttttcagccggaacattttctatgttctgctcctgctccatcaccgggtcatcatcctctgtaaagaaatctacatccagacgtttcatatcctttttgagttctgccatttccatcacagctttatcatgctctgatatgttccacatgcctctgaccttttccgcgccttcggatgcaatcaccgtgtcgcaaattgtatcacaaagccggttaatcattatatggtcaggatactcatcatacatggggctgtttttataatccaatctgtcgcaagcttctgccacatacccctgtagaattcttattcctgacggatacatgcttttcaggtattcaatgtcctgcatctactctcccttttccaattttctcttaccaatatcatatgcaggccaaatccattatgcgccaactttccgcctttttcccaaaataaataaaagaccagataatttccagtcttttacaattgttattgatttaatttttcttaatataaccaagagcctgttccaatgcctcctgttcctcattccccagaacaatatcagtctgccccatatccaccaccttaatatacagataacaaccttctctgctgtggacacagtttaatacgaatccactgtttgtataatctaacatggcaaaggcaaaacttaagtttcctcccattcctttaaaggcattatacttgacaagcccatatttttggaatgaggctctctgattccggttcaatgttcggatggaatccttatttgacctgtcttcggcccttaaatccctgatttcttcaatctggtccagaatgacatcttccagagtttctgcatcttttcctctcataaaatagtcatattggcgatccagccttctcacttttgtcattgttgtaatcgtcaatatcagcaacagaaccactaatatcaataatcccgctattatgtatgcaggatcaaagggaatttgatttaagatgctgttctccatataatatccatctctcctttgtacctagcgaattgattctatcatttctacaatccgctctaattctgcttctgaataatattcaatttcaatgcgtcctttatttttatccttgttgtggatactgacctttgtacccatgacgcttttcatacgttcttccaagctctgatatatcaaagccagggcttcatccttatttttatccttcttctcttccccgttctccgcttcttttgcaaggcgctttacaaggcgctctgtttctctgacactaagcgattcgtccaatatcatctttgctgccttcagctgaagtcctttatcctctaaagacaataaagctcttgcatgaccgctggaaataagattctgaatcagcatttcctgtatctgtccgtccaattttaaaagacgcatggaattggtaatggtagccctgttctttgatactctggctgctatttcctcctgagtcaacttgaattctgttaccagacgctgataagccaatgcctcttcaatgggattcaggtcagatctctgcacattttcaatcagtgctatctccatgctttcctgcttattgtactcccgtaacacaacaggtatttcctttaatccggctattttggcagcacgccacctgcgttccccggcgataatctcataaaatgtcccctttttctgaactaaaaggggctgcaaaataccgtatcgtttgatggaatcagccagctcagccagctgttcttcattgaaatcttttctgggctgttctctattaggttcaatcaaagccatctttaccatcaattcaccgcttttgccatccccgttatcagtcacagccgcttttgcttttgcaatctcctcttcactttcctttataacatcttctccaaagatggctcccaatcctttacccaatccttttttagccattacaattcttctcctctgctcattacttctgccgcaagcatcctgtagctctcagcccccgttgatctggaatcgtaaagattaatagacataccgtggctgggtgcctcagccagacgtacatttctcggtataatggttttataaattgttctgttcaaactgctcttaacactttccactacttccagtgacagatttgtccttgcatcatacatggtaaagaccacgccttccaattccaactccggattcaactttcttttaaccaggtccactgtttttaatacctgattaagtccctccaaggcatagtactcacactgtataggaaccagtacagtatctgctgccgtcagtgcgttaatggtcaatatatttagagatgggggacaatcaatgatgatgaaatcatatgtatcacgaacttgatttagacagctgctcagaagtttttccttatcctcgacttcctgaaattcaatttccgctcctgccaggttcatatcagatggaagcacatccagatttggctgtatttccttaataatacattcatttacagatgcctcttcaatcatcatatcataaactgttttatcaaaatcttcctgttccagccccaaaccgctgctggcatttccctggggatcaaaatccaccagcataacatgttgtcctgcttcagccaaacaggcggaaagattaatggccgtagtagtcttacctaccccgcccttctggttggctattgttatgattcgtcccatatgtataaattcctttctcgaaaaaacaaacctttcttcgattacttttacgattataacacaagtcctattcttttcctacggaaaattaggagaaaaggagaattttcatgttttatacaaaaaaatgtttcacgtgaaacatttttaaggcagaaaattgggcatcctaatcctgtagtgtcttaataataatttaatcctctaaccgttgtaatagcccccagcttgtattataatggagaagaatcaaaaaaccggttatataatatgtaatttcaggagactattgaatgaaaaccaggaataaattactgaccttacttatactgtcatccggagctgctgctgctactgctctgattaacaaagcgataaaactttcggcaacgtcccgaaatgtattggaagaaccagaggcattgtgttataagtggcgtttaggaaatatacattatactaagaccggaacaggtaaaccgattctgttggtacacgaccttgctcctgcttccagtgggtatgaatggaagaatctggtaggtaaacttgcggaaacttatactgtttataccattgacttgcttggttttggtcgatcagaaaaacccaatcttacctataccaattatctgtatgtgcagcttctctctgatttcataaaatcagagataggacacaggacggatataattgccagtggttcctctgctgcattgggtatcatggcttgcagcaacagtcctgaattattcaatcagctgttatttataaacccagagagcctcctctcctgcagtcaggtgcccggtaagaatgcaaagctttataaaataattttggatttaccgattgccggaactttaatatataatatagcctgcagtaaacagttcataacaaaggaatttttaactaattactattataatccttactcagtaaagacccgggtaattgatgcatatcacgaatcagcccatttaggagaatctcccaagtccgtctatgccagcttaaaatgtaattatgttaaatgcaatattgcagctgctttaaagaaaattgataacagtatatatctgttaggcggaggtgccatagatgacataggcgaatgtatggaagaatataaagaatacaaccctgctgttgaatatgctgttgtccccaacacaaagttacttcctcatttagaaaaacctgcagaagtatttgatatgattcaaacctatttatcttaaaatataaaatgtttcacgtgaaacatacggttcggacatctactccgaaccgtttttactaccaccaataaaataaattatttaactgtatatataagaaaggaaaatacaatatgctgcgaattggttgtcatctatcctcatcaaagggatatcgagctatggcaaaagatgcaaaaaagataaatgcaaatacatttcagttctttacccgtaatccacgcggaggaaatgcaaaagccatagatgaaaacgatgtaaaagtttttttaacggaagcccactctttggacattactccaatattagcccatgcaccttacacactaaacgcctgctcggctgatcctaaattaagagactttgccaaacgaaccatggcggatgatttagttaggatggagtatacacctggaaatatgtataattttcatccgggaagccatgtaaaacaaggaactgaaattggcatacaatttattgcagaaatgctgaatgaaattctttctccggcacagaccactactgttttgctggaaacaatggcgggaaaaggcagtgaagtaggtggggcttttgaagaattgcggcagattcttgatttagttgaattagaaagtcatatgggtgtttgtcttgatacctgtcatatatgggacgggggatatgatatagtcaatcacttagacgatatattgacagagtttgataataaaatcgggttaaaacgtttaaaggccatacacttaaacgacagccagaacccaataggcgctcataaagacagacatgcaaaattaggtgaaggatatataggattagacacatttaaacgaattgtcacacatcctgaattgagacatcttccattctttttagagactcctaatgatttggatggatatgcacatgaaatacaaatgatgcgtgaggcggtagattaactctagttaatcagatattttgagtgcgtgacttcttcatgtacaaatataaatgaagtaataagaaggcatacgatgtattttgccttcttatttttatattcaattatatttaaaagttttatatgtatattaaatattaatagatgtttattgcctattaaaagtgagatgacacatttatattaattacggtatcatgctgactaatgtattgtattaactaatacattttatcgcataatatatagcattatctaacctattatgtgggataatgcattatgtttaataacctattataggcccaacgcattatactaaataactcattacatgcccaatgcattatactgaataactcattacatggccaacgcattatattgaataactcattacatgcccaatgcattatattgaataactcattacatgcccaacgcattatattgaataactcattacatgcccaatgcattatattgaataactcattacatagcccaatgcattatattaaataacacattacatgcccaacgcattatactgaataactcagtatataaccaatgcattatactgaataacttattataatgaataatgtattatgttgactgtcctatcatattacgcaatatattatactcaataactcattgtaatgtggaaccaatcatatagattaatgcattatgttaattatacaattatactaactaacctattattctgactaatccaagatactgaataactcactactctgactaacccatgatactgaataactcactactctgactaatccatgatactgaataactcattattctgactaaaacaccttatattatttaacgcaataagttccttctcacattttgtcatctaataaattat

SEQ ID NO: 3200 - DNA, 47265 bp, Unknown
  gut microbiota DNA sequence
gttactaaagtaaaactttttggtaagttttcacaaaaaagcataagtaagtttcctggttaagtaacttgataaggtttttagggtataactttatgaacgcctgaaagcctgtctttgaagataaagtgtagaaaggtgtgcacagcctgctctaagatacacagattatttttgactataccgtaatagatgcggacaatttgcaccatcaggtatgcagacgcagtaagacgtgccatgggagcgttcctgtccggcaaaggaatactccaatccattcagttcaaagatacacagcgccatcaatcatatgacgtctcagcaaaaggaggatgagaaactaaaaagatggcataagctttcggttggcaagcggttcagcctatataaaacgaatggctgcaaataataggttgacgggctgttggggactaaaaccctacactttatatttaggaggagacattatatgctgcagatagttaacacaattaattcatatctttctgattacatacttgtatttcttttggtggctgtaggcctttggtatacagtcaaaacaaagtgtgttcagaggtacctttggaaaggtttaaaacagctgtttggcggtttttcactgcgaggcggttcacagggaggcggaatgagttcattccaggcggttgcaacagcaatcgcggcacaggttggcacagggaatattgtgggttcagccggagcgattcttgtgggcgggccaggagctattttctggatgtggataattgcatttctaggcatggctaccatttatgcagaagcaacactggcgcagaagacacgtgttacagatgcagagggcaatattcagggtggtccggtgtattatatccagacagcctttaaaggcaaatttggaacattcctggcaggctttttctcaatcgcaattattcttgctcttggattcttcggatgcatggtacagtccaactcaattggctccacaattcagatggcattcgggattccgtcctggattgtaggtatcttccttgttattatttgtggatttatcttcatgggaggtgtagatcgtcttgcttccgttactgaaaaattagttcctgttatggcagcattttttctgatcggcggcttgggagtactcgcaatgaggcttcagtatattccggaaacctttggtctgattttcaaatatgcattccagccccaggcaattatcggaggcggatttggtatagctattaagacggctgtgagccagggagcaaaaagaggcctgttctccaatgaagctggtatgggttccacgcctcatgcacatgcgcttgcattagtgaaaaatcctcatgagcagggctgtgttgcaatggtcggcgtattcattgacacctttatcgttcttacactgaatgcattggttattatttcaacactttatgcgggaaacggccctctggcaaacggctatgtaggagaagcagcaaatacattaaagaatacaaaccttgcacaagtagcttttggtgttgtatacggcgacaaggccggcgctgtttttgtagccatttgtttattcttctttgcattctccacaattcttggctggaatttatttgctaaaattaatgtaacttatttatttgggaagaaagcacaaagaccatttatgctggttgctttagtatttatcttccttggaacaattggggaaagtgatttggtatgggcatgttctgatatgtttaaccagttgatggttattcccaatgccattgccctgtttgctttgactggggtggttacaaagatacttggggatcgggacaaataagtttatattcatattatacaaatagctgattgaaaatgggcgctgtgccaatgcttagggcgggattcgttagaatcctgccctgttcatgttccggcagagataaaagttaggttgtgccagtgctcttgacaagattctccggaaaggatagactgcatataaaatgaatgcggtgaacggcatgccgggatatgcaatatggatagcacaacagggtcaggagacagaaaaaaacgaaagcataggtggtatacatggaaaaacttgataatcaggcactcacgcgttttgagagattgtggaaaatcgaaggtgataaactgctcagggctaatatcatcccttctgcagttaaagatggagaaatctatcccgtagattactgtatatctgccattgcccggctgattcagcagccacatggtgctgaagtagtctgtggtatcagaaatgcattatcagaactctttgaagcggctgacactcaatttatttatccggatgagtcgcttcatgtatctttgcttggatgtacgcaaagaaaaaatacaaatgtatttgaacatgctcagattaataagatcaaacatatctgtataaaggaaatagaaaagaaagagccggcggaaattattctgagaggcatcggaattgtgggaaaccaaatttttattcagggatttcctcagaataggaactgggaagagctcagagtatcactgggtgaagaattggtaaattccggtgaattccctatattatatgaagataaatcccctgttcatatgaatataatacggattgttgacgcagctccccatgttttggcatctcttcacagggctgtttcacggctgcgggatgtggaattgggaacggtaaaattacagaccgtagaatttgtgattacggatttttgtgttacaaagaagaatgttgtatggctccataagatagaatgccgcaattcgtctgggaacagctgccgcgtatgattcaccggaaaatgcgcaagatttcttaagacaaccccatttgttttgattatactattgtggaatacacggcgcttggggaaccgggacacggtccaaaggtgccgtcggcaaggaggcaattgtgtaatgagcagtatggatgaggtaatcctggcaattaattttattgaagccaatctgacgaaaaaaatggatttggacatgatttccggcgcagtccattattccaaatatcatcttcaccgcgtgttttccgatacagtgggtctaaccattcatgattacattcagcgcaggcagctgacagaggcggccaagctgcttgttttttccggcaaacccattgtgcagattgcatttttatccggctaccagagccagcaggcatttaccaatgcttttacagccatgtataagatgcctcccaatatgtacagggaaaatgaacggttttatcccttacagctcaaattcaattttgaagggagttatgaaatgcttgacagaaaagaaaaggctttatgggagatttcgtttgcgtcggatgaggatattcccagctggatggaactggtgaggcttgtgattgacggctttccccatctgaatgaggaggagtatatccgggtcttaagacagaaaatcagcacagggcaggcacttatcatgaaggacagaggctctgccatcggcatcatgctgttttcctatgaaaacggcagcattgatttcatgggaagccatccgctttacaggaaaaatggggttccgaaggccatgctggacaaggttatgaaggagctgcttaagggtaaggagatcagcattacaacctaccgggaaggcgataaggcagataccggatatcggaaggaaataaaggggctgggctttgcagaggcagagctgctggtagaatacggctaccccacccagcgttttatcttacagcaggaggaacgggagcatgagtgattatccagccattccgtttcccgatgaattagtccatctggaacaggtaagtgccaggctctcaaaagccctgcaaagggcagaggcatctgtcagtagggcggacagggaatatacggataccaagaaatacatggcggaccacaggggagaaatagacccccatgagatgttccagaatgaacttctgttaaagcagacagacaggacaggcgcctttgctgtggagatgcgggatcggattgtgaaattaaaggattccccctattttgccagaattgattttaaggaggaagaggaggaggaaggacagacgtactatatcgggagatttgcctttcaatatgaaaatgaaccgttgatttttgactggcgcgcccccatatccagcatgttttatgactgcgaggttggagaggccggatttttggcgccggccgggtggacagcgggagagcttaccagaaaacgccagtttaaaatcaggaacgggatcatggaatacgcgcttgaaagctctgccaatgtacaggatgatgttttgcagagagagctgagccatacttccgatgaaaaaatgaagtccattatttccaccattcagaaagagcagaaccagattatcagaaatgagaaagagggaacattgattatccagggggtggccggatccggcaagacctccattgcccttcaccgtattgcatttttgctgtaccgttttaaggacaggctgagcgccaggaacgttacgattctctcgcccaacaaggtattcggagattatatctccggtgtgattcctgagctgggagaagaacccatttatgagatgagctttggggaacttgctgatatccagctggagggagtcattggttttgaaccggacagggatccttttgagatgcaggacagggcttgggaggagagggtgcggtttaagtccacactggactttgtttatatgatggaccagtacatagagcagatgccggagtttatttttgttccaaccgattatgtgtacgaagggtttagggtaactggtgaatggatcagggatcggttcttagcttatgggacctgtccggtaaagaagcggctggcaatggttgcagatgatatccatgaccgctttgagacggataatataatggaacaggaggtgccccggccccgggtgatactgaaacagctgaattccatgcttgccatgaaggatacgctggctgtctataaggatttctataagcggatgggaattgcggaacaatttgtcatggctgccaggaggacattggagtgggcggatgtgtacccgtttttatatcttcatgccgccttccggggattaaaggaaagccatatcaccaggcaccttgtgattgacgagatgcaggattacacgcctatccagtacgccgccttaaaccgtatgtttccatgccagaaaaccattttgggggattacggacagtatattaatcctaaccatctgcactgcctggaggatttgcggacaatctatgacaaggcccgttttgtggaattgaataagagttaccgttctacctacgaaattatgtgttttgcaaagaaaattaaccatgtatctgccctggaaccgatggagcgccatggggaacctccggaattggttccgtgcctggacgcagcggatgagatcaggaagataagagaagtaatccgccgtttcagggcaggagggaatgtgtcgctggggattatcttaaagacggatgcggcggcaagggatatgtatgaggtgctggcaggatacgatggggcaaaaggaaatggatcggaaggctgcgaaaaggaagggagtaaaagggaaggaagtaaatgggagggaagtgaaagagagggaagtgaaagagagggaaatgaaagagagggaaatgaagggaaaaggggcaaaataggagaaagcggagcaaaagaaaggggtataaacttgattacccgggacagtgccagcttccagaacgggatatccattacatcggtccgcatgtcgaaaggcctggagtttgatgaggttttgattccccaggctgactcaagaacgtatgcctctgattttgaccgcagtctgttatatattgcctgtacacgggccatgcacaggcttacgcttacgtatagcgggagagaaacacgatttatttccgggcagaaactgtctggcaggcactccggaaaggagagccccgggagctgaatccggacggaggattttgacgagtgaaacctgaaatttcgggcagagaaaggcgggagctcatggagccatttacgtattgcaaattggagatattcataccggaaacccatttaaaggcgctgcagaaggcattgcaggaagtggacgcagggcatataggaaaatatgacagctgtatgtcatacagtccggtgacaggctgctggaggccgctggaaggcagcagcccgtttatcggtaaatgcggcactatcagcatggagccggaactgaaggcagaggtgacctgcaggacggagcggttagaggaaaccctggccgccataaagaaggtccatccctatgaggagccggttatcaatgtgattcctctgtacatgaccggaatggatatagtgtcctgataccggtcctattccggcagcccatgctgtcctatcaattgaatatttgtcagtgaaacaggcggaacgtggatttgtaataatctatgattccgtcttttttcatgccggacagctccctggatagggcgctgcgatccatgttcagatactcagccatggcgtttctgtccagaggaatggtaaagggaaggccgttttccaaaccggaaaaattcttcagataggtcagaatcttatcacgggcagttgggcggagcaggcagtccagccgctcatgaagcaccagccctttttctgccacaatccacatgaagtttttgagaagctgtctgtggcaggggcagtttctggtacaattgtttataagccggttataggagatgaacaggaccgagctgccctgttccacggttacggataccggactcttgcggccgggactggcggccagtatgacaccgatttcacttccctcttttaaaagtgtgactgtaagggtatggccctgggaatctgttttgtatgattttcctcttcctgccaggagaatcccgaattttttgaccgggcagccctcttcaaccacaaccgtctccccggcataattcaccgactgcgccttaagacaggccaggaggcggcatacatctttttgcgacaggccggagaacagtttggcctgcatgatatcctgaatgttttcgttcattgtgatttggttgcctgcgcaacttacctcctgactgtattgtattataattgacgtgtacatgcaattaaaaaacacagataaaggaggagtcagggatgaacactggttttaccctatttttttacggcctttccgcaatcctgttgtccttatctttccgaaaggacagagaaaagacaaatcgtgcggtcagaaaggctctattcatgatgctgggggtattgccctattttctgatcattttgctggtcacaggaaccgctttttttattctgccgcccaagacggttcaaactcttatggggacagagtcgggaataaggggaatgctcctggccgcagtcaccggggcggcagctcttgtaccggttctggctgtattcccggtggtttcggagcttcttaaaaatggggccgggacagcgcagatggcggtctttatttccacattgacaacggtaggaattgtcaccattcccctggaagtgaaatatatgggagtcaaagcagcagtattgagaaatctgttattttttctgttggcatttgccacatcctctctgctggaggtgttattatgaagcataaggtgataaaagcagagatgatgggaccctggaaggcagcagcggcggcgtatctggcggtatttatttttattccggaaaggtccggggagataggagcctgcgcctgcacgggtctggggcagtttatatggaatctggttcctgtattcctctgtgtgggtctgatggatgtatggattgaaagcgacaaaatgataaaaatgatgggagacagatccggtctctccgggatggggatatcgcttttgctgggaatgctgacagcagtgcctgtatatgcgctgcttcccatcgccggcctgctgttaaaaaagggagggcgcatttccaatgtactgattttcctgtgctccagtgtgagtatccgaattccgctgctgctttttgagatatcatcactgggtatccggtttgcggcctgccggtttgttctcaatctggcagtggtattcgtgatttcctttctggttgaaaggtttctgtcagagcgtgacaggcaggatatccggaggagaaatcagataaatcaggtgtgagctgcaaggagtgagatggcatgaaaatgacattatggctcagaacgcaaacggggacgcaaagggaaataaggattaaaagggaaacatggacgattaagcgggtttatggtagaataggatatcagactttttgaagaaggcaggtacggacggaatgaaattaagggtattggttgataacaacacgtacatagacaggtattatctgggggaacccgcggtcagctattatattgaatgtgacggtatcagactgctgtttgatgccgggtattcggatgtattccttaaaaatgcagaggctcttggaatcgaccttggcctggttacgcacatggtgttctcccatggccataatgaccacacaaggggacttaaattcatgaaggagcgtctggagctgtcggggatggaggtcattgcccatccgtcctgctttgatgaaaaggtgtttggtgaggaatccatcggtgcgccctattctgctgcggacatggctggtatttgcagatacaggccgtgtggcgggccgtgtaacatctcggagcggctggtatttctgggagagataccggatgcagtggactttgaaacgagaaaagccattggcaggactaggataagaggaaaatggcaggatgactatgtaagggatgattccgccctggtttaccggggggaggaaggcatttttattataacaggatgttcccacagcggtatatgcaatatagtacaatacgcccaagcggtatgcggacagcagcgggttctcggcatcatagggggattccatctctttgaggcagatgaacggctggtgcgcacaattgactatctgaaatgctgcggtgcggaacaaatttatccctgccactgtgtatcactgagggcaaaagccagaatgatggaggccttgaacgtgaaggaagtgggggtgggtatggagctttgcctggacggacaggctgcacattaaattctgagtgttgcggcggagaaaggttttttgtatgagacagacagaaaagaacagaaagaatccaaggaacggcaattcaaaagcaagggaccccagatatgactgtctgcgggctgtctcggtcatggcaatcatcatggtgcatgccatgcccgtggaaacagtcagcgcccgccaatggtggtttaacagcattatgacgcccttcctgctgtcgtttgtgggaatttactttatgctcagcggtatgtttttgctggaacatggaacagagcgcatcggggagttttacagaaagcgttttattacggtgggaattccgtttctggtctatggccttatttactattgttataatgtccatgcggacggagtggttctgcctgtctggaagcatgccggccggtatctggcacaggtgctgacggccgggcttcccagggcaggccatatgtggtttatgtatgccattgtgtctttttatatctgtgcgccctttctgtccaggatggtaaaaaatatgacggaccgggaaatgaaggtgttcctgcttctgatgctgggcatccatgtggtggaggtggccggagaaattcttggactggacgtgaagccatgggcccagtttgtgctgtatacagggtgggtctactattttcttttgggatacggacttaagcgcttatgcaggaaggaacagtttcccatatttgcggtcctggcagtttttggcctggccatggatgtggctgcggatatcggcctttcatggtgggttccccaaactccccataagtcgccggccatggtgtttatttgcgccggagtatttcttctgtttgaatattatggcgggaaggtgcctgtatgggcgggaaagctgggaatatttgtcagcaggtacagcttttccatctatctgattcatttccttattctgagctactatgtaaatccggtacttctaaaggatatggcggcccgccattatatattgggaaccatggtttctaccgttgtgaccttctgtttatctctggcatgttccatggtgacggaccacctggcagtcaggccgttagaacggctggctgagaggataagatttgaaaaggataagatttagtctgcggaggtgacttaataacagcggctgaatgtacatagaaccaggaggaaatatgagcatcggtattgattttactgtaaaagtgctgcacaggaaaacctttatggaccgtgtgaaggaattggctgaggcagaggattataacattcatatatgggatgaggggctcagggtggagctctgacccatgggggatttgtatataagctgggaacaggatccggaaaatccagaacagtggaatgtaagagaaaagggagacgaaatagcatggagataaaggtgatagagggagcattttcggtctgcaggcttaaggagttgggacaggccgtgatagaggacgatctgtattttctgggcaggacagatgaggagatatccctggtgtgcaggactgaaagcgtgccccaggacactgctgcaagggaagatggatggagggcctttcggattcagggagaactggatttttctctgattggcatactggccggaatatcagctgtattagctgaaaataggattgggattttcgtggtatccacgtataatacagattatgttttgacaaaagcagatgattttgaacgggccctgggacttttggaaagccgtgggtatggtattgctaaatagatgcactggcaggatgggacaggtccggccggagatggatttaccgccacaggcctgttatggctatttccgaagaacaggtgcgttaatacgacggcagcctggaaaagatggagcgcctccggcaaagctgccgcatagttggccaaggccgggaaaatggatgtggcattagggaatgtccgaaataaaggaaggatatatgacatactgatgtcatgttttgtatggtaacatgacagaagatccgcagcagaatactatcagcggagcttggaaaggaatgggtgccatggcatacagtttaaaggaagtaacgatacgtacggataactcagaggagggaatggagcatatcggggagctttggcgccatattatggacggccgtctgcccattctctttgacagcgggcatcagttccgggcaggaatatcccctgtatccaggtacagcggttatgacggtgatgagacaggcagctacgacctgactgtcatggctgtcacaagtgacttttttactcaaatggatgaaaaggtgaaaatggggcagtaccggaaatatgatgcgtgggatgaaaacggcgacttgggcgcctgtacccggaaggcgtgggagacagtgtggagccagcagaaggcaggaatcatacacaggtgctttacagaggattatgagagcacggttccggctgagtatacaaaggacggaaaggcacattgttatctgtacattgcagtcagataagaagaggctgaggaaatggagttatattaaggggtattaagggcttgctgccagcaatggcggccggcctttttgttttcctttctgcctgcaacctccgtacaggtgggggtgaaattgcacaatggaaaatgctaaaataaggggaaatttgtcgaaataggttgactatgtaaaagggcctatttataataaaaaaatatggttttttacaaaaattttataatcatggaaagttaaggaatggatatggacagttgggcagagatggaagagcagatcctgaaagaactgaatcttcacaggatgaaggatgatgctgaggttttcagcagattggagcgttactccggttcagaggccggggaagcagccgtggattatctggttcaggagctggaagcagcggggattgaacatgaacggcattattatgagcttatgagaagcctgcctgtacaggcttctgttactgtaaagaaatcaggagagcctgatttcaccgtggaggcaatagctgctgtatacagcggtgaagcccatgggcttacaggagaactggcctgggatgagatgtgtgccaagggccaattgaacggcatggaacaggaggaacggttccggacatttaagggaaagattgtcctcacctatgatatcagttttcctttctattatgaagcggcgagggcaggagcactgggcattgtggccatatggcccaaggacattcatcaccacgacaccatgggcggtgtatggggaatgccgggaagcagggacagggatttgtacccttatctgccctatgtgcagatattggggcaggacggcctgaagctgattgagatggttaaggcgggcactgcagccgtgggaacagaagcagccaaaggtatggctgtgacagctcagatggatgtggccatggacaaccgcatcgtaaggtccagtatgccggtggccaccattccgggcaaaagtgagagctttgtgctcctgagcggccactacgattcctggtatgaggggatgacggacaacggggcagctaacgtgctgatgctggagacagccagggcgctggaaaagtttaaggacaggctgaaccgcaccgtggtgattgcctggtggtccggtcattcggacgggcgttactccggctccacctggttctgcgaccatcactatgagtatctgagaaagcactgcgtggcccacatcaacatggatatctgcggatgcaagggaagcaatgcagtccgtttcgatatgagcggtatggagggagaggcgtttaacgatgaattccttgcatcctataacagccgcaaaccccttgcgtacagggctctggaccgttccagcgaccagaccttctggggaaccatgacccctgtatccattgctccccagttttatatggatgacggacagacgccccagcccccaaagagcagcgatatcttaaggccagcggccatgccggcggcctttggggtgggcggtcccttttactggtggcataccagggaggataccctggataagatcggggacgatgtgctggcccgggactgtgagatagcggcaaggctggtgctgcgctacgccatggaaaagccccttcctattgatatgaatggtttcatgggggagatgcagtcctattttgaggcctttgcagaggaactggacccggacttcgatgtggctccggtactggcatccattgccctgacccgaaaatccgttgagaagctctccgatgccatccgggcatatccaaagcaggatgcggacagcatactcatccggacagcgggagaactggtgcgcttgaaatatacgtattccagcccctacggacatgactatgcagtggagcaccagccctatgcagtgttttcctccctgttaggagtgcacagggacaatacgcctgaggaccggtatctgatgtcgcagacggatttcatccgccagagaaacaggatgacaggccagctccatgaggtatgtgaggccattgaattacagctgtaccgctggcaggtacaatagcagatacaataatcactgagaaaggacacgtatcatgttacgttatattatcaaacgtattatatttgccattccggtgttaatcggagcaaccttcctggtgtttaccatcatggaccttgcaccgggcgacccggcacgtattatcctgggcagcaatgccacagaagcagccctggcctccctgagggattccatggggcttaatgacccgtttctggtgcgctacgggcggttcatacttgggcttctccacggggatttaggcacatcctaccgcaacggacaggcagtgttctccctgattatgggacgtctgggcaacaccgtggtgctggctacctcgggaatcgtattttccgttatcatcggcattccggtgggaattatatctgcaatcaagcagtattccgtcctggacaatattaccatgtttatcaccctgtttttgatggcagtgcccaccttctggtttgcgctgatccttgtcatcattttttcactgaacctgggctggctgccgtcttccggcatgcagcacggattcccggacaatcttatcagcctgattctgcctaccctgaccctgggatgcggatatgcggctctgattgcccgcaccacccgttcctcggttctggaggtggtgcgtcaggattacattgacatggccagggcaaaggggcttacggaaaacgcggttatctggaagcatatgttaaaaaatgccctgattcccattgtaactgtggtgggactgaacttcggaaccctgttaggcggctctgtgctgacggaatctattttttcctggcccggtgtaggacgttttgtggtggattccatttcctacaaggatacgcctgcggtgctgggaagcgtggtgacactggcaatcctgtttacaattgtgaacctgattgttgatcttctgtatgcgtttttggatccaaggattaaatctgaatatcaatcatcatggaagagggcaaagaaaaaatgagcacattaaagaaaacagagaacaatttgggacaggatgaaaaggtccgttccctgtggaagcagtcggtgattcagttcaagcacaaccggctggccgtggtgggcctggtcatcattgtcttattcatcgttacgattcttaccacgctggctgttgaccagattacaaactattctttttataacgagtatatcctaaagcaggacctttcgctgcgtctggcaaagcccagcctggcccatccctttggatgcgacgagtttggcagggatcttcttctgcgcattctgtggggaaccaagctttcatttgccatcggcgtggtggccattgcactgtccgtgatcatgggagcccccttcggcatgatagccgcgttttacgggggcaagaccgacaacgccatcatgcgcgtcatggatgtgctgctggcagtgccctacatgctgttggccatggccattgtggcggccctgggaaccagcacctttaacctgcttctggctctggccgtgtccggtattgcaaaatacgccagaatcgccagggcagcagtgcttacggtaaaggacagtgaatttgtggaggcggcccgggccgtgggcgcgtcggacggcaccattttgttccagtacatactgcccaatgcccttgccccgattctggtgcaggtatccctgggaatcggtgattccattctggcagttgcgggcctgtcctatctgggactgggcgtacagccgccccagcctgagtggggggcaatcctcaccactgcaaggacttatatgagggatgcatggcatatatccgtgtttccgggactgttcttaatcctggctgtcatagcctttaacctgtttggggacggcctgcgggatgcccttgatccaaagctgaaacgataagggggagcaaaacgttgagtcatatattagaaatcaaagatttacaggtacaataccatacagaggatgggaccgtgtacgcccttaaccacgttgacctggagctggacgatggtgagaccctgggtctcgtaggcgagacaggggcgggaaaaaccacgctggccaagagcatcatgcgcctgattcccgatcctcccggcaagatcgagggcggggtcattgaatttgagggcagggaccttttaaaggccagcggcgctgagatacgcgcggtcaggggcaaccagatatccatgattttccaggatcccatgtcatccctgaatcctgtggtcagggtaggggagcagatagcggaggtaatccgtgtccacgaaaaatgcaccaagaaggaagccgaagaaaaggccatggagatgttagagacagtgggcatcccggctgagagggcaggggatttcccacaccagttttcaggcggcatgaagcagagggtggtcatagccatagccctggcctgcaacccaaaggtgctcattgcggacgagcccacaacggcgctggacgtgaccatccaggcccaggtgctggagatgatgaggcgccttaaggataaataccatacggccacgctgctgatcacccacgatttaggggtggttgcccagatgtgtgagaaggtggccatcatatacgcgggggaggtagtggagagcggtgctgtcctggatatctataagcataccctgcatccctacaccgagggactgctgggagccattccccaggtacacctgcatgtacacaggctcagtcccattgacggcctgatgccggatcccatggcgcagaggacggggtgtccctttgcagaccggtgcaaatatgcatttgagcggtgccgcgtagagcatccgcggttcatagatgccgggaacggccacagagtgcgctgtttcaaggtagagaatgagttgaggaagggggctggggagtgatggaacacaagggactgttagaagtaagaaatcttaagaagtattttgatacaaaccgaggaccccttcaggctgtggacaacatatccttttccattgaaaagggcagaacactgggcgtggtaggggagtctggctgcggcaagtccaccctgggccgcaccatactgaggcttcaggagcccacatccggggaaatctggtttaatggggaggatattgtcaagtacgacaagaagcaggtaaaggcactgcggtccaagatgcagattattttccaggacccctattcttccctgaatccgcgtatgacggtgagccaggccatagaggcacccctggtgcttcagggcatttataagaaaaatgacagggaaggccttcagaaaaaggtcagggagatgatggatctggtaggtctggcataccgttttgccaactcctatccccatgagctggacggcgggcgcaggcagagaatcggtattgccagagccctggctctgaatccggaatttgttgtctgcgacgagccggtctcggccctggatgtgtccatacaggcccaggtactgaatctgatgcaggatcttcaggagcagatggggcttacatatctgttcatcacacatgacctttcggtggtaaagcatctttccgacgacattgtggttatgtatctgggacagctggtggagagggccaagccggatgaactgtttgaacatccgctgcatccctatacccaggcgctcctgtcagccattcccatcccggatccgaccattaagatggagcgggagatattaaacggggagcttagctcgcccatcaatatgggggatggatgcaggtttgcaaagcggtgtccaaaggcaaccccggaatgcacccgtcccatccgtgaggttgaggcttcgccgggacattttgtatcgtgtcatcttctctgcaaagaaaaccaggcagggagttgaatataatgaataatttcaggaggatatatgtatgaaaaaagcaattgccatgtgtctcattgcctgtatggtgatgacaggctgcggcggcagtaagggcggcgcaggagaaccacaggaaacagtggccggcagtgacggacagaacgtgaagatcaaggatgaaatcatattctgccagggcaatgacctgaccacactggatgccaccatcggacagcaggagagggcctattccatctccaacaacatctttgacccgctgtttacctatgattccgatatgaagatgcagccatgcctggccacggaatatgagtgggcggacgacaccaccctgaagcttaccctcagggaaggcgtgaaattccatgacggatccgatatgaacgcggaggacgtaaagtttaccctggaccttatcgaccagagaggggcgctgtttgtaggaaactatgacggatgtaccattgatgacgattatcatgtgacggttaagctgaaagctcctaaccctgctttcttaagcatactgaccctgccccaggcttccgtggtaccggcggagtatgacgaggcggccttcggagccaatccaatcggcacaggcccttacaaattaaaagaagctgtggagggcgattattataccctggagcggtttgatgattactggggcggtccggccaagacaaagcttctgaccatgaaaatcgtaccggaggcatcccagcgcaccatgatgttagagacaggcgaggtggatgtggcttatgaggttccgaacaatgatatctcccgtatccaggagaacaaggaccttcagattctcaccagcccatccatgaaaatcatacttatggagctgaactgcagttccgacggccctgtgggcaacccggatgtacgcaaggcagtggagtgcgccatcaacaagcagaccatcgtggattccctgctctacggatttggaacggtatccgacaacattatccctcagtccgcccaggattacagggaatacgagaccaacggatatgacccggaaaaggctaaatcccttctggcccaggctggttacagcgacggcatccagctgacactgtggacaaactccaaccagaccaacacagagattgcccaggtgcttcagagtcagctggctgaggtgggaatcaaccttaacattgtgacccaggatgacaacacctccttctcactgattgaggcgggcgaggactttgacctgatgctggatttctggcagactaatacaggacacgcggactatgtattcaacggaatgctgctgtccacttcggtcaacaacttctcccggtactataatccggaatttgacgagacatatgtaaagtatgcatccaccggcgagggcgaggaaagggaagctcttttgaagcagctttacgatgatatggttacggacaccccaattatcggcctttacagcgagacaaaggtgattgcagccacatcaaagctccagggactgatgctgagccagattggcgcgcatgagtaccagaatgcggtggtgacagaagactagggacacactctggtaccgggcttaccggtagttttgcggcgtagcaccgggagggcctggaggccatcatatgaccgggaggaacttttattcctcccggttttgcattaccagggagcgtacagggaggggatccgggaggagctgatacagctgtcccatggctttcaggtggagacgggaatggcaggacgccgggattgtccctaaaataaaaggatgttataataaatgaaatggccgtcaggccggtcagggggtgtcagtttgatgaagaagatgaaggtaaatctgcggattaagataatatacacatgtattatcgctgtatttgtcagtgttttccttatcatgcagtattccttcaaccgcagcaggaatctgctcatcacccaggaggcgggcatcatatcccaatatatgaaccgcaacgagctggcgcttacagaggtgacggattccatccgtaagctgtcggccgcatccagcaccaacaagcaggtggcgtcctatctgaaccagtcatgtgatggaaatatatattcttcggagaatgtgagccgtatccgggcagtggaggagacgctgaccttttaccggaatatattttttgattaccgtctccactatatcatcctgggagcggacagcacggtttacagcgtggcggacgggattgacaacagcagctattttggggagaagtttgcccagagcgtcaggcagcagccgtggtaccgggagtttctggagggaaaggaggtatccgggtggattgccccctgtatttacaatgacaagggggtgtttaaggagaggattgagtctgggaaggatgaggatttcatcttattcatccggcggattaaggattataattcccttaaattccttggggtgtcctttgtatcctttcccacggaaaacctggcacaggtgctgataccctatgacggggcggtgctggctctctttgataagggaaaccatctgatttacgccacggagcaaagcgatatactggatgatatatctgccggacggctttcagaggatttacaggaggaccaggattattttcattatacaaaggacggccgggagtacctggtgaaccatgtgaccatggccggtacaggatggcgtatggtgaacctggtacccctgtcccatatcacccaggcagtggacaagcttcacagcactgtaacctccctgacggtccttatggccctgggagcctgcatggtctgccttgccatgtatttctatgtcaacgcgcctcttaaccgtctgatccataaggtgagcgaagtcaatatcggagggactaaaatcgctgacatggaggatgcaaagggcagacagatgcctgtattcggaattgtggaggcagagctggagatcagcaggatggtggattatatagaaaagctctctgcccagaccatcaagcagaaggaaatagagcagaatctccgctatgagatgctccgggcccagataaatccccattttctctttaacacattaaatgtaatcaaatggtcttccatgatatccggggcaggcaatattgcggacatgattacctcccttggaatccttctggagagcaccatgaaccggagggaggaggaagtgcccctaaaggaagaaatacgtgtggtgaaggcgtgggtggaaatcaagaactggggacttaagaaccggattgaactggttacagatatccaacaggagctggaggaattcaaggtgattaaatttttccttcagccgttagtggaaaatgcggtgctgcacggtatgggggaggcaactcacggcaccatttgggtcacggctgaaccgtatggggagcgggtatgcgttacggtgcaggataacggagtgggaatggaacagggaaaactggatgagatactgaaggaaatggatgaaaacagtaaaaaacgccatgtaaccggcatcgggctgaccagcattcatgagctgatgaaagccaggtacgggccggattacgggctctatattgaatccaggataggatacggaaccaaggtttttgcggtatttccatataggagaggtagtgagacatgctgaaggtaatgattgtggatgatgaaatcatagtgagggtgggttttcagtcctgtattaactgggaggcctacggatgccaggtggtgtccacctgcgaatccggaggggacgcagtggagtatatgaaccgggatgtgcctgatatcgtgttcacggacatcatgatgcccggcatggacggaatccagctggtgaagtatataagtgagaaccacccggatacaaaggtggtggtattgagctgtgtggatgagatcgattatgtgaagaaggccattaagctgggggcagaggattatatacttaagctgtcctttacccaggatacactggtggagctcattacaagattaaagtccatgattgaggaggagcggaagaaggcgggcagaggcagtctggatatgagggtgcagtcctttaaccgggaggaggacttaaggacactgctgctgggaaatcagggacctggggacaatgaaatgctcctggaccggctgggatatacctacaatccctttgagacctaccaggcaggctgttttctggtggacgacgaaagaatgaaccggcccggcagcggtacggactcccatatcagaaagtatggacttttgaacattgtccgtgagtatcttgaaaatctgcctaaatcagatctggcctttaccggcgaacatgaaattgtggttctgttcaggagagaagggggggagagcccggcctgctttttcccggacaccctggatttgctcaaccatgccttaaagacccatttgaacctgaccctttccatggggatgggacaggagtgcttaagcaggatggatattccggcaggatttgcacaggccaggaggatggcggcactgcgcttttttgacggtccggccgcctttcactgtggcagggaggcagcagcagggcgccccttcatcgcaaaacggagcgtccagcgcaatatgcaggaggccatattcaggcaggatgccggggaggcgttccggctgattgacagctggtttgaggagatggcagggctccggtcctacgaccagattcaggccatacgccggggcgtggtggagacctgggtgtttatatcaggatattccattcctgagggagcggatatgcctgaatatgatgaaatatactccacaggcgatttttggggagccgagacgctggcagatttaaaaggatgttttaaggccgcggtgcagtcagtggtggattatctgatggccaacaagaacgccaatccggagattaccagattcctccagtatctggaggaccatgtggatgaaaatataagcctggaggaagcggccggatggtgtgccctgggaaagagccagttctgcatcctgtttaagaaggctgccggcgacacctttgtaaattattttaacgggcttaagatgaaaaaggcgtttactcttttgggcagttccaatatccaggtacaggaggcagccagccgtataggcatacatgatatctcctatttcagccgtctttttaaaaaatattacaatatgagtccaagcgacgttaggaaattgtgaaaatcatacaatagttaaaaagaatcatacaataattcaaataaaaaatagggattattttgggcggacgataataccaataatccctatttttttaaattccaaatcaggggcggaacatttatactatgcttacagtaaatgaaaacgtgtatagaaggagggtatttatgaaacgtaagttatgtctggctttaagcgcggtaatgctggcggggtcgctttctggctgttccggggggaccagcggactgccgggagatacgtccaaggcttcggaggctccggccggtaaggaagcagagggaacaaaaggggaatcggccgcaggggaggccggtgaaaagccctatgccgggacaacaatccgtgtcctgagcatgaccggacagatatcagatgcaattgaagcgtatctggatgattttgaggaggaaaccggcatcaaggtgaatctggaactgtacggggaagcccagcttcgtgagaagataaccacggaatttctggcaggctcctccaccattgacgcattcctcatgagcccgctgcaggatatggcggcttacagcaataacggatggattgaacctctggatgaatatctgaaggatccggattttgactgggatgatttttcgtcggcgcctatggagcagattaaaatcaagtctgacggcgccatcggagcactgccgctgtattcctctgtgcagctgatgttctaccggaaggatgtatttgaggaaaagggagtgaaggttcccacgaattacgatgagctgctggatgtatgcggcaaaatcaacgacccggctaataacttttacgcgattgcctgccgcggcgagaagatagcccttacctcccagttctcaccgttcctttacggatttggcggcgcttattttaaggacggaacatgcgcctttaacacaccggaaaatctggaagcagccaggttctatgggaagctgttaggtgattatgctccggaaggcatactgacagcaggatattcacagatgacccagctgtttaatgcggggcaggtaggcatgtgtgtggatgcaattgccctgtaccagaccctgattgatcccaatgagtcttccttctacgacaaggtgggagttgctcctattccggaaggtccggcaggacgccagtcctataagcaggttgtgtggggcgcatccatttattcaggctcaaagaacaaggaagctgcatgggaattcctcaaatatgcggcaggcaaagatattgccgccgacatcactccaaagggaatgcctaccttcagggcctctgtatgggaagatgagcgtgtgacagctgccatgccggaagattacatccaggcttacaatgaagagattcaggctgataccaccaaccagtacggacttccccgtatgaccgcggtatccgaggccagggacgccatgggcgaggctatcgtgtactccatcgagacaaagggagagggagcagatctggaaagcaagatgaatgcagcggcagaaaaggtggaccagctccttaaggatgcgggagagtatggcgcggattatccctacgaggattagagtatgtctgaaagcaacggaaggagcctgtaacaaggctcctttctaacaacagagagggatgtatatatgaacaattttgtcaacaaacatattaaatgggtcttttcccttcctgcccttatatttatgatggccatgatcgcggttcccattgcaatgaccttcctgttcagcctgaacgactggaacctgctgatgggaaacggaatgcgctttaactggggaaagaattatctggatgtgctggccagcagggaattttggcagtccttaggaatcacattttactatacggcaatcgccacggtggcggaaatgcttttgggccttgccatcgcccttgtgctgaataaggatttttggggcaagaacggggtaaaggcagtggtgctgctgccatacatgatggcgcctgtggcagtgggacttatgtggatgctgttttacgaaccatcctccggcctgctcaattacatcttcacaaccgtgggacttcccaggtctgcctttgtgtcggccaaacagactgttatccctgctattgcggcagtggagacgtggcagatgacgcccatggtagtgatcgtatgtctggcaggactgtcctctctgcccacagaccccatggaggccgccagggtggacggggcaacacctatccagacatttttccaggtaaccctgcctctgctcacccagaccctgttctccatcggtctgctgcggttcatagacgtattcaagtcctttgacctgatttatgccatgacaaagggaggaccggccaatgcctccaggacactgaacctgtttgcctatgaaacggcattttcctattacaaattcggcctttcctctacaatgcttatgatattgtttgtgattgtgctgctgctcagcgttttggtcatgaagatacagagaaagttggtggcgtattatggcggttaaaaaatacagggcaaagaaaattatatcaaagttattattcggaatcctggtgctggtcattgtcataccgattctgtttccgctgtatttcgtgttaatttcatcctttaagaatatggcccaggtatatatcatgcctcccaagctctttggattcaaaccgatactggataattacatttacatatttaagacacagcactatggaacctatatgatgaactccaccattgtggcagtggcgtcaacggccctgtccctgcttttgggagtgccggcagcctatgccatagccagatataaaatggggaaggccaatacggcaatcctgacagcacgccttctgcccaacatatccattctgctgccatactatttcatattttccaagctgcgcatgatagatacctacggtgtgctgattctcagccacatggtgctgtcacttccgctgattgtgtggattatggtgggttttttcagcgatttgcctcttgaactggaggaggcggccattgtggacggctgtaccagacagaaatgctttaaagatgttctgctgcccatcagcgcgccggggctggtgacctgctccaccctttcattcctgggctcctggaataacttccagtttgcccttatactcagcggtgaaaagacaaggacacttcctgtctcattgcagtatttcgtgtccggcgcggatattcgctggggacgtatgctggctgccaccattgtggttattgttcctaccatcattctgaccatgatactccagaagtacattgtgcagggtatgacggccggagcagtgaagggatagattaaggccaacggtcaggttatgtgagaatacaggacggaggaggaaaaggtggagataccggtactggtccatgggaagggaatctatgattccgatgacatgaagatgaaatacacgggaatgattctggaaggaagccggattaaggagatgggttcctttgaggaactgggtccggcatatcccggggccagggtcatggatttttcagactgctatatcctgccggggctggtcaatacccacgtacatctggagtttacgccctgccgggacacctatggcatctaccggagggaggacaggaaaacccgtctggccagggccgtggagcacgccgggacccttctgcgctcaggtgtgacaacggtccgggacgcaggaagctccatggagctgataggagctctgtggggcggggatgcaggcgcaaaaccggggacagagctgccgaggattcaggcagcgggtatgccccttaccccggacggaggccatctggcctttctgggaaaaacgtccaacggtacggagggattgatacaggctgtaaaagaacggaagtcagcgggctgcggctgcgtcaagctgattgtcagcggaggccagctcaccccgggctcggtacctgagcatgactcctacagcagggaagaaatacgtgcagcggtggaggcggcccatgagctgggactccccacggcagcccactgcctgacaaccagttcctatgtaaacgccatggaggccggggtggacagcgtggaacactgcgcctgtttcaggagaaaccccttcctgggacttttggaacggtgttatgagccggatgtgatggaagccttccgcggggaccatcggtattttatgattgggatatctaataattaccaccaactggaccaggtcagggaaggtgtgagaaaaccggatgagagagaagcattcctcctggaacaggaaaagcgggaatgtgaaatattcggccgcctggcggatttggggatgcgtcccctggtgggaacagacgcaggatgcggatataccttttttgacgaaacctggctggagatggagctgttatgcagcaggtgcgcccttacgccggaaaaggtgattcacgccgccaccctggagggcgccggggcattgggctggggggatttcttggggcggctggcccccgggtatgaggcggatttcatagctgcagaacagaatcctctccgggatataaaggcgctgcgtcatataaaacatgttgtgtgcaggggaaaaatcatagagtagggagaatggatatggaacacatgtatgaattaaagaacacagatacaatcatatcacccagcctcatatattatgaggagatcatcagggaaaatataaagaaggcaatacggacagcaggaagccccgaacggctgtggccccatgtaaaaagccacaaatccaaggatatggtgcggatgcagatggagtacggcattacaaagtttaaaacagccacagtggcagaggcggagatggccgcagaggcaggggcagaaaaggtaattctggcctatccgctgattggtcccaacatggaacgtttcgtgaaactggcaaaggcgtatccggatacggtattctacggtgtggaggatgacctggcccagtttgaggctctgtccggggtgtgcgtggaacacaatgctgtgctacccatgctggtggatgtaaatatgggaatgaaccgtaccggagtgcccattgaacggctggaggagctctaccgttctgcgtcctctcttccggggcttcgtctgtgcggaatgcactgctacgacggaaaccacaataataaggacgcagctgtaagacaggcccaagtggatgacacggataaaaaggtgtcggacatcatggaacgtctgaacggggatggaatctgctgcgagctggcagtggcaggcggtaccccttcctttccttgccatgcgggcgctacacggtggtatctgtccccgggcactgcatttataacagatgcagggtattacatgaacctgccggatttggattttatacctggagctgccgtgatgaccagggtcatcagccatcccgccaagggcgtgtttaccacggacctgggctataaggctattgcttcggaccccgcgggacagcggggctatatcgtaggtctggaggatgcagtgcccattatacacagcgaggaacactgggcattccggctggaggatgaaagcaggataccggccataggaagctgcctctatgtgattccaacccatatatgtcccaccactgcattgtatccggaaattctggtggcaaaggaagggcaggtggcggacagatggcaggtgactgcgagaaaccgcaggattacatactgattgtaccggaacaaggaggtattttgtgaactgtattgaactgttgagagagctgatagggtttgacaccgttaatcctcccggaaatgaaaagccggcagcccggtatctggccggaatcctggagcctatggggtttaagtgcgaagtgcaggatttaggcggcagccgggcaaatctgattgctgtgctggacgggggagacgggccggagcttatgctgaacggacatctggatgtggtgccggccgtgggagagtgggacagcagtcccttttccatggaagaaaaggatggaaagctttacggcaggggaacctgcgacatgaaaggcgggatagctgccatgtgcgaagccgccatgcgctgcgccgccaggaaagagcccatgaaggggaaactgaagcttttatttgtggcggatgaggagtgctccaatctgggtacactgagttatctaaagacccatgagagaagcgattatgccatcataggagagcccacccggctggaggtggcggttgcccaccgtggagtatccagggattatattgatgtaaagggagcccccaggcatgcagccctcccggccggggaggaggacgctgtgatgaaggcatgcagggcagtccgggcggtaaaggatatgaatgaaacgctgcgccatatcacacacccggtcctcccgcctcccagtattgcggttaccatgatggagggatatgagaaggacaatgtggtgccgggaaatgtacgccttctcctggacttcaggattcacccgggtatggaccatgaacaggtggggcagtttttggacaaaggctttgaacaggccggcattgacggcttccagaggacgctgcatttttatatgcccggcggggagattccacaggatgaccggtttgtgaagctgtgccttgaggaacgggaacgccagtttggaatcaaatcagatccacagccctttgacgcatcctgtgaacagtgtttcctggcaagggagggaatccagaccgttatctgcggtcccggagatattgcccaggcccatacagtgggggaatttacctgggaaaagcaggtgcgggatgccgtgagcctgtatgagagaatcatagacagggttttgtataaaacaaattacatataaattaaggagagatgaagatgagagacgtatacgaggttttaaaagaaaaaggaatcactttgccgcagccgcctgccaagggaggcgtttatacaccggtacaggagctgggggagaaatttctctattgctcaggctgcggtccggatctgggaaacggcaatacggtagtgggcaaactgggaaaggacctgacagtggaggatggccagaaagcggcatataactgcgtgctgaacctgctggcaaacttaaatgaaaagaccggggatttgaaccgaatcaagagattcgtgaaggttctggcttttgtgaacagtgcggatgactttgggatgcagccccaggtggttaacgggggctccaatctgattgccgggctgttcggtgaggaagcaggacttccggcgcgttctgccattggaaccaacgcccttccggggggaatcgcttgtgagattgaggttctggtggagcttaaatagaagcgggaacatataaacaggaatcaagagagtggacgggacggacgtaaatatggattcgtacccgtccgttttctgtctgtttttaaattattcttggttctgtccatttctttgattccttatgtcttgtaaaagcctgccccctgctatataatggatagcataaaaagtcaggacatcccaaaaaggggagctgacaacaggatacggaggaaaatgcaatgaaaatggtaatcatcgagccgctgggagtggaagaaggaaagcttttagctatggcaaaggagtcccttggggacagggtggagattgtgtattacaacacaaagacaacggacaccgcagagctgatagagaggggaaaggatgctgaaatcattgtggtatccaatctgcctctgaatgcccaggtcatagaaggatgcagaaacttaaagcttctggctgtggcatttacaggcgtggaccacatcgccatggatgtgtgcagaaagaacggtgtcatggtatgcaactgcgccggatattccacctgcgctgtggcggatctggtgttcggcatgttaatcagcctgtacagaaacgtgattccctgcgacaaggtctgccgggaggagggcaccaaggacggactggtaggatttgaactggaaggcaagacgtttggcgtggtgggaaccggggccatcggccttcgtgtggcagccatagcccaggcatttggatgcagggtattggcttacagcaggacagccaaggatgtgccaggcgtgcgctatgtggatctggagacactgctggcagaaagcgacgtggtttccctccacacccctcttactgaagagaccaggggactgatgaatgagaagcgcatcggattgatgaagaagaacgcagtgctcatcaacacggccagagggcctgtggtggacagcgatgcgctggccggggccctgaaggagggcaggattgcaggcgcctgcattgatgtgtttgaaaacgagcctccggtcagaaaggaccacccgctgttttcggcgcccaacaccattgtgacgccacatgtggcatttgccaccaaggaagccctggtgaaacgggctgttattgtgtttgacaatgtggtaaactatctggatggaactccccgaaatgtgattgggtgatatttgtatgaaaaaagtcaggaaacatattatattttccggcagggtacagggggtgggcttcaggtacacctcctgttacctggcccgccccctgggccttaccgggtgggtgaagaatctgtggaacggcgatgtggagatggaggtccagggagacccgctggcgattgggcgattcttaaggaatctggagcagggaaggttcatacacattgaacatatggaagcagaagacattccggtgattgaagagggcagtttcagggaaatatattaacagcagtggaggttttatgtttgggataattgtggcaggaaaacgggtatatgataaatttgctgaggatgagatgacggtctacgcggcccaggtctcattttttatcatactctccgtggtgccctttatcatgctgctgctgacagcggtccagatgattcccagcatcagcaacgccaggttcatggaactgattgtgggcctggtgccggtggattacaagtccctggccttccgggtggtcaatgacctgtccttaaaatccccggcaaccatgatttccgtcacagccgtcacagccctgtggtccgcgggccgcggcatgttcagcgtggccaggggattaaaccgtgtgaacggccacggggaaaagcgctggtatgtgattaacaggctgatttgttcaggatacaccattgtgtttatcctggtgtgcattctgtccctgggcctgctggtgttcggcaatatgattcaggcgtttatggtgagccggtttcccatcatagcagacgtgaccacccacatcatcaatttcagggctctgtgggcgttaatgatactgattatatttttcctgggaatctatacctttgtgccggataagagtctgaagctcagggaccagcttccgggagccgtgttctccaccgttggatggatggccttctcctttgccttttccctgtatttcagccatataggggggaagaattactcctatatgtacggaagccttaccgccattgtgctgctgcttctgtggctttatttctgcatgtgcatcctgttcttcggcgcggaaatcaactatttctggaaggaactgtttcccggggaaacgaaggaataaccggattatgcctgctcttggataaggggcgggctgtttttgtttttttggtggaacagtgaggcggttctgtcaggaaaggggaggctggcctgtaaagtaatccagaaactccttcatcacagccgacaggggtccgtttttccggcagaccagcgtaatccggctggtgaagtcacgggtatccagaggcttcatgagaatgtccggccggacgcacctggcgatagaggccggcaccaccgcaacgccgctgcctgtctccgcccatgtaaggctggtccgggcatcgtcgttgatgcacagataatccgggcagtccggtgcaaacaggcggtttaacaccccttcccatctgcggtacacaaccaggggacaggagcacagttccttaagggaaatagtatccgccccgggacggggaaagaagcagcgttcacccacagctatcatgatgtccccggacagataaaagcagtcatagggttcctcgggaaaagggctgcgcacaatggcagcctcgatgattccggtattcagcttgtccaggagctgatatgtattaccctcgtagatgcggaatttcaccccgggatgctcctggcggaaggcggcaatctttcctatgatgggttcggtttccacggaagaaatcatacccaggcgcagggagcccagaagtccctgccccatctgttccagttcctccagcacagcccctgtcatgtccaggatgccctgggcccgttcgtagaggaccttgcccgcatctgtcagcaggatgcttcgtgagccgcgctggaacagggtcagccccagttcctcctccaaaagcttcatctgggtgctgaggggaggctgggaaatgtggagcgccttggctgccgccgatatgctcccctcattgacaatggcagtaaaatattccatctgtttcagattcaagatcggaatcctcctattcgttaaacgtatatcatatatataaaaacaatattttatatatggttgattctatgttataataccaggcagtgtgaaaaaatacaatggattccggcagaggagtgaaagacaattatgaaacgattgttcagctatatgaaggattacaagctagaaagcatactgggaccgctgtttaagatgctggaggccagctttgagctgtttgtgcccctggtggtggcccgtatggtggacgtgggcatacggggcagggacagcggatatattcttaaaatgggaggcgttctggtgctgctggccctgattggcctggcatgctccctgacagcccagtattttgccgccaaggcagccacgggggcagccacctccctgcgcaatgatttgttttcccatataggaagattgtcctacacagagatagacacagtgggcacgtccacactgataacaaggatgaccagcgacatcaaccaggtgcagagcggcatcaacatgacgctgcgccttctgctccgctcaccctttgtagtatttggcgccatggttatggcctttaccgtggatgtgcgctcggcctttgttttcgtggtcaccataccggtgctctgcgtggtggtgttcggcatcatggcagtcagcatgccgctctataaatccgtgcagagacagctggacaaggtgctgttaaccaccagggaaaacctgctgggggtccgtgtcatccgcgcctttaacagacagaaaagtgagacggagaaatttgaccgggaaaacggaaacctggtcaggatgcaggtgtttgtgggaaagatatccgccctgttaaaccctgtgacctatgtcattataaacatagccgtggtggccgtcatatgggtgggagcggaacaggcggacagcggtatcattacccagggaaaggtgattgccctggtaaattacatgtcccagattctggtagagctcataaagatggcaaacctgattatcattatatccaaggcagttgcctgcatgaaccgggtggacagcatatttaaggtggagagcagcattgaggacaaggggaggcacggctcccggaaacccggttctcagaattccggttctcagaattccggttctcagaatcccggcccgcagaattccggcccgcagaatcccgcattacggattcccaaggtagagtttaaagatatggaattcgtgtatgcgggggcaaaggagccggccttaaaggatatttccttttgtgccatggcaggacagaccataggcgtcataggcggaaccggatccggtaaatccaccctggtgaacctgattccccgattttacgatgccgcctcagggcaggtcctggtggacgggacagatgtaaaggaatattctctggatgagctgcgggacaaaaccggagtggtgccgcagaaatccgtactgtttaagggaacgctgcgggacaatatgcgctggggaaaacaggacgcgtcggatgaggaaatctaccgggctctggatacggcccaggcccgggagtttgtggattccaagggagagggactggatctatacattgaccagggaggccataacctctcaggaggacagcgccaaaggctgaccatagccagggccctggtgaggaggccggaaatcctgattatggacgacagcgcttcggccctggactttgccacggatgccaggctgagaaaggctatccgggagaacaccggggatatgaccgtattcattgtatcacagcgggccactaccattaagagcgctgacaccatcctggtgctggacgagggtcgtctggcaggcatgggcacccataaggagcttcttaaggactgccaggtatacagggagatttgtctgtcacagctttcaaaggaggaggtggaacgggatgagcagtaagaagaatgcattggacaagaacaggagcagggagaccctgaaacggatccttaaatatatcagccaatacaagtggagcgtcatcctgtctctgtttctggcccttatcacagtggcccttactctgtatgtgccgattctgacaggccgtgccgtggaccgcattgtctcggccggacatgtggattttgcagggttaaagggaatccttataacaatattgggagcagtggctgttacgtccgtatcccaatggcttatgaaccatatcaacaatatcatcacctaccgggttgtgaaggatatccggaccagggccttcaaccagctggaggtgatgcccctaagctatatagatgtgcacccatccggagatatcataagccggattatcgcggacatagaccagttttcagaaggcctactcatgggatttacccagctgtttacaggcgttctgaccatagcgggaacgctgctgttcatgctttccatccagcccgccatcacggctgtggtggtggtgctgacgcccatatccctgtttgtggccagctttatcgctaaaaagacgtttgtcatgttccggaagcagtcagagaccaggggagagctgacctccctgaccgatgagatgctgggcaatatgaaggtggtccaggccttcggacaccaggaagaggcacagaagcagtttgaggagattaatgaacgtctggccggatacagcctgagggcgacctttttctcatccattaccaatccggccacccgctttgttaacagcctggtctatgctgccgtgggcatcacgggagcctatggggctatccgggggctcatcaccgtgggacagctgaccagtttcctcagctacgccaaccagtacacaaagccctttaatgagatatcaggggtggtgacagagctgcagaatgctctggcgtccgctgcccgggtgtttgagctgattgatgagaaaactatgatagaggacagggaggacgcaacggtactgcgcggagcaaagggcagtgtggatctggagcaggtctgcttctcctacacgcctgagaaaaagctgattgaggattttaacctgtcggtacagcccggacagagggttgccatcgtgggacctaccggctgcggcaagactaccatcatcaacctgctgatgcgtttttacgacgtggattccggagctatcaaggtggagggaaccgacatccgcgatgtgaccagggagagcctgcggaccagctacggcatggtgctgcaggacacatggcttaaatcaggcaccatccgggacaatatagcctacggccatccaaatgccactgaggaagagattatccaggcagcaaaacaggcccatgcccatggatttatcatgcggatgccggatggatacgccactgttatcagtgaggacggagggaacctgtcccagggacagaaacagcttctctgtattgccagggttatgctgtgccttcctcccatgctcatactggacgaggccacatcttccattgacaccaggacagagattaaggtgcagaaggcctttgcgcagatgatggagggcagaaccagcttcatagtggcccacagattgtccaccatccgggaggcagacgtgattctggtcatgcgggacggtaaaattgtggaaaagggtaagcatgaggagcttctggggatgcatggtttttacgcggatatttacaatgcgcagtttgccagaggataggacgcaggtaattatgtaagagaagggggcgggcatatgggagacggacagatgatgtctgaattgtatcaggagaatatgaagcggcagaacaaaaacaggaggaggaaggatgtggcggcctttctctgcatcctgctgggaagcctgattgtagctgtcaacatgaatacctttgtggagcagggagagctggtgccgggaggctttaccggactggccaagctgatccagagaatcggactcagtttttatgatgtccagatatcatttacattactgaatgtactttttaatgcagttccggccgtgttcgcataccggctggtgggtaagaaatttacaatcctgtcctgtatctgcctgctgaccgtgtcaatcctggtggatgagctgcctgtggttcccatcaccggggatatcctgctgatatcagtcttcggaggcatcataaacggcctggggatgagcctggttctcaacagcagggcctgcggcggcggaacggactttatcgccatgtctctgtcggcaaaatacaaggtatccaccttcaactacatgcttttgttcagtgcggtcatcatactgatatcgggaactattttcggaatggataaggcgctgtactccattattttccagttctgcaatacccaggttatcaataccttttataagaaatataagaaaaagacgcttcttattgtgacagataacccggcggccgtgtccgcggacctgctggagctgaccaaccacagcagcacgattttaaagggcttcggctcctactcagccaataaaaaatacctgatttataccgtgctctcggacagtgatgtgagaaaaatgaagaagcggatacgggaacagtacccggatacatttgtaaacgttatcaattccagcgatgtggtggggaatttttacatacagcccctggagtgatccgcccttttgggcgggtctgcatcttaatggaatctttagctgacatttccccaatctttatgtataatagtctttgaaacaaatcaatctatgtaatatgaaggaggaatcatttaccatggaatctgaccctgaagcggccaatattttattccaaatcacaatcttagttattctgacattaatcaatgcattctttgcaggctccgagatggcagtggtatctgttaacaagaacaagatacaccgcctgtccgagcagggaaacaaaaacgcagcgctcatagagcgcctgatgaaggactcaacggtgttcctgtccaccatccaggtggccatcactctggcaggctttttctccagtgcatcggcggctaccggtatcgcccaggtgctggcggtacggatggcgcagtggaacctgccctacagccagaccctggcaggcgttgtggtgaccatcatcctggcttattttaacctggtgtttggtgagctggtgcccaagcggattgccctgcagaaagcggaggccttcagcctgttctgcgtacgtcccatttattatatatcacgtatcatgaatccctttataaaactgctctctctgtccaccagcggctttctgaagctgatcggcatgcacaatgaaaacctggagacagatgtgtccgaggaagaaatcaagtccatgctggaaaccggaagcgaggcaggtgtgtttaatgacattgagaaggagatgataacgtccatattttcctttgacgacaagaaggccaaggaagtgatggtgcccagacaggatatggtggcgctggatatcaatgagccgctggaagaatttctggatgagattctggaatccatgcactccaagattcctgtatacgaaggggagattgacaacatcataggcgttctgtccacaaaggcactgaccattgaggccagaaggacttcctttgacaagctggatgtccgcacccttttaaagccggcctattttgtgccggagaaccgcaggaccgacgccctgttccgggagatgcaggcaaataaaatcaaactggccattctgatcgacgaatacggcggcgtgtccggtatggtgactctggaggatcttatcgaggaaatcgttggtgatattcatgaggaatacgaggaggaggagccggagcttacagagctggagccccataaggtctaccgggtgtcgggcggcattaccctgtttgatttgaaggaggagatgcacctgcatatggacagctcctgtgataccctgtccggatacttaatggaacagctggggtatataccgtcccgggaacagctgcccctgacagtggttacaccggaagctgattatgagatattggaagtggaagacagagtgatagaatgggtgaagctgacccttaaggagacaaagaaagaacaggaagaatgacgtacagggcatggtacaaaggagggaaagtaaatgagttttctgttggaaggcattacggcggtaacctggcagcaggcagtcatgtatgtggtgggaattatcctgatttggctggcggttaagaaggaatatgaaccatcccttcttctgcccctgggttttggcgccatactggtcaacctgccgtattccggtgtggtggaccagatggtacagggaaaggtacctgcggccggaatcatagaatggctgttcaaaaccggaatcgaggcttcggaggccatgccaatcctgctttttatcggaattggcgctatgattgattttggaccattgctgagccagccggtactgttcctgttcggggcagcggcccagtttggaatctttgcagctatcctcattgcgtgtcttatgggctttgatctgagggatgccgcctccatcggcatcattggagctgcggacggacctacctccatcctggtatcccaggttctggggtccaggtacatcggccccattgcggtggccgcctattcctatatggccctggttcccattatccagccctttgccatacgtctggtgaccaccagaaaggagcgctgtattcatatggagtacaatcccaagagtgtgaataaacagctgcgaatcgcgtttcccattgccgtgaccatcatagtgggcctgatatcaccgcagtccgtggccctggtgggctttcttatgttcggaaacctgcttcgggaatgcggcgtcctgggaagcctgagccagacggcccagaacgagtttgccaatataatcacactgctcctgggcatcaccatctcgttcagcatgagagcagagcagtttgtgaacccggctacattgatgattatggttctgggactggtggcctttgtattcgacaccatcggcggcgtgctttttgccaagctgattaatgtattcctcaagatggcgggtaagaaaccggtgaaccccatgattgggggctgcggcatatccgcattccccatgtcctccagggtggtgcagaggatggctgccagggaggagccgggtaatatcatactgatgcaggctgccggcaccaatgtatcgggccaggtggcatcggttattgccggaggactggttatcagcatcgtgtcccagtatctgtagggcggaagaatcgaagtttcagacaggctctggagtcagcagcaaaggaggaagcgtatgaatatggaacacgtagggattgccctggaaattatgggaaaaggtatgggcggaatctttgcggctattatcatcatcatggctgcggtaatgatattgggccgtattacgaaggaccgtaaggaccataaggacggtaaagaataggagtccatgagatgagaataaacaggaaggggagtacggctggtgtaaagcgtgctccccttcctgtttagttgttagtagtggaagaacttcctggtccccaattaggggaatccggggccctgtgacggacagacggatgcctgtgaaggtcctgcgctggatgaatccggtccggaaggtgagaaagagatgggttccgaagagagggccgatcatgggaaggccccagatgcagttgttgatgccttccacaatgctgcttaccaattgtataatgatacctcgtttctccgcagccgcagttttttgttagggatacggcttttgtgttaataatatcaattaatctgccacaaaaaatgaaaaaagaaagaaaatacggttttatgtgttgaaataggtattaaatactaaaaaatacggttttaattgataacactaaaaaatatattgaaaaatcataaacaggctgtacgcatttactgcggtggaaaaaaagaagtataataattacattactgatgtgtgcagacaggttcggaatatgcagtacgaaaattcagagtggaaacatgcctgcatacatatccggcaaggagggtatatgagaaaaagcatgtcagataactacccggcgcagccttaaggcagacagccattgtgtcgggactggaaataccggctgtcgtttttagggctgcagcgtatccatggaacaagtgatgaagatggaaggagcagccgatatgaagacagaggaattaagaaagatatggaaagccgaggaggctttggcacacatccacgggtgggatttttcacacattgacagcaggtacagggaggaaggaagcctgccctgggattacaggaaaattatcctgtcccatcttggggacagggattatcttttggacatggacacagggggaggcgaattcctgctctcactgggccatccatactccagaaccagcgccacagaggcatatcctcccaatgcagagctgtgccggaggcttctggcgcccctgggaattgatttcagggaggcgccggggaatcagacgctgccctttgcggacagctgttttgacatggtaataaatcgtcatggaaattatgatgcgggggaagtgaaccgtatcctgaaaccgggcggcattttcataacccagcaggtgggggaggacaatgacagggaattggtggagctgcttttgcccggtacgccaaaacctttcccgggaatgaatctgaaggagcagtccaaaaagcttaaggagtccgggtttgatattctggagcaaggtgaagccttctgtcccatacgcttttttgacgtaggggcgcttgtatggtttgccaaaatcattgagtgggaattccccggcttctgtgtggatggctgtctggacagactggctgccgcccagggccttttggagtccgggggctccattgaggggaccatccaccgctatatgatgactgccaggaagagggaacccgtgtatttggaacccatgtattaagggaacgctcgcattaggggaacactcacattaagggaacgctcgcatcaagggaacgctcaaattaagatacggcggtttctgaccacaacttcctggcggccagggaaatcaccgccatggcaatgcaggtgaaaagggcaggaaggtaaatccttgccgggaaggtctggaagataaatccgcagaccaattggcccaggggagccgcgcactgtgacactgccgtgataatggccatcacctttccaagattttcgttgggagtctccttctggacctttgtgataacgaagatggaaatgatggtcataatcatggcaatggggacagcgcaggccaggaacatcagataggacggataaaaaccgcggctgatccatgcaggggttacggacagtgccatgggaaggaacagaagggcgatggctgccagaaggcggtgcaggttttccatgcgcatctttttagcggcagcgcccatggacagggcgcctaatatagtagccagattgatggttcccatgccgattccgtacatggcgtccgtgcttttcatggctgtccttaaaatgacaggccctcccaccacaaaaaacggggtcagaaccagattcagcagggaagccagaatcatggagcgcagtatgagaggatttcggccgacataggaaaagccttcctttaagtcggccgcaatggtgggaataacgggcatggtgaattcgcgtttgcggaaaggaatatggatgaacagctccagtacagcggaacagataaatgcggttccgctgacgcacaccagggctttgaccccgaatatgccgtagaacattccgccaatcagcggggccgccacattggagagggcctggaccccgtttacaaggccgtttgctccctccagatgttcctccttcaccaaaaggggaatgctggccgtcaccgccggtccatacatggaactgatgacagagagcagtatcaggacagcgcctgtaagaaagatggaagtcccccccagacggaggcttacatagtacagagatatgattataccgctggtaaagtcgaagagcaccatcagattgcgcctgttaaaacggtcggcaacagctccgcctacaggggaaatcagaagaggaatattggagaatgcatacagggcggcgtagatgtccgcccttcccgtaatgtccagtacatagagggacagggcaaaccgcagcagggcagatcccagtatggatataatctgcccgattaccatgaggcggaaatccctgtttcccgatatgggactatttgccatcattcatccctccgtgattctgattcctgtaaaatacatccgcttcccgcggccaaaatctgtttcatgggttcaaaggttcctttttcagcgcccagtacagcttccatggcttctatgaatccgtttatcttttgttccatctcacaaggtgtccatgtaaacatagaggaatcaaacaatatctgcccggaaaccaacagtatctgcatggcttccagtggatgctctgtggagaacaggcgctccttcactccctgggaagcgatctcgcccaggatgggggagagggccagaatcgagcgcacaatgcttttttcgtgcatcagggcattggccggcagatggaactcctcaatcatcctgtctttagggccatctgtccggggctgtccggcagctatgatccggcatattttccggaccggtgatatactcttatccatggctatcagccgggccttttgtacgtcctgttcaatgaaacgttctatgatggcatccatcacctcttccttggatttaaaataataataaaaagtaccctttgcaatacctacctgattcaagatatcaataatggtggtttttgagtaccctttttctgtaataagcgtctcagcggcgtccagaatttcatttctccgttcgtcagcttccttaataatacgtgtcatggtttgccctcctatcttatagaccgaccgtcggtctataagatatcatacatgatatgaagggcaatgtcaatgggatttgagagaaagagctgctccgggagaaatgtggaattggaagtacggctgaaaaccttgtgttgaaaggcgtcttgtttatttactccgttaccggctgcccatacgaattttaatggcagctgggttgcttcaataaattaacggcaacagggaggtgtctggtgtatctacagactgaccgagaaaagcccgtggctgttacagcagatatacagcactccgtgaccagacctggggaaacgtacctgggctgcctgttccggatatagtttcatcaaaagcactctgtcatagacggcatatgccatgaatgtgatatagtgctgcttttccatatcatgttccagagtgatgtaataatcgccctccactgcttttgcagacacgctgtgggaaaggtccgcgggcctggctttcagggcattcaatttcctgccgcagcaggagatttccgccatgcctgtgctggatattacatttccgcagacagggcatacatagaatttgattcgtttcatatttcctccatcttttttattgggctccaaatcgcccaacagtattttttcaatattaactcctaaaatatcagaaagctcccgcagaagggatacgtcggggcatccggcgccgcgttcccatttggaaatagtcctgtcgctgatgttcatggcattggccagggccttctgggtcattcctttttctgttctcagggtataaatcagatttcctactttgctgcaatccatgtttcttcacctccttgtctatcatagcccatatgggggataaatacaacaaacgctccgtggagtccgtggaggcagcggagccggggatactgaagaggggaggatggaatgcccggttgaaggaaaggaggtgatggaagatggtgagaaggagaacgagggagaaagaaggaaaatgagggcgaaagaaggtgaaggaggaagaataaggaggaagaataaggagaaaaagaaaaaaagaaaaaagaagaaaccggcatcatccatggctgcagtgtgacggacgacgccggtttttcattgtcatatgaatagaaagcttaagatatataaaacttgtgtaaatgattttaattacagttgcaaagcaacggctgtttatacacgcctatacattaaagcggaagagcacaacatccccgtccctcatgacatattccttgccctcggaacgtaccaggcctttttccttggctgcattcatgctgccgcaggccatcaggtcgtcgtagttgactacttcggcgcggatgaatccacgttcaaagtcgctgtgaatctttccggctgcctggggtgccttggtgcccaccttgatagtccatgcacggctctcctgggggcctgctgtcaggtagctcataaggcccaggatgcggtagctggctgcaatcagtttctccagaccggactctgtaaggccaaggtcgtctaagaacatctttttctcgtcgtcatccagctcagcgatttcctgttcaatctcagcgcagataacgaatacctcacagttgttctcgccggcaaagccgcggactgcctggacatactggttgtccgcaccgtcgtttgcaaggtcatcctcagctacattggcggcaaagatgacgggtttccatgtaagaaggttcagggtattgatgaactccatggcatcatcgtcgtccggctcaaagctgcgggccagctttccgtcttccaggtgggctttgatggcttttaacagctccacttcctttgccagttccttgttgttgaacgcacccttggactgcttggcaatgcggcgctccaagatttcaatgtcggagaaaatcagctccagattaatggtctcaatgtcgcggatagggtcaatgctgccgtccacgtgaatgacattggggtcgtcaaaacagcgtactacatgaacaatggcgtccacttcacggatgttggacaggaactggttgcccagaccttcacctttggaggctccctttaccagacctgcaatgtccacgaactcgatgacggcaggggtggttttttctgaattgtacatggcggtaagtttgtccaggcggacatcgggaaccggaaccacgcctacgttggggtcaatggtacagaacgggtagttggctgattccgcgcctgcctttgtcaaagaattgaagagggtactcttgccgacgttggggagtcctacgatacctaatttcatatgattaccttcctatctgtatgtgatatatgatggttcaaatacgccctggctcctggcgggggcgttctgattcaattaaagctttattatcatatcataaaaagaggggaaattaaaggggaaaatgtgcgtggggggagatgggagggatggtacgcggacggggaaggggatcgggaaaatgaacgggcggg

SEQ ID NO: 3201 - DNA, 175668 bp, Unknown
  gut microbiota DNA sequence
gaattgtcccatcccaggcatttagttgcatttactgaaaaaagaattgaggttatgaagcaggaccatcttaagatacttaaatatattaaggccaggagctattccagagcagctaaggcattggaaaagcatcataataacagatactatggtttcatggaagaatatatgaaaatgataattaaatagaatttatgtttcctgaataaggggggactgcgcagactgctgtgtggtccctttttttgttgctgctttaacgcaggatgaaagaatgtctatgtaaaaaaatagctaattaaaaaacataataaaaacaaaatatgtacaattaaatacaattagtattgacattgtatttaatgggtagtatactttttataaaagatgggaggaaaaacatatgattattgacgtgcatgctcattatatcccggcttccttagctgacaacgaaaagtttagcgatcttttttatgtaaaagaagatacctttggaaaaacaatgtttataaaaaacagggagcttagaccgtttaacccaggacttatttatcttgatgaacagattgctgatatggataaagccggcatagatatgagatttatttcgcttcctccgtttgcattaaactatgaggactgccgatgcaaggattggacccgggaatccaacaaagcgctgtctgaggatgcgtctttacacaggaacaggttcaggtatctggccacgctgcctatggcagatatggaaggcacaatcagggagattgaccgtgtaatcaatgacccactgtgtgctggtattgagatagccactaatattgccggaatggaattagacgacgcgtatttggaaccattttggaagaaggcggctgaatatgagatttttgtgctcctgcaccctcattatacaattaaatcggcaaggctggaaagatatcacctgagaaacctgatgggaaatccgttggacacaaccattgcggcctttgccctaatgacaggggatgtggccagcaaatatccaggtgtaaagatatgcttttctcattccggaggatatacaccatatgccattgccagatttgaacatgccaggaaggtgagaaaggaatttgaaggagtccaaaaaagctacgaggaatgctgcaggagcttttactatgacacgattctgcacgatgccgagacactgcaatttgtggaatcaaaggtgacttcctcacatctccttatgggaacggactacccgttcgatatgggtgacgaggaacctgttcacacagtatcatccatgaagatacccagagagaaaatctccgacatattagggggaaatattgagcgtctgattggagacggtatttagttatttctttataaacaaccagtaaaaagaaattgggaggggacaagatgaaaagcagcatctgcgaatatgtaaatgcacatcatacagatattctaagcacatttaatgagcttcactctatgccggaaccggcactccgcgaggtacgcaccgctgattacttaaaaacccagttaaagcaggccggatttgacgtaaagggggattttgcgaagacggcagtgctgggtatccgcgataccggaatagacggaccggtcgtcggcataagagcagatatggatgcgctctgctatgagaaggaaggaaagacaatatatatccattcatgcggacatgatgctaactgtacggctgttctctgggcggccaaggcgttgctggaaacagggcagttaaaggccggaagcctgaaggtgctgtttcagcccgcagaggaaacactgcagggagcagaggcagttatagaatcgagggtattggagggcactcaatatctggtaagcacacatctgaggccccaggaggaactgcccatgggtcaggtttcgccggcagttttacacggggcatccggacatatcagggtgaagatatacggtcatgaagctcacggagcaaagcctcatcagggagtcaatgcaattctgaccgcatctgctgtcataggcacggtgaatgcgctgccatttaatccttcggtacctcattccataaaacctacaaaaatcagcagtggctcaaatccctttaacattatcccgaactacgctgaaatcatgtttgatatccgggcgcagacaaacgaggtgatgaagcaaataagggaaagccttacaaaggctgctgttacaagcgcagagtcaatgggggcaaaggccttggcagagtggctgggaggagtgccggcagcaagcaggtgtgacgaactgatagaaattgcctcggaagccatcagagagtctctgggggaggatgccctggggcctgtaatcattacacccggaggtgaggatttccataattatccacttgcaatttcaggactcaggactacagtattaggaataggagccgggttgaaaccgggacttcacatgtctgatatgacctttgatacaaatgcggtttttaacgctgtaactgctatcgggtccacggtagtcaatatatataagtctaatttgtaaatgaaacaaatggaggaggtatggcatgaaggattatgtgatggaactggaacacattgaaaacagtctggtggaccgtgttgacggtaagaagctgatggattatacgtccaacatagcaaaatgggtgcgtatatccggaacccaggaggaagtggacagccttctgtattgtgagaaggtgatgaaggaaattggctatgaaacaaagcttaccttccatgacgcattcatcagcgtaccggtgagagcccatgtagagatggtttcgcccgtgccaatgggatttagggcattgacacactgctttacaagatctgcgccggaacatggactggaggggggtgcggtggattcggacagccctgacataaacggcctaatcgccataaaggatggactgcctaatgctgaccaggtaagggacatggaaaaaagaggggctgtggctgtcatttatgtgcaggatgacaatttacataattcgccggtatcctctctttggggcggtcccacagagaaaacggaagggctgcttccaggcattccggtggtgtccgtggtccggcaggacggcgcctttattcgggatcagatgaaaaagggacctgtaaaaatatggatacagtctgtggtggacacgggctggagaaaggttccccttcttgaggcccagctgaaagcggagggtacggaggatttcctgttgtttggaagccatatagattcatgggattatggcgctatggacaacggcgccgccaatgccaccatgattgaatgcgcaagactccttgcagctgaacagaagtcatggaaacgggggctcaggcttgtgttctgggcaggccattcccaagggaagtttttcagctcggcgtggtacgcggataatcattttgaggaattggaaaagcactgcgcaggctatgtgtatgtagattcaacaggtggaaaggatgcggtggtcattgacgaagcgcctgtgatgcctcagaccaggagtcttgccgcatctgtaatcaaaaaacagaccgggatagagttcattggcaaacggattggacattttgctgaccagtcgttctacggcgtggggcttacctccatattcggtacgttttctgagcaggatattgaaaagaccagggatatactttcattccgtaccggcacgccaaagcatgcgggaggtcttgggtggtggtggcatacagagcatgataccatggacatcattgacagggatattcttataagggatacgaaaatttatgttgctgtggtatggcgtctgctgagttctgctgtcctgccttatgatttcagggaggcggttgaggagatgaaagaaaccgttgaatccctgggcagtctgctgggagacagatttgattttatgcctcttagggagcgtctgtgtctgctggaaagaagaatggggaatctttacaggcagatagaaggcaatgagataccggatgaggacgctgatagtgtgaatgccctgctgcagaaactgtcacataaaattgtgcggataaccttccacggtgagaaccattttgatttcgacctttccggcgcaatgtatccaattccgtcacttggcgatggtgtacgtctggcaggatgcaataaagactcgtacaggtatttcgttctccgcacgcagctgatgcggggctataaccgtgtgatgagttatgtgagagaagccgcagagctgctggcgggctatgatgatatagatggagagcggtaatggggaaccagattacaaaattaaatacataaaggaggggtaacaaatgtctaagtacagacaaaacgaaagctggattagcaacaagtttgtaggtcagctgggcatagaggctttcatgcctaatgccaacatgggcctggaagaaaagggcttcaagcatgctgatatacaaagggcaaacaggcgcatgacctgcctgcgggctatgcccaaagcctggaaagccgtagcagagcagcaggaaaagctggctgaggaatcggccgcaatgggaaacatggttactgccggcgcgttttatcatcgtgcagccctttattacggtaaggcacagctttaccatcataaggacgatgccatgaagctggagcttcatacctcctgcgtgagatgctatgaaaaggcaatagctggatacgattacaccatagagcgggtagtgcttccctttgagggtaagaatatttacggcattttccatgcgccaaaaggggctttaaatcttcctacggtactgtttactccggggatggatatgattaaggaagattatcccaacctgaacgataatttctttgtgcgcagaaacatgtgcgtgctggtgatggacggtccgggatttggcgagacgcgtgttcatggcctgcctgtgactcttaccaattatccagaagcagcgtccctgtttctggactggctctgtggacggcctgaggtcaatccggaccagattgggattttcggcggcagtatgggttcctactatggtcctacggttgctgtaaatgattccaggattaaggcagttgtgggcctgctgggctgctatctggagaaggacctgcagtttaattcctgccagccgggacttcgcaataactttaagtatatgtgtaatatttatgacgatgacgcgtttgatgagtttgtggcagagatgactttggagaaggtggtggaccgcttaaaggttcctttccttatgtcaacgggcgagtttgacgagatgtgtccgcctgagctgacagagcggttctttcatatgctggactgccccaaggagatgtggattatggaaggtgagtttcattcctgcgcaggtatgtatcatgaactgttcgcatgggcaattgattggctgcgtgaagctttgacgacaggaaaaccggagaatctggaagtcaggaaagttattcccgagcggtggtagcattataaaaatacgaggaggtaaacgttatgaagaaggtattaagtatcttattggcggcagcgatggtttcttccctatgggcctgcggagctccggcgtcaaaggaagcctcagctgcaaaggaaaccccggcagcagaggatatgtctgttcaagagaatgcttctcaggcagagaatgcttcatcaggagagtcagcaaaggctgcttctgattacgagtatcctgaaatgacaattattctggcccattcaggtgcggctaccgatgccaggcaggagggcgcacttgcaatcgaaacgtatattgaggagacttccggcgggaagattcaggtggacgtatacccggccggacagctgggggattcaaatacccttgttgagtccgtgcagaacggcggtatccagatgtgtatacagccacctgcaaatgtatgtgcgttcaatcccctgctttccattctggatgtaccgtatttcttccctccggatatagataaggccagggctgtgtttgagacagacgcagcggacgccctccttgacaccatgcaggattacgacatggtaggtctgggctactgggtagacctgttcaaggcatttaccagcaatgtgcccctgcgcgcaccagaggattttaacggattaaaattccgtgtaatggcatcgcctgtgcttatgaagtttatcgaatccctgggcggtactgctcttaccattgattatcaggagacctttactgctttgcaaaccggtgcaattgacgggcaggaagcaggcataggagcaggaatctataacatgaagttttacgaggtgcagaagtatatggagattacaaaccatattcttgcctcacagttgatttttgccaataagacctggttcgaggggctggacgatccgtgtaagcagttggttatggatgctgtgaacattgccggaaatgatgcttatcaggaagtgaggggagatatagagcaggctgctctggacgcaatcggggctcagtgtgaaatcattacccttaccgatgaagaactgcaggccatgtctgacgcatgccgccagccttgccttgacctttatattgaaagcaacggcgaagcgggccagaagattcttgacgcgtttaatgccgacatagaaaagctgaattaacaggcaggacatgtacggaagggatatgaatatatgaacaaaacatatgaaaagtataaggcgtttgacaaagcattcaaaaagtttgagctaacgttctgcgcattatcaatcttgttcgttacttttctggttactctgggaatcgtactaaagaattttttcggattttcttttccttggacagaggagctctgccaatacatcatggtctgggtggcttgtatcggcggcgttatcagcgttgaaaaacatgagcatgtcagtgtggatatcatatataacatgcttcctcaaaagctgcactcatactatcgtatgatacttgccgttattgcgacggtattcctggctgcgtttgcttacttttcatatctggaggtggtttccataaaggcaactgcccgtaccagcgtgaccatgccgtggtttcagatgtggtggatgtatctgggaactatgatgggctgcggactcatggcattggagtattttaagaccatatttgttctctttaaggaaggtaagataaaagctggagtcgacacaaaagaccaggacctgagcaagctcgaaaccatgtaaagggggaggtaccaatgacagcgggattatttattatagctcttctggtgtgcctgttcctgggtatacctatctttatcgccatgatgatacccagtacatattatctgttaaatgtgctgaatatgcagccaatcatggcggtctcatcctttaccgcaggattaaacaagttttccaccctgtgtctgccattctttattttggcagctagtgtgatggggaaagggcagattggaagcaggttgctgaagttctgccggagtattgtggggcatatgtacggcggcataggcatgacggcaattgtgtgctgcattatcatcggtgccatatcgggggcatccacagcaggaatattgattataggggccttgatataccaggagatgattgataacggctatccacggggattcagcgccggacttatctgtaccgtcagttctgttggtatgctgattccccccggtattgcttttgttgtatatgccatgaacacaaatacatccgtacttaaactgttcatgggaggcttaagctccggtatcgttatggctgctatatttatggtatacgtatatgtgtatgcccgcaggcacaaggtgccaaggcttcccagaatcagccttaaggagttttttactgcggtaaaggaggccatctgggcgctgggtcttccggtcatcatcatcgggaccatgtataccggcatctgtacgcccacagaggcagcggccatatcggctgtgtatgccattttcgttgagatggtcatatataaagatgtggattttaaaacactcattgatatctgcggagactgcgctaagacagtgtgtacgatttacatactgctggcagccggccagcttttagggtatgtgatgacgctggcaaggataccgcagctcatggaagcgatgctgggtagtacgtcaaggctgatgatattgctggtaataaatataatgtttctgattgcaggtatgttcatgggcgctggctcctcgattgtaattatcatgcccatggtttaccagttggctttaaaagcagggatagaccctatattccttggaaacgtggtggtaaccaatctggcaatcggtatgagcactcctccttttggcctgaacctgtttgtcagcgccaaggtgatgaagctgtcctttgtagagatagtgaggtcatccatgccgtttatcatgctgacgattttagtgcttataattattaccctgtttccaggtttatccttgttcctccccaacctgttggttgaataatagaaataaaggagatagtatatggaagattttaaggcggctcttattgttgtggatgttacacgggcacattttgattatgatttcaactatcttccggtgccggaggatgactgccagagggtgcttggaggtctcgttaaagtaatacctgagttccgctcccgggggcttccggtgatatttgtgaggacaggccataaaatcaatcctttgacaggggagacaatgtccttggcaagccctttctggcgttatcagatggaaaataagatcagcataggcggtcatgtgagaaggcctgtaaatactgaaaattcacctgccatggaaattatgccacagcttggcgctgaagaacaagacatcatagtccataaacagagatacagcgcgttcatgggcacgccccttgagatgtatttaagggtcatgggtatcaacaccttgttctttaccggcgcaaatacaaacaactgtgtactctgtaccgcctttgaggcatacaaccgtgactaccgggtcattgccattgaggactgctgcgcaagcatgaatggaaaggcttaccatgagctggcaataatgcagatcaaggcgtctcttggatgggtagtggacagcggttctgtagcggatatacttgacggcaggactaagctttagagctgcccagggatgcggcaaaaacattctgttacggcaggatgtttttgcttattttcattaagaaaggaatggctgtatggaaacaaattattatcaccccagggaactggaggaagcagcggcgttgttggaggaacaggagggaacggtgttggtgaacggcggttccgacatcatactgagcatttctgcgggtaaaatcactcctaccggaatcattgacatacgcggtataaagagtatgaatacaatcacggatgacggacagtatgtgcatatcggaggaaacgtaacctaccgtcagatgcaggattctcctgtgtgcggcaggattggcggactggccagggcggcgggcagtgtggggagtccggtcatacgtatggttgctacgcctgccggcaacattgctactgctgcgccgtcggctgactgtgcatccatgatgctggctcttgatacggagctggtactggtaagtgtcaggggggagcgtattgtcagacaaaaggacatatatttaggagcatacaaaacagatatacagagtaatgagattattaaggagatgcggtttcccagtccgggcccggataagggcagcggatatgcaaggttttcccgcaggaaatcacaggatatagcaaaagttatagcaggcgcggtggttaccgtggataaaaaaggacggtgcctgtccgcggttatatcattgggagccttaaacgccacagcggtcctggctcccagcatcggagaaaggattaagggtttggggcgggacgaggcaatacagcttgccctgaaattctttccgcgggaggcgggactcagagagagctattttaaaagatataaagaagaaacaacctgtaatgccatagcagaggctttagatatggcattcgcggaaacagagaggggggactcgtgttatgcctgtggttcactttgatttaaatggcagggcagtgtgtattgaggttgacggaaaggaactcctggttgacaccttgcgaaaacgctttctgctgacgggaacaaagaaagcatgcggtacagatgattgcggcgcttgcacggtgctgattgacaacagggctgtccgttcctgcgcctatcttacctgcatggtggaaggcagaaacgtgatgaccatagagggcttggggacgccatggcatcttcatccgcttcagcaggcatttatagacgcaggagcggtacagtgcggctattgtacaccgggcatgattatgactgtgtacgggctgctggaagaaaaggagaatccggatgaggaagaaatcaggatggctatatcaggaaatctttgccgctgcacgggttaccagaagattgtaaatgccgttaagctggcagcagaaagaaggcttatgactgcaaatcacagttgggaggaaatcaagtgactttgaatgaatcatgtattggacagcggtatatcagaccggacagcataagcaaggtgaccggctatgcaaagtttacggcggacctgcttgccggaaggacggatgtgcttgtggccaaagtgcgcagaatagactgtgcccgcgccaggataaaaagcatagatacgggtgaagcaaagaaggttccaggagtggtggcggttctgacagcaggtgacttgaaggacggttccgggtatggatatattcttaaagataagccggttctggcaaaggatgaaattatatgcgattgtgatccggtagcttttgtggcagcagaaacagaggaagcagcttacagggcggtgaacctgataaaggtggagtatgacgctctgccctttgagacagaccctttaaagaatatgctgccgggggctgaacaggtgagaaaggagtacggctctcatcattgcggcaatgtctcaaatgatgtccgggtggcaaagggtggtatggaagaagctgcttcaaaaacagtgattgagataaccgcggattttcgcacgcccatggtagaacacactgcgctggaacgggatattgcttttgcagagccggatgctgtgaacggcggactgaccttctattgtccggtacagaatgtgcatggcatgcgggaaggcctgtgcgaagcccttcatctgcctgtgagccggataagggtggtcagccctctggttggcggcggctttggagggaaagagtgttcatctgtggattgcggcgtggcagccggaattctggcgctttgtacagggcgggcagtggtttatgaaatgacgcgggaagaaatgttccgctataccagtaaacggcatcgcagctatataaaatataaaattggtgtggatacccatggatgtatgaccgggatgtggtctgaagctatttttgataagggcgcatataaatcagtggatgtgattcctcacagatctgcactgttatcgggaggcccttatgtaataccggccgtggatgtgagaaaccgatccatatatacaaatcatgtatacggcggagcgttcagaggtctgggagcacctcagcagtattatgctctggagtgtgcaatggatgatatggcccgcaccataggaatggacccggttgaattcagacttaagaatttaataaaagaagggtctgagactatattttcccagcagatgagtaagagtgatgcggcaggcatacgtgaatgcattgaaaaggtgaggcaggaattggaatgggacaagcctctcgactgttcagacccatacaaaaagcgcggcaggggaattgcctgctatatgtatggaaccggaagttcatttccaaaagacgcgggccatgtatacctggagttgaatctggatggctccctcaatgtgaacctggcccagaacgaaatgggccagggcttgattacggctatgagccagattgcggcccaggcaatgggtgtttccatagaatatgtgaatgtagggatatcggattccatgtgtggaccggaggcgggtcccacatccgcttcaagggcaactgtgttccagggaaatgcaatcatagccggctgtcgttccctgaagaaacggatactggatgttgcggcggatatgttagaggcggacgcccatgagttgaccataaaaaacagcgagatattttccgagaaggaaccagataaaaaggtaactcttaagtcagccgctgcaagggcccgggtatcccaggtgtctctggcgcaggttggaaactggtatccgcctatgacggaaaaagaccctgagaatcttaaccagacaacacggtggacaacatttgcatatggagcgcacggtgtgctcgtggaggtggacaccagaaacggtatgattacggtgtgcaggtcagtacaggcaactgacgtgggcaaagccattaatccggatacggttgaggggcagatggacggcggagcggcccaggcgattggatgggcccttatggaggaatgctttttgagacatggtttggtaaaggaaacgtccctgcatgaatatctgatccccactgccttggatgtaccgagccttgaatccattattgtggagtcaggtagtgagtcaggaccctttggcgctaaaggagtaggagagccgacgattctagggggagccccggccataaggaatgcggttctggacgcaacaggccttgctatgtacgaaattcctatgacaccggtcagagtgatggaggctcttgaacgggcagagacagcatctgcggcagagaagaaaccatttttcagggtgccgctgcagtgcggactctgggattgatttagtgctgaaaattctgaaacctgcgtacaatctggttatgtttcttctcatagaattgatagcaatgccaatccgtacatgctattataaataataagggtgagacacgcccctattaaccacagaattatattgaggaggaacggatggacaaagtcatggagttacgccaggttatatatggcttgctggcggcgcagattgaattcggcacctaccattataaagacccgctgccgaagatagaggaggtcagccagtgggtcggcgtttcattggatacagtataagccgcttattatcagttgaaaatagagggatatatcactctgaccaaaaaggcgggggcggctgtggccgtacagtttcaggaggcggaatttgagaagaatatccagacgtttttcactctgcgcaaagaagctgtaatggatatgtgcaaatcctttggaccgatgttcagccaggcccaatggcacggcctgaaaaatgccggaccggaacagatggacgagttagagaggcttcgttcacaaaccaacatacttaggccgtatatcatggttcagcatattcagttaatatatggctcgcttaacaaccagctgctgctgcggttgatttggcaggcgttcttattttaccaggcgccctttttaagcttgccggccaatctgatggattttgaggacagtgacggccccttgctgtatatgattcgattctgccgtcaaaaagattgggacgggctttggggaagcgtgacatattgccaggaacagattacatgtgcaatcagccggttttatgccaaccgcatcaccctggagccgccgggagagcagattccgttttgctggaatgtctatcagaatacttcccagaagtgttattaaatcgcgatagatttgcttaagggtgtccgcctggggggtttgggtaggatggcattttgacatctcctgccaaaatagcagaatatatgcaagtctctgtcattacagtacgccgtaccttgacgctgttcaaccagttaggcgttacacattccgtcaacggagttggcaccaggattttaggtgcagagaacagtatggatgtttcaaacccggatgacagtgagatactggtatccagtacgatggaaacgttcggaaaactagtagatattctggtaaataatgcaggcgccagggatgaagggctacggcctgttgataaggaaatcgacagcgagatagaccgcgttgtcggcataaatattaaaggcgttacgtattgtacacgcgcaatacttaaagatatgctgaaaaataaaaagggtgtcattgttagcgtggcaagcagctccggtctgagcggcggccccgataacgggccagtgtgccgccctggattatggtttcaatttatagttaagtattccgggtttccctcttgtcatatgcttcttttagatgtatgattacttttagaaaagagtttatgaaagtgggatgtcctattatgaagataaatgaaaaggcattggaaaagaaacgtcagaacaaggcaaggattgccagccatatcctccacagaaagcagatatccaagccggagctggccattgaactgggactcagtatgcccactgtactccagaatgtgaaggaacttcaggaggccggaatcgtggaggaggtgggagagtatgaatccacgggcgggcgcaaggccaaggcattgtctgttgtgaaaaatgtgaggtacgctgcaggggttgatatcacggccaatcatataagtgttgtgatcattgaccttaagggggatatggttcacagcaggcggtttcgcaggcggtttgagaatactgcggagtattatgaggacctggcggcggaattggagcagttcctggatgagagccgggtggacaaaaagaaaatactgggagtgggcatttcactgccgggtattgtggatagggaaaacagccggctgatacgttcccatattctccaggtcagcgatatcaacctggaggtcataagcagactgatcccatatccggtacattttgaaaatgatgcaaacagcgctgcggtcgcggagcttcagggtacggacaggaatgctgtttacctctctctcagcaacacggtgggcggttccatctacctggacaatgatatttacgggggagaccatttccgcagcgcggagtttgggcacatgattatatatccggaaggaaggctgtgctactgcggtaagcgcggatgtgcagatccttattgttccgccggggtattgtcctcttttgcgggggaggatgggggcctggcggagtttttccggctggtagagaagaaagagcgggatgccatggcggtctgggacacatatctggaggatctgtccattgtcattaccaatctaaggatgtgttttgactgcgacatcgtgctgggcggctatgtgggcggctatctgaagccttatatgtcacagcttggcaggaaggtaatggttaataataagtttgataatgataccctttatctgagaaactgccgctatgaaaaggaggcgtctgcggtagggattgccatgacattcatggatgagtattttaggacaataatataaaagggatataggatgcggcttctgttcaagcacaggggccgcattttttgcattgcttccaggaattttgtgcaaactgcataaaaagatgacaaaaaaataatcaagttgatgaaaatgcaattggtatattgacaaaagcaaggaccggtgcaataatgtaattactttaataaaacattttataaaagattatataaaaagaaaaaggagagatggtatatgttgcagcaggtaatgacagagccaggtaaaattgagtttcatgaggttccggtaccggaaatcagtgacagggaagtgcttataaagattatgaaaataggaatctgcggatctgatatccatgtgtatcatggggaacacccgtttacaagctatcctgtaacccagggacatgaggtttcaggtgaggtggtgaaggctggccgggcagtgaccgggttaaagccagggcagaaggtgacaatccagccccaggtggtgtgcggccaatgctacccgtgccgccatggcaaatataatctgtgcgaggatctgaaggtgatgggtttccagactacgggtgtcgcatcccactattttgccgtggatgccgcaaaggtaaccctgcttcccgatgacatgagctatgatgagggggctatgatagagcctctggctgttgcggtccacgccgtgaagcaggccagggatgttaagggagcaaagattgcagtgctgggagcgggacccatcgggatactggtggcacaggcagcaaaggggttaggagctgagcaggtgatgattacggatgtcagcggtctgcgccttgaaaaagcaaaggagtgcggagttgacttctgtgtgaataccaggaataaggatttcggggaggccatgacagaaagcttggggccggataaagcggaagtcatctatgactgtgcgggcaacaacattaccatggggcaggcgattaaatatgcccgcaagggaagcacaattattctggttgcggtgttcgcgggcctggggcagattgatctggctgtgctcaatgaccatgaactggacctgaataccagtatgatgtaccggaacgaggattacctggatgcaatccgccttgtgaatgagaaaaaggtggttctgtcccctcttatctccaggcactttgcatttggggactatctgaaagcataccagtacatagatgagaacagggaaagcaccatgaaagtaattatcaacgtgcaggagtagatacagggagaagtggggatatgacggagatggttttaagaagtaaaatgaaacggactggacagactgcggccgcagaaacggatttgagagcagacacagacgttaaggtctctttgattagcaagattgcgtatggaatgggggatgtgggctgtaacttcagctggatgtttgtgggaaatttcctgatgattttttataccgatgtatttggaatcagtatgggagccgtggcggggctgatgttgttttcacgtttttgggacgctgttaatgaccccatcatcggaagcctgaccgacaggacccattccagatgggggagatacaggccctggcttcttgtggcggcgcccctgacagccgttgttctgatactgaccttctgggcccatccgggctggaacagtacggccaagattgtgtacatgggtattacatactgtattctggttttgggatatacctgcgtcaatatcccgtacgggaccctatgcggggccatgacccagaacatagaggagcgtgcgcagattaataccttccggtctgtggcagccatgattgccattggaatcatcaatatcataacggtgccgttgattgaaacgctgggcgcgggcagcgataaaaggggatatctcctgatagccgtgatttacggaggcatctttgcattgtgccacatgttctgtttcgcaaagacaagggaagtggtggccatacctgagcggaagaagatttctctgaaggaacagctcagggccgtatccaggaaccgtccctatatcctggcgctggcaggacagatgctgttcgggtttacgctgtacgggaggaacgcggatgcactatactattttacctatgtggagggcagcaaggcgttctttaccgtgtattccatgtgcattataatcccatccattatcggagcagcctgcttccccatgctgttccactggaccaacaacaagggaagggcggcctccattttcgcattcctgaccggcatgtctatgatggggctgggcatgtttacggcaaaggaatccccgattctgttttacggggtatcggcactgacccagtttttcttttccgggtttaatacagccatctatgccattatcccggactgtgtggaatatggtgagtggaaaacgggactgaggaacgatgggttccagtatgcgtttatatcacttggcaacaagatgggcatggctcttggcacctcacttctggctatggttctgggtatgtgcggatatgtggccggcggacagcagaatcctgccgtgctggcagtgattaagcattcatttaccaccataccgggtatgttctggattattactggcattgtgcttttcttctaccgtctgaaccgcaggcgttacaatgaaattatgaaagaaatgtatacaggaggagtctgattgctatggaaaatcagaagaaatatgacgttattgccctcggcgagcttttgatagattttacacctgcgggaaccagcgcccagggcaaccctgtcctggaacagaatccgggaggcgctccgtgcaatgtcctggccatgctggcaagatacggcaggagcaccggattcatcggcaagattggaaacgacatccatggaaggtttctttgcagggctgtccgggaatcgggaatcggctgcggcggacttgtgatgtcggatgaggtgcacaccacccttgcatttgtcagcatggatgagtcgggtgacaggagtttttctttttaccgcaatccgggcgctgatatggcgctgacggaggacgaggtgaacctagacatgatccgttgttccaggatattccatttcggcaccctgtccatgacccatgaaggagtaagaaaggctaccataagggcagctgcgtgtgcaagggaaaacggatgcctgatttcctttgaccccaatctgaggccgcccttatgggcggatatggaggaggccagaaaacagatgctttacggcgtgtccctgtgccatatcctgaaaatcactgatgaggaactgcgtttcatgaccgggatagaggatgagaaacaagcggtgggtcatctgcaggctgttcacggcattcccctgatccttgtgacagccggggcttttgggagtacggcatactgggcaaaggaagccctgaaggcagaggcgttccttacggacaggaccattgataccaccggggcaggggataccttttgcggatgctgcctgaattatctcctggaccatccgttggaaaccctaaaccgggaaggtgtaagggatatgctgacaatggcttcagccgcagcctccattgttaccaccaggaaaggggcgcttaagtccatgccggagccgggggagattgaggaagtggtaagacaaaagtaaatgtccctgcttagcactgttctatatttattatggtagacattaaataagccctccaagaatggagggcttcagactgtagacaaattccgaggacaagtgcctcggaatttcttcgcgattgagccagaaaagtcagcacttacaagactttgaggctcttttttggtataatagatgtatcaaatacaggcggtgagatgcttatgatgacacagaatgcggataaaaaaagagaacagattcagttgttttgcatggatgacatggttccacaggaccatctgctgcggatcatcgacaaagcaatcgactggtccttcatttatgaactggtagaagataaatacagtcaggacaacggacgccccagtatggaccccgtcatgctgatcaagattcctttcatccaatatctttatggcattaaaagcatgcgccagacggtaaaagagattgaggtaaatgtcgcctaccgctggttcctcgggctggatatgctggataaagtgccgcatttttcaacctttggaaagaactatacgagacgctttaaagacaccgacctctttgaacagatattcgagcatatcctttctgaatgctacaaatttaagctggtagaccctactgaagtttttgtggatgccacccatgtaaaagccagagcaaacaataaaaagatgcagaagcgtattgctcatgatgaggcattattttttgaagatctgctgaaacaggaaatcaatgaagaccgtgaagcacacgggaaacgtccgctgaaagaaaaagaggatgacaacaatacaccatccggtggagccggcggcaaagaagaaaagacagtgaaagcaagcacttctgatccggaaagcggatggtttcgcaaaggagaacataaacatgtatttgcttatgcagtacagaccgcatgtgataagaatggatggattctcagctatagcgttcatcccgggaacaatcatgacagcagaaccttcaagtctttatatgacaagataaaagggatcggaatagagaccctgatagccgatgcaggatataaaactcccggtatagcaaaacttttgatcgatcaaggagtcaaaccgctcctaccatacaaacgccccctgacaaaagagggtttcttcaagaaatacgagtacgtttatgatgagtattacgactgctatatctgtcccaacaatcaggtgctgacctatcgaacaaccaaccgtgagggatatcgcgagtacaaaagctgtggaagtgcctgtgcaagctgtgcctatcttgcaaaatgtacccaaagcaaagatcatgtaaagacggttatgcgccacatatgggaaccttacatggagatgtgtgaggagatccgccaaaccctgggtatgaaagaattatattcacaaaggaaagaaaccatagaacgaatctttggaagtgcaaaggagaatcatggttttcgatatacacagatgtttggaaaagcccgaatggaaatgaaagtcgggcttacatttgcctgcatgaatctgaaaaagctggccaggatgaaagcgaaatggggagaagcccatttcacaaactttattttgaacgcaatttggttaataaaagaaaactggctttgggatacaaagcccaaaaccagtttgtctacagtctgaagccctccaagaatggagggcttatggatttacttacataatattacccaattgcacctggaagtaccagtgcaaataaaagggttaatatcataatggagatagacatgatgatttgtgctacagtgtaagttttcaaaccgccggttacggtaaatcccgataaattacttacgacccagaaaccgctgtcattgacatgtcccacactgattcctcccgccagtgcggccagtgcgatatagatagggtggatggacacgctgggagcaatggtcgccatgattgtcatggcggtaataccggctactgtaccggaaccttgggcaatacggaatatgcagccgataaaataagccaggaacaatacctttattacggaaccgctattgatgctcaatgttgtgaccagggcatttccgatgtcagtggctgagatgatggaaccaaatgaacctccggctccagttatgagcagaacaataccggcttgctttaatgcctctcctgcggaggcctcaaccttgtcccgtcccagatacttgtaaccaatcagataggaacagagtgttcccaacaggatagcaatgatcttattgccgaggaattgggctaccataggtgtctcgtcatagatggcgtcagcccctgtgcctgtcaggatacatacaacaggaatcagtatgggaagaaaggataccaggaaagagggctgcttatctgattccaattctttttcttcgctgaacagttccgcgttggggttcatatccttttcaggtttaaaaaagccggtatcatgtatttttgtatagataaatacggaaacaaccgttgcgatagctccgataatcaggcccatgattaccatggttcccagattgaaatgcagcagatccgctgcagccagagggttgggggtaggaggcaccagagtctgcgcaatgccgtctccgatggtcagagctcctactacataggccagaggtttgtttacctctttggcaactgcaatgccaatggggatcagtatgataaaggttacatcgaagaatacgggaatagccagtatgaatccggctattgccacggcatacagtacaaatttattgggaacagaatgtacaatggtttttgcaattaccttagcagctccggtatcgctcatgagctgtcccagaatcactccaaagccgataggcagtcctatgctggccatcatattgccaaaaccagaggcaatcgtgtcaatggatgtgacaaaacccaatccgcaggatacgcccatatagatactggcaatgactaagctgatagcgggattcagtttgggtataagtataagagcaatcatcagagcgattgcaacgattaagttaacgacaagtaatgtacctgacataatatcctcctccaatagatgttgattttatatgtggaccgtacctatccacggtacggttcattatctgaataaaaacaattaccaaagatttccctcttcgttaaaaacccagtctttcggcgggccggatacgattacatggtttgattcttccgcttcctttaacatggactcagatatgtaaatctcctctaagttcatcgtatcttttattctcaccactctcggatgttcgcggtcaatataattgcaggtgcgcagggcaatctgtatacatgttttgtcagaatgggtaaacagcggtattttaggtgtgcagagcactgtggatgtcaccacatttggatatgtacagtccacatcaattttatccaccagccgtttggttgttacgtctgcaagccccagtccgttgcagtttccatgtgtctcatctgtcagatccagaaccgcaatgtgctggactttaatgccctcgttaatataaggaacagcaaaccgtcctgttatgttggggtccatgccatctccgctgatatctttgccaatccggtccaccaccagaacgtcgatgttgtcaaaataaatctttcccagcctctgtttggaggcaattagcagtttgggctcctcttcatatatctcttccttcagcatacctttgatgatacaggtctggtcaaaggcattctccaccaaagccagagctccaattacaggcgcatgttccaaaacgacccttccaatgacaggaagcatggtcccaagttcgcagaagccgttgcgatggactgtctcagctcctttttgtttcccaagaccaataacagccatcttcatgatgccgctctcgtagggacccctgaaggccgtatgggcttttacacgtccgcatagtatgatagcgtcagcctcatatgcgtatcggtctacatagaccggcataccgtcaggtgtctcgccaacctgaaccacttccatggtagccttgatagggcatcccatagtgtcctctgtaacatggtaactggccagtatttcacgctgcccctgggcagtggctcctccatgacttcccatagccgggaatatgaagggacttccgccgcattccttgacaaaatccacaatggcccggatgattactgctatattggcaactccgcggcttccgcaggttatggcaacacttgcgccgggtttgattcgggccctcagttcctcacgatcaagttcactgcgtacaattcccggaatctcattaacatcaatatggctatggtccagaagctgtttgacttttaccatttttggaagtcttacactggaagccagttctgttattatatttccttcttttttagtctctaatgccataagtgcctcctcctggtgttaaagcagtacaccgtttttgaaaatcatgatttctctgtatccgtagatttcattttttgtatgttcaccggatgccgtttgtatcatcaggtcccaaagctcatgggctgcatcgtcaaacgtttttccgtccagtatggctccggcgttgtaatctatccacctctccttgcgctcataaagaacattgttggaggctatttttatggtaggaatagctgcgcccaagggattgcccctgccggtggtgaagaacaggatttgggctccgcaggagagcaggtccgttatggatacactgtcatttccgggaccggtcataaggttcagacctggttttatacaacgctccccatattgcagagtgcctgtcaccatggccttgccgcctttttgtatacagcccagggatttttcttccagcgtggtaataccgccccttttattcccgggagaaggattctcataaacaggctggccgtaatccagataatattgtttgaatccattgattagttccactacctgatgaaatgttttgtctgagtcggagcggttcatcagaatggtctcagcgccaaacatctcaggaacctcggtcaggacagcgcttccgtccaatgcggtaatgcagtcggcaatgcgtccgcagaggggattggctgttactcctgagaacgcgtcggaaccgccgcatttaaaagcgatttttagtttgctcacaggtacatcctcgcgttggtcctggcttagttcctgggcaagctcacgaatcagctccataccatactcaagttcgtccccttccacatcctgagtcaccatcattttaacacggctctcatcaatttctcctaaaacaggaagaaaatgttctaaatcattattttcgcatcccaagcttaccaacagtacgcctcctgcattgggatgatggacaatgctggccaggattttttgtgttgtttcaaaatcatcaccgagctgggaacaccctgcattgtggggataggcataaatgccgtcacagagttccccgtattccctggccgccatgtcggccagcatccgtaccgttgtattgacgcatgatacagtggggatgatccaaatctcgtttcgtatacccacgtttccatccttgcggacgtatccgcgaaatgtacgtgaaataccggaaacattggccgggcgggggatatcaggctcatatgtgtaggtgagcatgcctttcaggttagttgcaaggttatgactgtgtacccatgagccctttttgatgggacaggaggcatgtccgatggcatatccgtatttaataaccgcttcctctgcttctatatctctgagagcgattttgtgtccgaaggggatgtcctcctgggcggtaacctcagtctggccggctataacggtctgtcccctttttatggactctacagccacagcaacattgtcatgttcctcgatttttatgagttttctctccatttgggaattctcctttcaataatatatattacaaatatatttgtaatatatcagactctgcaaaagtataggagaaaccatctctgtggaattctcctattcaaaattctgaattctggcaggccgctgttaatagtagtattcaaaggcttcctgcttggcagtgagaatatgttctcttactgcgttctccagctggctctcgtctctgagtcggagagcctccaggatggcaagatgctcattgatggacctctggtaattcatgttgcgttgggatgtaaggatacggattctgtggttatggtcatttaccacccggaacgtgtccttcagcataaagttattggtatggctagtcagggtattgtgaagttcccggtccaactcaatgtaataatcccgctgctgttcgccttccttttcatgaaatgttgtggagaaggaggtgtacatatgatcaatccattcattgacaatgtagcggcaggctgaacgggcaataaacggttcgttcagcagtctgacttcataaatggagtagatcaaatccagtgtaatgtcactgacaagcgtgccacgccttggataaatcatcacaaagtgttctttctccagcttttgtatggcctcgcggataggggttctgctgactcccagttccttttggagctgttcttccgaaacatcacttagaggaggcatctgtccggatataattctattttttagttcctgatatgcatagtctgatttgttttccaacgtcctctcctttctactggtatatgggaaatatatcacaaatatttaaaaaacacaatatttctttgcggtttctttgaaaattgtaaagtatgcacattttttaatgttttttttgtgagattttaaatatagaagaattgtgcgcggaatggtattatagaattaatatatcacaaatatatcactaatattttatcgacccattcagtattttaatttatgcacaaggaggcagcagtatatatggaacactatctgattaccattgacagcggaacaacgaacacccgagttgctctgtggaaccaaaagaaggcatgcgtggatatttataagagcgaaattggagtcagagtcacagctgtagagggtaacaataaaaggctggccggagccatacgtgaaggcatccagacattattaaatagaaataatctgacaatccatcagattgcatctgtttatgcatccggtatgattacttccaatgtaggacttacagaggttccgcatatagaggctcctgcaggattagaggattttgcggcagcggtgagagctgtgctcattccggaggtgtttgaactccccattcatttcatcccgggcctgaaaaattccaatgctgtggatatggataccctggaatccatggatattatgagaggggaggagacagaggcactggctttgctatctcttatcacggtaaaaggggctgtccttctcgcgctgcccggttcgcacaataagttcgtgactacggatcggtctgggagactgacggggtgtctgaccaccttgtccggcgagctgctgtcagccatcaccaatcataccattatagcggatgcggttaaccattcctttgcttctgctcattataactgggaaatggtgctgaagggctttaagacagcccgggataccagtctgaccagggcggtatttacaacccgtattctgaaccaatgtctgtccgcatctccaaaagattgcgccggttacctgctgggagcagtgctttcttctgatataagtgctgttaaaaagagcagcgcgctcatgctgagcccggacatgcaggtggtagtggccgggaaggaacctcttaggagcgccttgaccaggctgtttgaggaagatggttcattctctgatgtgtcagggtatgattcgggagaattgctgctctccggatacggggcgctgcttatagctgtttataatggagatttttagggaggataggataatggatgagagaaataggcagcagatgattctgcagatgattaggaaggaaaaaatagttgcaattgtaagaggtatcccatccgggctgatcctggatacgggacgggctctggcagacggcggaatttgcatgatggaagtcacctttgatcacagcggacctgagggaataagggagacgctccattcaatcgcattgctgaaggaacacctgtccgaacgtatgcatattggcgctggtacggttctcacagcagaggaagcagaagaggcttatagaagaggtgcagagtatatcatatctcctaatgttgacagaagtgtgattgagaagacaaaggaactgggacttatatccatgcctggtgcatttacgccttctgagattgtggatgcgtataattatgggggcgatatcatcaaattgtttccagcaggacttttaggagtatcctacataaaggcggtccgtggtccactatcccacattccgatggcagcagtgggaggcgtgaccccggaaaatatatgccagtttactgccgccggtgttgcctgctttgggatagggagcaatcttgtaaaccaatcactgacagtcagccatgattttgaaaatctgactgaaagggcactggctttccggaacgctttgggagaatagaagtaaagaaagaattgtcttatgtatgccttcggttattaaccggaggctttttctatgattattaaacgccctgaaaaatactggttaatcagaaaaactaattgatgtgttggtatagttaattattgttaatgtttgacagttttatacgaaggggttaaaatcatagttagtgtttatctaagcagacattaaacggatgttatctctgaatgacttttacaccataaggcttattttaatcccgctgctttctgatatccgctttggaatgtggcatatacggaacacgataaattttaaagtacaaaggagggggattaaatggggagaataatcaggaaattaggcggggtttttgttccaatcattttttgcacagctcttatatttacagcgcatatgtcacttgatttaacggatgatttacaggggaatgccagggtcataaattatattggtatcgttcggggagcaacacagagactgattaaaaaggaattgaatcatgtaccggatgacgagttgatttattttctggataacatattgtcaggactttcaagcgggagtgatgaattaaatctgataaaactggatagcgaagaattccaaaccatgttaatagaaatgcaaaatgactgggaagatattaaagcgcagatatacaattatcggaaagatccttccaatcagatgctttatgaattgagtgaagattattttagattagccaatgatacagtgtttacggctgaagaatatacggaacatacggtacagaatgcaagaaagtcactggtgatcaccaatattatatttggattaatggcttttggctgttctgtttttaccatttgccaggaaaagcgccggaaaaaattaattgaggctgaaaaggaaaatataaaaaagagcgagcagttgtcaagaagagcccaggagttaatggcgcctatgaatgagatatcagaattaatgtatgtctcagacataaatacgtatgaactgctgtttgtcaatgaagcgggaaagagaatgtttcagattgacgacagccagccgaatataaaatgctataaagttttacagggatttgaagaaccctgtcctttttgtaccaataagctgcttaaagcggatgaaacatattcctgggagtatacaaaccctataataaaaaaacattatcttttgaaagaccgcctgattgaatgggatggacgcacagtccggatggaaattgcttttgatattacagaagctaataatgaaaaaaatgaattaaaaagaagactgaaaagagatgatatacgccttgcatgtgtaagggaactttataataatcgcaacatacaaagcgcaatcacaaaggttctgcaatatataggaacactgttttcggcagaacgttcctatgttttccggtttcatgaccagtattattctaacatcgcagaatggtgtaaagaaggtgttttgccacaaatagacaatttacagaatatcccaatcggtgattatcaagtatggctggatgagttggacaagcacaaaaagctggttattaatgatattgaagaaataaaggatacattcccgaagggctatgaactgcttgtccaacagggaatacgaaatattatatgggtacccatgatgaagaatggaaaagtaaatgggtcaataggcctggataatcaggatttgggcctggctgaagtagcggttccatttttgcagactatccagtattttctttctctgaccatgcagcgaaatgaaaatgaaacaatgttatttgagatgagccaaatagaccggttaacttctttttacaatagaaaccgttttatacaggatgtatctgaattaaaagagtgcaaagaatctgtaggagtggtctatttagatattaatgggcttaaagagattaatgattcctttggccatgacacgggggataagatgattaaggaatgcgctgatattgtgaaaaacagcgttgattcaaagtacctttaccgtattggcggcgatgagtttgtaataatttatgtggatattaccgaggaatccttttgcgataatgttcagctgttaaaaaatgcttttgagaagagcaaatgtcaggcagccataggatgcagatggaatgaagaatgcactcatattcaggatattatcaaagaagcggatgaattaatgtatgatgataaaaagcggttctatcagggacaccatgcaacgggccgctacaggcataataatgacatactgcgctccttggctgagcctgatgtgctaaacgaaaaaatagagaatcataatttcaaagtgtatttgcagcctaaaataaatgtggaagattgcaggatggtgggtgcagaagcattgatacgttaccgggatgaaaatggagctatcatagcaccagataaattcattccagttttagaagacacatacctgatcagtaagattgactactatgtatttgaggaggtatgcaaaaccctgagtatctgggccaggcaggggaagtctgccgttacaatctccagtaatttttcaaagctcacttttagggacgatcgttttataaaaagattggaagagatcagcgacaaatatcatgttcaaagaaattatttggaaatagagattactgagagcgccaattttacaaatttggacacattggtaacaagaatcaatcaaataagagattctggattcagagttgcaatggatgactttggggtggaaagttcaaatttagcgctgctgtcattagtgaaattcgatatattaaaaatagataaagggtttgtaaaagatattatttcaaataaaagagcacagataataattgggatgatgacaagaatgtgcagtgaaatgggaattcagttagttgctgaagggatagaggacgggcagcaattagaggttctaagagaatatggtgtcaaaactgtgcagggctatttgtttagcaggcctatatcaatttcagagtatgaagaaaagtatatgcaggggccctgatgcaccaggaggatattccagcggatgaattcaggctgcagcaatgcgttaataaagcagggattgaaactttatttcttcctgcagcctgagggcctgcaatgtttttgtggacggaacataaatgcagtaaacggggctatattaaatatctttttaacatgcgggtcaattccataacgtcaataggctttgcaatatgagcgttcataccgcattccaggcaatgctgtatatcatccgaaaaagcatccgcactcatagcaataattggaacagataaggcatccggatgatccagtcccctgattgctttcgtggcctcatatcctgtcatatgcggcatccttatatccatgagaatagcatcgtaatatccctcgggtgacttttggaatttatccagacaaatctggccatcctcggcccaatccaataccactcccaaatcagataacagctcatttgcaatctcccagttaagttcattatcctcggcgagaaggatgcggcgcccggacagctccataccctggttcaatgtccggctatttggtgtatcaactcccatatattggcgcagtgcatagaacaatgtggatttaaacagaggcttggaaatgaagccgctgatacccgcctcccgtgcttccgcttcaaattcgctccagtcgtatgcagaaataagcagtataggtacttcatctcctaaattgcgccgtagttctctggcaacctgaatcccattcatgccaggtagtttccaatctaacaggattatttgataatcgtcccttctgctgtggtgttggattaccaaatctatggccttttccccgcttaatgtccattcagcttttataccaatggatttcagcgcatttatagctgttctgcacaatagctcgtcatcgtcaaccaccagcatattccaggaagggagcaccatatccacctccattgcggcagctttttcaaaatcaaatgtaatacggaattcagtacctttgccaatttcactttgaacctcaatgcctccttccatcgcgtctacaatgtactttgtaatcgccattcccaaacctgcaccctctgttttatgtaccctggcactatctgcccggctataggattcatatatttttttcagaaaatcctgtgacatgccgattccattatccttgacattgatatgaattcggacatagttttctccttttggagatttttcttcagaaagggataatcgtatggctcctccctccggtgtatacttggttgcattcgacaagaggttcaataatacctgattcaggcgtacaccgtcgcaccatacattttctgttaatatattatcaacatgaatatcaaaggtttgtttttttgccttcacttgtggctgcataatgttaacaatgccttcagtaacttcttgcaaagaaatctgctcggttgttaacgtcaatttaccactttcaattttagacatatctaaaacatcattaatcagccctaatagatgtttgctggacaatgtgatttttctcagacaactctgtacctgttcccggtcatccatgtgggctgttgcaatggcggtcatgcctactattgcattcatgggggtacggatatcatggctcatattggctaaaaattcacttttggccttgctggactcaagtgctgtctgacgggccttttccagttcatgcagctgagaacgggtcatggagtaataccgaagaaaaatcaatgtcaaaataaatagaacagaagcgcaggacagcaacgtcatgaccatacgctgactgctcagactgtttatggtatcgtccaatataccataaggcattaccgctaccaaataccattcagaataaggcaatggtatgccataaatttgccgttcttccccattcacttcaaatgtggcagcatactttttatgatctttcagagcaataccaaattcatcaatagaattttcttcagatgaatcgttttcttcaagagcaagatgcttttgcagctcttcaaaaaaaggccacagttcggtgttgggattttgtattacaaaactgccgtccggcctgataatatggtaatacatcagctgccctttatcctccagggaaagaaaatcagtgatgtattccagcggcaccgctgctatcaggccagtgctcttatcgccattctgcataggataagcagcatcaacaccaaataataccacttcattttcatctgaatcaacacctacggcaactcgctgttcactctgtaataatgcttctacaaaaggttctgggttgagcggctgtattgggtgtccgtaaagagtttcgaaatttccctcagcagaacaaagcgctaaatagtcaaaatccctgacctgtgccctgtaaatgagttcctcatatagtgcctctttgtcgttgttatctgttgaaaccatagaaacaatgccgctgacctgatcaaaacgcaatttaattactgtttcaaagtgtcgggacatttgttcattcattccggacatatagatctctccaactttgtaaacggcctttctgctcttttgactcatataaattcccagaatgctgaaaataacaatactaaagataaggagcccaatgaagctgtatatcagaaattgtatcgtagtatcatttttttgtctgcctgccattgacgttattcctccctaatgtgtaatctctttcatgccaattttacggttttattataaaggttatctttatcaacgtgcaatacccatattggtaaggagtgcaaataggttacagcttttcatgctgacaagtgtggaacttcatgatataatccagacagaggagatacgatatgaaaccacaggaaacaaaatttacatttgtatataacgaaattaaacagcgcattttggagggccagatacttcctggaaattctttattatcttcaaggatgtattgcgagcagtttcatgtaagcagatacacgattaaccatgtttttgaagcattgcgggaagaagggctgattgagattcagccccgccttgctccaatcgttgtttcaggaaaagatacgcctgattcattgaatactgtttttgaaattttgaagcaaaagcagactatattgcaggtatatcagacctttacgctaatactgccatccctttttgtttttgccctgcagggctgcgatgtggagattatgccgcactataaacaggctatgaaggtactgcgtttggggcgccttaccggcggatggcgtattccttctaatttgggatatgatatattaaggataggaggaaatcccttattcggcgaactttattctgcatttggcctttacaataagttctcatttttcatagaggaatgcccctgtttcaggaaacactttttacagaagcctgcacctgcgaacagcgttattatagacatattaaagggcaaagatccgtctgcaaagcaccgccagttattaaatatgtatcaggctcttacagactccattgaaagcacactaaaaaatttaagggacacgacgcctgaatgtcctgtgcaaacgggggtgccctttgcgtggaatcccatgcgcggccaggattattattactcgaagattgttgacgacctgaatctgaaaatcggccttggagaatattcgattggcatgtatcttccatatgaaaagcagctggccggacagtataatgtctctttatccactgtcagaaaggcattgtcagaactggaacagagagggttcgtaaaaacattaaatggcaaaggcactattgttatagaaccggatgatactaaaattcaccggctggctcttaattccggatatgtagaaaaggcattgcgctaccttcatgccctgcagctcatggccctgctgattcgcccggcggctttggaggcagctttgcggttcaccagagatgagctggacgagttggcggacagatttacatctcccggttccgcttatctggcagatatgttggaagccatactaaaacataccacactggaacctttatatgttatattatctgaaaccaatcatcttcttgaatgggggcatcattttgcttattatccgtccaagaggcgtacactttcgcatctcaataaacaagttatcgctgcgttccggcaattaaaccagggtaacgcggattcctttgcagatggtatagcggattgctactgttatatcttggtttgtatgaagaagcatatgacagaaaaatataagttttctaacgcgtctaatattcggattcctgaaaaatactaacattttatattcacatatgaaaagcagctgattcattatgaaccagcctctttttttattaaaaaggcgggaaggtatatttgagcggaaatcaaatagtaaattcccttccggcacattggcggtaaattggtctttaagcaaaagaaagttgatgatatagtaaaaccataaagttgattcgcggtaaggcttagtaagaaacacacaatggacagcggataattcatgaattataaaacaaaaaaacaaggcgccatcatatgaatctgatcacttcttatgaatggtaattaggaggtttatcaatggctcaaatactaccgtcaatttttggagcagatattctgcggttaaaggatgagattgaatttctggaacgtgaaaacacggctatcctgcatgtggatatgatggacggcaacttcgtctctaacattgccttcgggccaaaccagataggggctatgaaaaaggcatctaaaatgatgtttgatgtgcacatgatgattgaccatccaaaggaccatctggatgatgtgattgccacgggagccgagatgatatcggtccactatgagtccacgcctcacatccataacatgatccagcgcatcaaaaaagcaggaagaaaggccggagtcgtactcaacccgggcacaccggagtcagtgcttgaatacttgctggatgatattgactatgttcttatcatgaccatcaatccggggacacctggccagacattcatagaaaagagccttgaaaagattgccaatctgaaaaaaatgattggcagccgtcccatccagattgaggtggacggaggcgtcaatgatgttatagcaaagcaggtggccggtgcaggagccgagctgattgtagtcggcggatatctctttggaggcaatcccgacgagcgctacagcatactgcgggaagcagtgaaatagaagctgcggcagggctatggaacgataagcatgacaccacaagaatagagaggatggtataaagatgaaaaaatttgagggaaaagtggtattggtgacaggagcaggacatggaatcggaaagcagatcgcagtacagtttgcagagcagggagctaataccgtaattgttgattataatgtggaattcggtacagagacagcagaagaaatcacacgtgattatgtgaagtctctgtttgtccaggcggatgtgtcaaagccggaagatatggaccatgtgcgggagaaagtatttgaggagttcggacggattgacacccttgtcctcaacgccggggtggccttcaaaaagaaggtaaatgaatttacatttgaggagtggaacaggaccatcagcataaacttaaacggtctgttcaataccgtaaaggcgttttacaatgatttcctcacaaaccacggttccatcgtatacatcagttccggttcagccttaagcggtacaggcggagccgtggcctatccggcctccaaggcaggcggcgaagggctgatgcgcggactggcaaaggagcttggaccaaaaggcgtaaatgtcaatatcatcgcgccgcgcctgattgacacaggggatatgatgcgtgtaaattatcccacccaggcagagctggacgctgttctggaaaagattcctgtgcgccgctacggtacggtccgggatgttgcaaacctggcggtgttcctggctgacaaggacaattcatacatccaggggcagacgatccttcttgacggcggccgtaccatagcctgattttaataaagaaggtttacagataaaaagagggggtataaaatggaggcaatattaggattttttcaggaatttatcaatttaggcgcagccatacttctgccggttgtcatagccatattaggaaaattctttgggatgaagctgggccatgccatcaagtccggattactggtgggaatcggtttccagggactggttctggcggtcaacctgctgattacaacaatacagccggtcatggactactataaggcgctggggtcgggatatgacgctctggaggttgggtttgcagcgctgggggctgcatcctggaccgttccctttgccgtgtttgtcatcccggccatcataattgtgaatctgattctggtgcgcctgaagattacaaaggtactgaatgtggatatctggaatttcatgcattttcttgtacccggcgcattggcatatgccctgtcaggaaacgcagttatcggtttcctggtagccgtggggtgcggcatcgttgcattgttcttttcccagtggctggccccgaagtggggggaattcttcggactggaaggaaccacctgtaccacgctggcgttctgcgcctgggtatatcctgttacatatggactcaataaaatcattgacctgattcccggcctgagggacgtggatgtcaatgtggataagctgggaaagaaactgggaatctttggagacccagcggtcatcggactgctggtgggcgtattcctggccttgctgaccagacaggacctgggggcgttactgaccatcggcatgggtgtcgcggcatccatggtgctgattcccagaatggtaagcgttatgatggaaggtctgactcccatgggcaatgctgccaatgattacatgcacaggaagattggcgatgacgcggatatttacatcggtatggacatcgcccttggattgggagacccggcctgtatcacatgctcggccattatgataccggtcaccatcctcctggcattcctgattcccgatatgaggtttttccctctgggaatcctggcagaggtttgctatctggctcctatgtgtgtgctgaccagtaagggaaatatattcaggactctgatctgcatgacagtcatgatgttcattaccttgttctttgcgaacatgtttatacccgaagcaacgcagatgctgtctgtcaccggcgttaaatttgaaggactggtaaccgcatcccactttggctggaacccgggcaacctgttggtatccctgctgcacagactgtttggaatgcttggttaagaataggagattagtatgaaaaatagatatttagtgattcacggttttgccagggacagatatgaggcaatcaccatgtgcggtgaggctctgtataaggaaggacttgtcagcgaacagtttgggactctgtgcgtggaacgggagaagaattaccctacaggactgcccacggagattcctacagccatcccgcatgccaaagatgagagcatcacacaaaacagtgtttgtttcctcaaactggaccggcctgtttcttttaagcggatggatgacgatacccaggatgtcagtacagatatgattttcaacctggcaatcaaggatcccaatgaacatcttcaggcgctgcagaacatgatgggttttttaaatgattcggaagctctgttaaaatgcaagagcctttcagacgaggaactgattgaatacttacaggaaaagataggatagtcagggaaatccctttcacgtaagagatgaaaaaggagattggttatggaattaatggatattgtcgctgaattaaagaatgcttccgtgcagatgccggaagaaaaaatcgaccagttcatagaggcggttgacactcatgagcgaatctttgtatacgggaccggaaggtccggcctgatgttaaaagcgctggccatgagactgatgcagatgggatatcagtcctatgtggtgggggagaccacaactccttccgtgggaaaaggggacctgttgattgtggcttcggcttccggagagacacagagcgtgtgcagcgcggcagacgacggggctaagcagggaaccgacgtgctggtgatcaccggcagcaaggaatccacactgagcaggaaccatgagccgcttatccggattgaggccgccaccaagttttctgagtcaaaggcaagcatccagcctctgggcagtttgtttgagcagatgctgctgctgatttttgacgcggtcatccttaagatgagttcaaaaaatgcggatacgaacaagaagatggcaaagcgccatgcaagcatcgaatagtaaaccttaaagaatccatgtatggggcgggatatgagtcatataacattaaacaataacactgtagaaaaggagaaggtatcatgacaaaagaaatcaaaattttagtagcatgcggcagcggagttgcgacttcaaccatcgcacaggaggcagtaaaggaaatagcgcagagggcaggggtcaatgcaagggtatttaaggccaccattgcggaagtgccggagaggcagcaccatgtggatattgtgctgaccacagccaattaccgccagcctctggagaagccgtacatgagcgtgttcggactcatttccggggtcaataaggccaatacggaaaagaagctggaggagctgatgaagaaggttgcggcggagtaaagcgcagccgttcagacataaggttgatgaagtgcaaaagggagagtatataaaatataaaatggtccggtttccaggtgcttgaagggaatagccggatttaagggaaaagactttgcggcgcctccggatcaggggacgctgcagatgtcgtgtagagacgcagcagtccatctggccggttggactaatttgaaagtggtgggtgtaaatgaaaaagagaagtaccgagatattacagcggcttctgaagaatccaaacgaggagctgagcctgaaaaaactgacagatgactataacataactgaaaagaccttaaaaggcgatgtgcaggagcttgtggaatttgccagggaatccggtttcggacactctgtatactgggacaaccacatactgcgtctggatgaccgaaagcatatcagtgagttcatggacgcagtgtattccatggatccataccagtataaaatgtcgctggaggagcggaaggtttatattatcattgaattactctgccatgatggttattattccatgcagcagctggcagacgaactgtatgtcaccaggaataccatcataaatgactgcaggctggtggatgaatatgtaaaaaaatatgggattatctttgtggccaaaagtaagaagggaatcctgctccagacagaggaggataagacccgcgggctgctgattgacatatttaagggtctgattccatccataaaatgcgagaaggatttttttgtacgttttattataaggcgggcggggtttatctgccctcttacagatgtcatctattatatgaactgtttcaccaaggacaacaatatcatatttgcaaaggatgtattttttgaaattgccatctgcatctttgtcctgctcaaccggttagagcagaccggatttgcagagaattccacagaacccggcctgccccagctgcagctggacaccattggcaatatgatacattatgtggcggaggagctgggatactcagccatagggcataacgggattctggttatggagaggcagattcttctgagaaatctgcatccccaggtacagagcatcaatgattttgagctctatggtgtgatctgccatttcctgctggaaatcagccgggaaatagatgtggatatccagtcagacaatctgctggtggaatcgctgatttcccatgtaaagggcatgaataactggaatgacgcggattatgactgggacatagggtatgagacctccggggagttcccgcgtatcagggagcttgcggaggataagttctgcatattggagaagtacctccaatacagccttacacccaagatgaaagacagcattattatccatatatgcgcggccctgctgagagggaggaagaacagcagccccctgggagttattatatcctgcccaggaagcatggctaccagcaagtatctggaagcccagattaagaattacttcaatttttatgtggtggacaccatgaccaccagacaggtggaggcgtcaaagggctgtttcgaccaggtggactttgtcatatccacggtaccgattcaggactgcgtgctgcctgtggctgtggtcagccctttgatcacggtggaggatatcaacaagatacaaaaccttgcatttaaacagaaaaagactgttctgccggatgccagggagcgttttccggtgctctcaaaaatctatgcgatctatgattcaggggaccggcggaaaatcgaatatctggaccgtgaactcaagcagattctggaggatgccttctatgtagagtccaagattggaaaagagtttgcgctgctcaacatgcttaaaataaagtatatcaaggcaagggacgggaaaatggcctggcgggaggctatgaaggctgcctccgaggacctgatcagagacggatactttgatgaacgttatgtgcgggaagccattggaaatgtggaggagtacggcagttacatcattgtaaataaaggaatcgcgctggcccacgccaggaaggagagcggggtatacgaggacgggctcagcctcctggtatcaaaggacggtatcctgtttgatgagggcgagacggttcacctcttgttcttcttttcgcagaaaggtgaaacggactatctggacctgttcaaggaaattataaaattaggtaaagaccaaaatgatgttgacagaatcagaaatttaacggacagcatggagatttaccgcaccatgtgggagatattatccagaaattgatgcggcgaagtctctgtttttcattacttgtccattggaagccggactgtgaacacggatccctcatctggccggctctccacagcaactgttccattgcacagtgtgacaatttttttgaccagggccagcccaaggccattgccctcaatgttgcggttctgctcaccctgatagaatttgtcaaatatgtgggactgtacctccggtgtcatgccgacgccagtgtctttgatacacacctgaatgacttccggtgtctgacagcagcggacgctgatggaacctccgggtggagtgaatttgactgcatttgaaaaaaggtttgtccatacctggaacatcaggttctcattgccatagtaaagcgtttcaggcagatccatatcaatgtccaggtttttaggttcccacataggcgccaggctgagaagagcctggcgtatttgttcgtccaggaaaaaggattccttttgggagacgataccttgattctccagtttggatattttcaggatattaccggtcagtacagagagctgccgggcgctttcaaggatatgcccggagtagacatggagctcgtccgggagggagactccgtttaacaaggtggcatagccctcaatagaggtaaggggcgtcttgaattcatgcgacacattttgtatgaagtcggactggagcatttccatggaattaagttcctttaccatcttgttgaagttggcgttcatattatacgcataggcatcctcatggttttcaggaagccggacggtgaaatccccttcagcaaccctttgaagagcttcgatcaggttttggatgggaaccagaagacgctttgacacgatgagaatcagggaaacagataccagtatagctgctatcagcagggatataagcggaaacaggcgggcggtgacgctgtgtatatccgatgaaaaaaatcggaaggaaagcgtacctgttataaaaaccataacaaacatgattatgatgacatggattgaaagactaagccacagtctgataccgttcttcattgcaccaccgccttatacccaagtccccgaaccgtcattattttaaaatcatggttatgttcaaaatgcctgcgcagcctgttgatgtgtacatcaatggtttgtacgtcagaggcagtgccgggtccccatatctcatccataagctggatgcgtgtgaaaatcttgttgggataggaaaccagtttatacaaaagcaggaattccttctgaggaagcatgatggaatcctccccgcaggagactgtcagggagtcataatccagacaggtagcacctaccatcagcctgcgttcctggttgatattggctctgcgcatcagtgcttttaccctgagaaccatttcgttcacatcaatgggtttggtcatatagtcgtcaatacctaaagtaaaacctttgcttttggaggggtagtcatctttggctgttatcatgagcactggaatcagcggattttcattgcgcagtattttcaccaggtcataaccattgagtacgggcatcataacatcggttatgaccaggtcgatatgttcctgatcaaagatgtcccatgcctcctgtccgttggaagccagaactgtctcatatccggctttgtttaatacgattttataaagctggcttaatttttcatcgtcttctacaatcaatatcttcagcatcagcatatgtttttcatcctttccccaatcattcaatatcagattaaaattatatggacattatacacaatgaatatgaaccgaacatgaatcggacagataaacaaaatgtgaacattttgtgacttcatgttgacttcatcttgggtttaatgatggttcatttaagtttagtaacataaggtctgtatataaaacgtgccgttttactggggccgtgaaagaatgaggaggaaaacaatatgcccacagaacgttttgataaacttccggaactgaaaaaaaacaggataagcgatgccatcagtgaggcgtttatgcacagaggaacaggagatatccatattacccagatagccagaagcgcccgggtttccagggggagtctgtatgcatattttctcagcaaagaagatatgctgtttttttcgctgtgccagacgcagcggtttatctgggaaaataacaagaagattcttctggaatacgggggagattactggaaaatgctggagaccagtctgagatatcatttcagcatatgcaggaccaaccgcctgtaccgcctgctttatctgccgatagagggaaatgagagtttcagccttttgtcccgttcgcttctccatgggaaagagtacatggaatataaagcctggatttatagacatttaatgcctgcatacagggagcggttttccgaagatgaattcggagtgtatcaggatacctgcaatgacattttgacggtttccatccaggaatacatatcaggcgccggcaaaaaggaagatattatggcctgcttccataacaaaataatttatatcaggccggaagtaaaacaacagacagtgtagcccagagagaggagaagtatgatgaaaaaaggtgttattgtgggcgtggctgcagcggtggttatctgcgcggcagttattcccagattcatgaataataaacagtttgcggaagcagtggcgcttccggtgatggaaacagcatatccccagacaggcgatatccggcttaccacaagtttaataggaaaggtggagccttcggatgtggtttacatttatcctaaggcagccggggatgtgacgtcggtaaatgtaaaggccggggatgttgtgacagagggacaggtcatatgtaccatagacacaaaacaggtggagacagccaaaagctccatggaagcagcggccctgacccttaaggaggcccaggccgaactgggaaggcagcagattctctataacagcggcggcatttcagaacaggcctatgagcagtacaggaacaaggtggacagcgcccggatccagtatgagcaggcggagtttacatacaaaacccagctggaatacagtcagattacagctcccataagcggtttggtggaaatctgcgacatggaggtttttgataccgtatcccagaataatttgatctgtgttatttccggtcagggggcacgggtagtatctttttcggcaacggaaagaatacggggttaccttcatgaaggcgatgaaatagaggttgaaaaagagggaataaaaggcagcggcgccatttatgaggtcagcacaatggcggacagcaccacgggcctttacaaggttaaggcgaggctggaggatggcgatacattccctactggttcagaagtaaagctttacgtggtttccgaaaaaaccgaggatgcaatgaccatacctgtggattcggtttattatgataacggcaatccctatgtatatacctgtgagaacggaacagtccacaaggtatttatcgagactggtatctacgattcagagacaattgaagtattgtcgggacttaccatggaggaccaggttattacaacatggagctcggagctgtacgaaggagcacaggtaagggtgctgggagaagagcaggagccgcagcaggttccggggcagatacagacagaggtacaaacccagacaacagaacagacaacagaacagacaacggaacagtaagggggacataaaggtatgattaatttaacaaaatatgtcctaaagcggccggtgactaccataatgtgcatactctgccttatattttttggttatacgtcggtaaccggagccacaatggagctgacgcctgaaatggatatgcctatgcttctggtcttaactaactactccggagccaacccggaggacgtaaatgatctgataaccaaagagatagaggaccaggtggggtctctcagcggccttaagtccattacatccgcctccagcgagggtatgtctatggtaatgctggagtatgagtatggtacggatacggatgaggcgtatgatgacttgaagaaaaaaatcgatctggtgaccactcagctgccgaatgacgcggatacgccggtaattatggaactgaacatggattcagccgcggatattactctggccattgacaatgcgtctcagaacaatctgtacagctacgtgaacaacgagctggtgccggagtttgaaaagatagcggttgccgctgatgtaagcattcggggcggttcggatgaatacgtgaaaatcgaggtgataccggaaaaggtaagccagtataaggtctctatctcttctatcgcgtcggatatccaggctgcagacctttcctacccggcgggggatacgcaggtgggaagccaggagctgtcagtatccacccgtatgacctataacacagtggaaaatctgaagaaaattcctcttactgtgcccagcggggatacggtatatctggaagatgtggcaaatgtatatacaaccacggactccagcagcagtatagcccgttatgacggaaacgacacgatttctgtttccatcagcaaacagcagagcgctactgcaatggaactgtcaaaccaggtaaaaaagaccatcagccgtctgatggcagaggacccggatttgaatatcattctggtggacgactcatctgattccattatggagtccctgatgtctgttgttgaaaccttaatcatggcggttgtgatctcaatgattatcatatggctttttttcggagatattaaagcctccctgatagtgggcagttccataccagtgtctattctggcagcatttatacttatggatctgatgggattttcactcaatgtaattaccatgagcgccctgaccctgggggttggaatgatggtggataactcgattgtagtgctggagagctgtttcagagccacggcttcctctgaaaaaaaggcgggtctggtggaatttatggacaacgctctggagggaacccgggtcgtgggcgcttccgtacttggcggtactgccaccacctgcgtggtatttattcctctggcatttcttgagggcatgacagggcagctgtttaaacctctcggatttaccattgtattctgtctgaccgcttccctgatatccgctgtcacggtagttccgctgtgctatatgatttacaggccgagggaaagacagaaggcgcctttgtccaaaccggtttacaggcttcaggacacataccgcagcgcgatgcgcgtgatactgcctaaaaaaaagactgtcatgttcatttccataggattgctgatgttttctctgttcctggcaacaaaactggatatggagctgatgggctcagatgataacggtgagattacgatatctgttgatacaagaccgggacttatgactgaaaaagcggatgagattctcagggaaatcgaagggattattgttcaggattccaatctggaatcttacatgaccagctacggcggaggcggaatacgtgctgatgattcagctaccataaacgcgtatctgaaggacgacagggacatggatacggtggatgtggttaagatgtggaaaaagcagctggcggatgtgagaaactgcgatatatccgtggaaatgagctcatccatgagcatgatgtcctcggccctggaaagctatgaagtgattctgaagggcgctgattatgacgaagtaaagagcatctccaataagattgtgacccagcttatggagcgggatgacgtgacaaagatacattcggatctggaaaattcttctccggtagtggagataagagtggatgccctgaaggctcaggcagcgggattaagcgcgtccaaaataggaagcgcggttcacaatgcgatcagcggcgtggaatccactgaaattgaaatagacggaaacgatatagatgtaaaagtggaatactcggatgaggattataagaccattgaccaggtaaagggccttgttctgaccacgggaagcggaggctcagtggcgctgacggatgtggctgatgtgcagttcgtggacagcccggccagtatttccagggaagataaggaatataaggtgacaatcagcggtgagtatacagagctggccacaagggaaaccaagatgcggattaaccaggaagtggtaacgccaaatcttactccgtctgtgagtataggcctcaattccattgacagctctatgaacgaggagttttcagccctttataaggccatcggaacggccgtattcctgatattcgtggttatggcggcccagtttgagtcgcccaggtattccttcatggttatgactaccataccattcagtttaataggagcctttggactgctgtttttaacaaactgtaagattagtatggtatcccttattggatttttgatgttaattggtacggtggtgaataatggtattctgtttgtagatacggctaaccagtacagggagaccatggacatggacaccgcgctgattgaagcaggagcaacccgaatcaggcccattcttatgacaaccctgacaacaatcatttccatgattcccatggccatggctatcggaaactcaggaaatatgacccagggactggcaattgtaaacattggcggtttgaccgcttccacggttatgtgtctgctgatgctgcccggatactataagctcatgagcggaaacaggaaaatcataaaggaaaaaagaggcggcaggagaaaaccctggccggtaattgcaggcagctttaagaagaaccttaagagaaacagaaaggataaggggaggagtgaagaatgaaaccacagatgacctttatggcaaatggccgctgcatcctggttctggcgctgacagctgtcatggggggattgccccccatggcagccctgggagccagtccggaatttgccaggacagagcaggagtgggcccggctgcaggacaatgtaatagaatacgatgaaattccggatttgattcatgaatacaacgcaacggttcaaaataaccagtatgattaccagaaattccgcgaggactatggggataccaattccgatgtggctgacgcgtacaatgatctggctcaggatttttacgatgacatgtctggagagacagacgccggttccatgatgtcagaccttcagctggatattcaggcgaggaatatgctgaaacaggcagacaatacactggaggacagcaaaatatatctcctgacctatgagatggccgaggataatctggcggccacggcgcagtccaacatgatatcctatcataaaaaacagctggagctggagcaaaagcagacggacttggagctggcaagggaaaaatatagtttagaacaggtaaagcaggcagccggcacggttacggcagtggatgtgcttactgcaaaggaaagtctgcaaagcagcgagaacaatataaaagaactggaatcagggatagagaatctgaaggaggaattgtacatttccctgggatggaagcataatgattcgccggatataaaggagctgccgcagatggatgtaagccgcattgacggcatggatccggaccgggatctggagacagccctggaaaacaactatacattgaaaataaataagcgcaagctggaaaatgccagatcaaagacaacaagggaatctctggaaactaaaatcaggaataatgaaaaacagataggggcatccctttccagcgcgtataaaaacgtgctttccgccaggctttcctatgaacaggcggtggcagaggcgcagttggaggaaaccaatacaaatattgcagccggaaagcttcaggccggcatgatgaccagcctggaatataaggagcaggagtataaaatggaaagcagccgtttaaatgccgaaatggcggccgtcagcctgttccaggccatggaaacctatgactggtctgtgaaggggctggcgtcggcagagtaggagacaatgggcggacgtgcaggacagacggcggggagcaggcagagcaggaggtgcggaaatagaatggacaggataacaggcagagcagaaaaaaggagaagaacaggaaggaagcgttttctcatcactatgctttccttgtccctggcagccggattatcagaagtaacggcattgacggcagccgcggctgcccagaacggacctggagatacggaccgccaggaggagtatctgggacaggagaggaatgaaaaactgaaggatgatgtgctggagtattcggaacttcaggacatgatacggacctataatcccacggtcctggaggtggcggattcctataacaaaaccatcatggactatgagaatgcctgggctgaattaaaactttatcagggacgggctgattctgacaaggatgacgctaaggatgcaggcaatgcggaacagtatacttattatactgcccaggaacaaacctacaaggcggcagccagctcctattataagatgctggacaatatgaaaaaaactgcatcctccaccagtacccagagacagacggaacggcagatgaccgtggcagcccagtctctgatggtgagctatgagacgctgaggcagcaaaaatatacccttgagaagatggaggaactgtataagacacagtacgagcttggaactgtaaaggagcaggcggggactgctgccgccgcggaggtgctctcatttaagaatcaggtgctggcagctcaggcatctctggctgaggtggaagccaatatggaaagtatatataacagtctgtgtctgatggttggacgtgaggcggacggaagccttcaggttgcgtccattccggccgcggacccctccaggataggaaccatgaacctggaggaagataccgcaaaggcaatagggaacaattatacgctgatcagcgaccgtcattcactgaaggtggattccacatccagctccaattataagcttaggaccatggaagacggggaacagaagctgacatcgaaaatgaaacgtctgtacgaagatgcagccataaagcgggatgccctggagcaggccaggacaggatatgagaaggcccggataaataagcagcaggcagataccaaatatgcaattggtatgctgagcaaggacgagtatttgatggaagaactggattacgtgcagaaggaagcagattataaagcagcggatttggcgttgcagcaggccatggacacatacgattgggcggtgctgggcatagctgatatagaataagggtcaggcgaaaggacggatatggatgaaaaaaatcagggtggcaggatggatgacaggtatgggggcagcggcagcggtacttgcgctgtccgcccaaacagcctgggccggaagctggattgaggaacccatgggctggttctatgagaaggatgacggggagacggtacgaggctggaaccagattaacggcatttggtattatatggacacggaaaccggcgtgtggcaaaaagagcctgccatcaaccgggcaaacgccccgtatctcatggaaaatatgatggcagaggcagggctttaccaggatgaagaaaaagagatggaatacagggtgcagtacgagacaaaagacaccatagaggttttggcaggttgggaagaaaagccgggtgtattccactctgttaatacgtttgaaataaataagaaaacaaagaccgcaatatcgagtgtaaccaaggaggagtatggagtatattaaccatatggtgggaatctgtgttaccgaaaaaggagaaaatgtcaggctggacatctattgcaaccagggcagatatatggaaagaaagacattgagatacaggaaggaagaatctgccctgtgtgatgctgccctgtacggattgctgaaaagaagaacaggtgatgccccacaggactgtgtaaagggaggaatagagccaagtccctctctgaaggaaaagagcgaattgtgccgctgtctgtccaaaacctatatggtgggaaagcgcataggtcccttttggtgcttcaagggaatgatttcaggcaggctggggcagaggaggccgttatcagcccttttatatgatacagaatacggccagattgtgatagcagcctgcggccctgaagtcaaaacatggtatttgtttgagggagaggcaggggcagatataggaaaaaatggaatggataatggatatatattatctatttggggcatggggaaggttctccaaaaatttttctttaaaacaatagtaagctattgaaaaatacgagtgattgtgctatgattttttgcagtaataaggaggtgaagagatgattgctcagaattcatgcggcgcctgtattaaacagatacatgatgcgctggaaaaaaatgcaaataatgcgctgcgccatcaggatttgaccatggcccaggtaggagttttgcttgctctgagcggtgcgccggattatcagctgacactaaaggagctggagcatgcacttcatgtggcccagtctacggcagcaggtattgtggcgcgtttggaacaaaagggctttttagagggcttcggggacccgtctgaccggcgcgttaagatggtgaggcttactccggcagggatagaatgctgctgcgaagcggaagataacatgaaaagggcggagaggatgcttctgtccggtctgacagagacagaacaggggattctgggcagcctccttcgcaaggttcgggacagtttgatataaatacccgctgcgcacagcgggtattttgcagcaaaaataatagcatgatattgatatgatggaatttatctggcgcagctattcaattattaacttgcggcggagtgcgccattttccaggataggaggaaaactaaatgaaaaaaagcaatgcagcagacatatttggtaaagcgcctgtgtttcaggcggtttttaaaaatgctctccctgctatggcggctatgcttatggtattgatatataatctggcagatactttttttataggccagacacatgatgccctgcaggtggctgccgtatctctggcgacaccggtatttcttatatttatggcggcaggaacgatttttggtattggcggtacgtcagttatatcccgcgctataggggaaggcaggcatgagtatgccagaagcgtgtgcgcgttctgtatgtggagctgtgttgccgtaggcattgttatggcagccctgtttcttatttatgaatcagatactgggatggatgggcgccagcgcggatacctgggagcttgctgagatttacctgactattgtaagcctgagcggtccatttgtccttatttccaactgctattccaatataatccgcgctgagggacagtcggggaaggccatgatgggacagcttttggggaatcttctgaacgtaatactggacccaattctgattcttggttttggctggaatatcgcaggagcggcgattgccacagtgattggcaatattgttggtgcaggatactacatcctttattttaagggaggaaaatcctccttaagcattcaagtgaaagattttacaaccaggaatcgggtgtgcagcagtgttctggctatcggtattcctgcgtctctgggctccctgcttatgagtgtttcgcaaattattgtcaacagcctgattgcggaatttggggatatggcacttgctggaatgggagtggccatgaagataaccatgattaccggtatgatatgcattggttttggccaggggattcagcctcttttaggctactgcgtgggcgcgggaatgtggcggcggtttaagcaggtgatgaaatgttccatactttgttcctttgggcttagcgcggtgatgactataatctgctatttttttgtcaatcagattgtcagcgtattcctgacagaagcgtctgcttttaactatgcggcccggtttgcccgaatcctgctgtgtaccagcttccttttcggtatgttttacgttctttccaacgcactgcaggccatgggggctgcaacagaagcccttattatcaatctgagccgccaggggattatctatattccttcactgttcctattgaaaatggccattggactggacggtcttgcctgggcccagcctgtggcggatatactctctacaggactggtggctatcctttacatcaggactgtgaggaagatggaatataattgctccattttatccggcggctgtcagatggaatcttaatttgtgacagcggatgacagaatgggatatgctgtgatgaaataaaatatgatagttggatgtggtattggcgaggcgatgattaaattgcctcgctaattgtatgtttgcgcgtcctccaagactgtcatgcctatctgagcgccgcctttcataagaaagtggcggttaagtaaaaaaagactaaaggttagaaatgacggaaagtttactataaaaatgaaaggtaaactttgaaaggtttactgagaaaacgaaacagcgggaagtaagaggggaaataaagaaattaccagtttatggtgatggtatatgtgataaatgcataaaaaatagggaaaagtactatgcaatatgcaagaaaaatatttaaaacaaaagaagatattgacaatcattgtgaatagtactatactccaaatatcggtaaaccaatttactaaaacgtgacatttacaggggacggaaaagattgcttgaagatgtagtaaactaataggaagtaaacctggaggaaaactgacaggagaaaacaaacaggagaaaacaaaacaggaggaaggaaaaagcatgacaggaatcattgtaacaggacacggaacgtttccggagggtattttgagcgccgtctccctggtggccgggaaaccggacaacacggaagcggttaactttgagatgggacaaagttcagaggatttgaaggactccatggcaaaggccatggaatcactggaaggggatgaaatcctgattctggctgatttggtgggaggcaccccgtttaacacggcagcagccctgagaaaagcgcggacagacaagcgaatcaaggtaattgccggtgtgaacatggcagccatggtggaagccgtgttctccagacctatgtatgggctggacgaactggcggtggcgctgctggcagcaggcagggaaggcctgcgggatttggatgccctggacagcgaagaggaagcaccggaatttgaggacggactgtaagaacggattataagatcgaattataagatcggattgcaggattggattacaaaatcggattacaggggcggattgcaggattggttaacattccaatccggctcgatgtaaggaaaggatggggattgagaacgtgattaagaagattcatgtggaaccaatcaacaggaaggctgaatacgaggcagcggggtttctgaccagggaagaggttacggcagccatggaccggatggcggaccaggtaagatgcaatatggagtactttggcaccagattcccttcttcagccaccaggaaccagacatacggagtcatagacaacatcgaatggacggacggattctggacaggacttctgtggctgtgctacgagtacacaggagacgatgcatttaaaaatctggctcttaaaaatgtggattccttcctgaaccgggtagagaagcgcattgagctggaccaccatgatctgggctttctctacagcctgtcatgcgtggccggatataagctgactggttctgcagagggccggaaggcagggcttctggcagccgataagctgatggagcggtttcaggaaaagggcggtttcatccaggcctggggagagcttggagccagggacaactaccgcctgatcattgactgcctgctgaatattccgctgctgcactgggcttttctggaaaccggaaaccctgtataccggaacgcagcggtgcggcattatgaggcggcctgcaacaatgtgataagggatgacgcctcagcgtaccacaccttttattttgaccctgggacaggggaacctcttaagggcgttaccagacagggatacagcgatgactcggcctgggccaggggccaggcatggggaatctacggtataccgctgaattacagatacgtcaaggatgacagcgccttcaatctgtttaagggaatgaccaattattttctgaaccggcttccggaggatgaggtatgttactgggatctgatattcacagacggttcaaatcagtccagggattcatcggcggcagccattggggtgtgcggtattcatgagatgcttaagtatctgccggaggtagaatccgataagaatacctaccgccatgccatgcactgtatcctgcgctccctgatggaacgctatacggcgccggagataaaacccggaaatccggtgctgctccatggagtgtattcatggcattcaggcaagggtgtggatgaggggaatatctggggagactattattatatggaagcccttatgcggttctataaagactggaatttatattggtaagaaaacatgaaaacccatggagaataaacaaaatgggcttataacaaggaggatatgaaatggcagtacctaatatagtagcattcaggattgacgagaggctgattcacggacagggacagctctggattaaagctctcggcgtgaatacggttatcgttgcaaatgattcggccagcgaggattccatgcagcagacgttgatgaaggcagtggttccaaagaccatcgccatgcgctttttctctatccagcacacctgtgacgtaatcatgaaggcatctccgaagcagaccatctttattgtctgcaagacgccggaggatgcgcttaagctggtggcgggcggagtacctgtgaaggaaatcaatgtgggcaatatccatcacgctccgggaaaggaggaagtgagcaagtatattgcactgggcggcgaggataaggcagccttaaggcagctgcgtgacacgtatggagttgtctttaataccaggacaactgcttccggcgacgacggggcagccagggtggatttaaataagtatctttaattgtaaaatacacgtttaagaggagggaattatcgtgacaatcagtatgtttcaatgtttgttaatcggtctgtggacagccttctgtctggcaggcatgctgttcggaatttacaccaaccggtgcctggtcatggcagccggcgtgggacttattttaggggaccttcccaccggcctggccatgggagctgtaggcgagctggcatttatgggatttggcgtatcccagggcggttccgtaccgccaaaccccatgggcccgggaattgtgggaaccatcatagccattaccatgaaggattccggtattgatgtgggctctgccctggctctttcattcccatttgcagtggctttccagtttgtgattacagccacctatacctttgccacaacccttacaagctatgcttataaggccctggataagaagaatttccgcggcttcaggatagctgccaatgcaacagtctgtgtatttgcggtggtcggctttattatcggattcggcggcgccttcagctccgagggactccagaaggtgatttcactgattcccgcatggctcagcgcgggtctgggcgtggcaggcaagatgcttcccgccattggctttgccatgattctcaatgtaatggcaaagaaggaactgattccatttgtactgtttggctatatcgccattgcctacctgaaccttcctgtcatgggagtggctgttatcggtacggccattgcgctgcttgtatttttccatgccgacaaaggaaacggcgaatctgtagaagaagtggaggttgaatttgaagatggcatttaatcagctggagaaaaaagattatatgaaaacatccctgcgggcctatttcctgcagaatggatttaactatggcaattaccagggccttggctatgcaaatgtactttatcccgcccttcgcaagatgtacaaggacgacgatgacaaactccaggaagcattgaaggagaacatagagttttttaacaccaatattcattttctcccgtttatcaccagccttcatctggtcatgctggagaataagactccttccaatgaaatccgaaacatcaaaatggctctcatgggaccgttggcaggtatcggtgattctctcgcccagttctgtctggcgccgctgttcgccaccattggcgcgtccctggcccaggacggcctgattatggggcccatcctgttctttgtggccatgaacgtgattcttctggccatgaagcttctcaccggcatgtggggatacaaactgggcaccaacatcattgccaccctcagcacgaagatggaacagatttccaacatcgccagcatgataggtgtgaccgttatctcaggacttgcggtaaattttgtgaagatttccacaccgattcaatacgttgccaatatgccgggagaccagcagaaggtggtggccatccaggagatgatagacgccatcgcccccaagctccttcctgtattattcacaggacttattttctacctgataaaagtgaaaaagtggaccacctataagctggtcatccttaccattatcctgggtgtggtgctttctgtcctgcatctgattgcctagaaaaaagcggggaggtaccctttgacatgtatgcctgaagcatacagcaggggtgcctccctctctggttaataaatatggaagatcacagggggcgcagcagcccgcctgaatgagagaaagaccaaatggaataaaaaggagttatctatgggtgatgaacggtatgtacaagtaagagaaagagcagtggcctacgcagcctggtatgagaaggaacgggtgaccgcccatatcactgaaaactgccgggaggaggcaaaacaaattctggcgcaggcagacaggctcatgacgcatacattttcgtttgaggacagatgggatatggaaccctgccgtgaaccgtttacccttaaggaaatgatatgggacagaagccccaacggggatccggaatggattttcatgctgaaccgtcacgaatacatgaacaaactgcttattgccggctggcttaccggcgatacgtcatatgctgaaaagctgaaatggttcctgcttcattggatacaggcaaaccccatactgccagagggaaccgtgaccaccaggaccattgacacgggaatccggtgtatgagctggcagtatctgctgcttcatcttctgggagagggacttatagaggaaagggaagcgggtgaaatcctggagagcatgaaagaccagtttgccagtttgaggaagaggtacattggaaaatatacgctcagcaactggggtgtccttcagacggcatccatatgcagcgggtacctgtggtttcgcgaatatttaccttcagacggaacagaggactgggcctggaaggaactggaacgtcagattgggcttcaggtgctggatgacggagcccactgggagcagtccatgatgtatcatgtggaggtgcttctggcctgtatgaagctgctggcctcctgccgggccatcggccggattggaagcaggactgataaggccggcgcgggatatggctggggtgaacctggcggggatggagatagccggaaagaattttggcgcagtacagactggctggagaaggcagttgacaggatgagccgttacgtgctttttgccacgggaccggatcatgttcagatagcccaatgtgacagcgatgttaccgatgtgagggatgtgatggtgaaggctgctgttctaaccggtgacggcaggtacaagtatgcgggatatgaaaccgcggacctggacagcgcctggctgctaggcagtgccggaatcgccggataccgcgccatggaaggcagaaagccggagagccggtccatggaagcagcggatgccgggcatatttttttcagaagcagctgggaggaggacagccattttacctacctgaaatgcggtccccttggaagcgggcacggacatgcggatttgacccatatatcgctctattacagaggccgtcccgtactggcggacagcggcaggtactcctatgtggaggaagaaccgctgcgcccgtttttaaagagcgcccaggcccacaatgtatgcgttatagacggagaatcccatggaaggcccaggggttcatgggggtatgacagctttggacagagctttaaaaattattaccgggaacaggggccggtccattacggggaaatggcttatcacggatgtcttatgtccggcgaacattatctggtcatccgcaaggtgatggcggtggaccagggaatctggatgattgtcaatgatatacgctgcgacggcagccatgaggtaaaggagtattatcacctggacagtgccgtgcaggctgcccgaacaggaccgggcaaggacgggaccggggaatactggagactatgctgcggcggggatgtgtcaatgacggtgctgggatcacgcccctttgagtcagagccctgcattatatccaaacaatataaccagaaagaaaaaagcacctgtctggtcaggaaaaccggctttacagaccgtatcacagactggacctgtctgttgggtgagggaacagaggctaagaaaacccctgttttccagtatggaagcagcctgcctgagccggaggaacaggtgacggccatgagcttttgcatctcgccggatgaatcctgggatttcctggtctggaatcaggagacatggcagggcggtaaaatccactattgcaaaggggtgccggtttatgcaaaggcagcagccattcacaccataaatgggaacacgacactttaccgattaaggatttaatggtatatttataagagcgatgcaggatgaggcgggtggaggtcagaatgaagaagttgacaattaatgagattgctgaacgggcgggtgtttcaaagacaacggtgtccttctatctcaacggcaagattaataagatgtctgaggagaccaaacagagaatacagcatatcattgatgagaccggatatgagccaagtgctgcagccagggccatgaaggccaagagcagcggcgtggcgggggtcattctggcggatacgtcggagggatactgcgccagggctctcaaaggaattgaggaggcggccagtgccctggagtaccagattgtggtcggaaacagcggtctcgctttccagcatgagaaggattatgtggaacgcatgctccggctgggggttgacggttttatagtccagtccacctaccgcttcggcatgctggcctcagacctggaaaaaaagaaaaagcccgtcgtatacctggatgccaagccctatgatttcaaggggcggtatgtaaaaagcaacaattatgactgcgtgtaccaggtgatttcggaatgcatcaagaagggatatgagaactttctcatgatttccgacggcgactccaatatcagcgcgggttttgagaatacccagggatataaggacgccattcaggacgcctggaaggagggcgccacccagtatcttcaggagggcgtgaagtccgatcaggtgtatgaaatgctgaaggaccagattgacctggaaaaaaagacgctgatttatgttgccagtccgggacttttgcaggtggtgtaccaggcgatccgcagatacccggattatatgaggctgtttcctgacacactgggccttatcggctttgacgcggagggatggaccagaatgacgaccccaaccatttccgccatcatcacgcccgcttatcaggaaggggtcagggccatggaagagctggccgacatcctggacggcaagaaaacagacggggaagtggtgtttaagaatatagtcaagtggagggaaaccaccctttgaccctttgattttcggcttctgttttttgccggggcggaattgtccatgatggaatttcgttaattcagttctttcaattgtaatcttattttgtatgtaatataataaatcagtagatatatttaaacgatagaaagaggatattgcatatgaaagcaagcgaacgtttagagattatcatagatgaagtgcagaccaacggaattgtcagggttgcggaaataagcgggcgtctggggtgttccgaggtgaccataaggaatgacataagaaagctggaccagcagggggttcttaagaaaacatacgggggagcggtccgcaaggaaaacggactctcggtggaattcattcccggagaatatttcctaaacagtgacaaaaaatacagaattgccaaaagagcctacgagtatattgaaggcggggactcaatcatcattgacgattccactacgggatattatctggccaaatatataaaggaacatgcagagaaacatctggcagtggtgacgaattctgttctgtccggagctgagctgacttcagccaggcatgtggacctttttattgtgggaggccatgtcattggtaatcctccggctgctctggataacataacagtaggagccatggggcagtttcatgttgacaaggcctttgtgggggtcaatggaatcaatctcaaaacgggtctgacttccatgggaacccctcagatggatgtgaagcgtgaaatgatacgggtggcggacgaggtttatgttattgccgacagttcaaagtttggcagcagaaatctctttacggtgtgtcctatgtctgaggtagacagggtgattactgatacagaaataaaaaaagaatatgttcagactgccaggaatctcggcattgagctggatcttatctgatggggtgttaaaatcagaggtttgtgaaaatataaaattttttaagtgggagcttttgtgctttgtgcatgaaggctcttttatttggcttttttattatccggcataaatacggactataagaaatgcacaaagaattgtgtacatattcttataaaaataacaattgacattttattattttcgattgataattatatatgtaaatatcgaaagaatatagaaataaaaaatatcaatcaaaaggagagactcatgaaagagaaatacaaaccgattgtaggaattacaatcggagacccggcgggaattgggccagagattatcctgaaggctttgggagagaaacatatttatgatgaatgcaggccccttgtcattggctgcgtgaatgtactcgaaagagcaaaggcagtccttccccaatgcagtctggaatttaacaggattgaatccgtgtctgacgcctgcttccggtttggctccatagatgtccttgaaacaggacactatgatatctcgaagctggtgtgggggaaggagcaggcggccgccggacagatagcaatggattccattcgcacatctattgaattagggttggagggagagattgatgcggtgaccacggctcccattaacaaggtggctattaagatggtgggggtaaaacaggctggtcataccgagatttatatggacggcacaaaagctccgtatgttctgaccatgtttgactgctttaagatgagggtattccatctcagcagacatatatcactgatgaatgccatccggtatgccaccaaggaacatgtgctgaacgatatatgccgcattgataaagagttaaagcgccttgggatggaaaccccgtacattgcggtggcgggcattaatccccacagcggggaaggtgggctgttcggtgatgaagagatgaaggaaatcattcctgccattgaggaagccaggaaacggggaatcaatgcaatcggaccggttccgccggatacattattttccaggggaaaaaatggggaatttgatgctatactggcaatgtatcatgaccagggccatatgccatgtaagacgctggatttggagaggacagtttcagttacactgggacttccgtttttacgctgctccgtggaccatggaactgcatttgatattgcagggaaggggattgccaccaatgtcagcatgacggcagccatcgactccactgtcaaatatgcaaaagcccttcatgatgcaaagcaggatgaaaacatggaaaatcatgatgcaaaatagctgaagcagggggaatatatgatgataggagctgttaccgacgactttacgggcgcagcaagtgcaggcgcgctgattgcaaggtcacaggcaaggaccggtttgtttttagacgctgaggcgctggaggattctgaggaggcaagatgtctggatgcggtttttgtaagcagcaacagcaggcatttgaagcctgaggatgcatacagagaggtgtgcaaggcaacgaaggccctaaagtccacaggtgttacctgtttctctaaaaaaatagatacaacgctgcgcggcagaattggaaatgaaatagacgccatgctggatactcttggcggagatatggttgcggtgatggtgcctgcaatgccgcaatccaggagaatctgcttaaacggtatatcaatcattgacgggaccgtgctgacggaaactcccattgcccaggatgtaaaaaccccggtaaaggatgcatttattccaagactgattcagggacagagcagacgaaaagtcgagttgatttccatagaaaatgtggacagaggtaagggaactcttaaatgtgccatgatagatgcccgggagcgaggagggcagatactggtaatggatgccgtcactttggagcatatagacctgatcgcgcagacctgtgtggaattggggtggaatgtactggctgtggacccgggtgcgtttaccatgaaactgaattaccgcagggggatgataaaggaggaggtttcaacgggggcagagggcagtacggggccggaggaaaaggtggcattatttgtggtgggcagcgcaaatccgctgactaaagcacagatgaagtatttgtgcagcagtgaggccaatgtacctgtccacgtatctgcgtacatgctgataagcggacaggtacaattcgaggaagaagtgaaccgggctgttggaattgcagtaaatctgttccggcagaaaccaaggcctcagtccattatcatagggacagccctgcaggactgcgtggtggatctgaatgatgaggaccttaggcgcggatatgattccggtacctgttcaagactcattaatgaaggacttgcagagattacggggagagtgatggagctggcgggccgggagcaggtggcaggacttctgctgaccggaggggataccatggagagcgtgtgccgcaggcttcatgtttcctacatagaagccattgatcatatagttccccaggttgatgtgggccgtatcgtgggaaactataccggattgccggttgtggtgaaaggtggattctgcggcggcagggagataggaatggctgttgtgagtcggttattgtctgagtcggccggatgtcgggaaggaaacgggagggtatagggcatccggtttcaggttcgataaaaaagaaaggtgaaggtaaaatccatatgaaaaaggttattatagaagcccgtgtaaacgaatatgcaatgagggacatgaatcctaacgtgccgtggaccgtacaggaacttgtggacgaagcacagcgtgtaagggaggctggtgcatccatcatgcattttcacgcaaggacagctgccggggagcctaataatcacgcggaagtgtatgctgaaatcatagaaaaggtgcgggagaagacagacattttactattgccaacacttggctttaacagcaatgataaggacagctcgcgtatcaaaatcatatccgaactggcaaagaaggaatccacgaagccggatatcattcctctggatacaggaagcgtgaacctggaccaatatgacgaagaaaagggctgcttcacggagtctgattccatctatacgaattcaaccagtacgctggagttttgcgccagggagatgcttaattataaaataaaggtaaaaatgacctgctgggatgtgggatttgtgagaagaggaagaaagctgattgatatgggccttatcacaaagccgggatatttcctgtttcatctgacagagggcaagtacataacaggacatccctgtacggtcagcggcgtggatgctatgcgaagcgtgcttcctgatgaaccatgttactggagtgcaaactgtctgggagggaatcttctgaatgtggctccgcatgtactgaaaaatggcgggggcctggcaattggtattggggattatcactataaggaactgggcgctccgaaaaacgcagaattaattaagcgtgcggctgatatggcccgcgaagttgacagggagattgcaagtccggacgaagtaaaggcattttttaatatgaattaatggcggaggggaaaatggaaacatatataagtcttgtggggatagtaatagcattttgtacacttatattcttgatgatgcggggagtcaacctgttcataacagtaatgattgcatccctgatagcgattgtgtccggtaatatgaacatatataagacgctcactgaaaattatatgactggctttgccgattattaccgttcctattacctggtgtttttctgcggaaccttattgggaacaacaatggaattgtccggagcagccacttccattgccaaatgggtaactggaaaatttaagagcatggcatatctggccatacccttagccacaggtattatctgctacggaggcgtcacggccattatttcgatttttgccacgtttcccattgcgctggcaattttcagggaaaataacataccgcgccggttaatgcccgcagcattatattttggctcctgtacatttgccatgattgcgccaggggcgccgcaggtgcagaacattattccaacccagggttttggggtggatttgatggccgggacagttgttggctttatttcaagtattttaatgctgctgataggaagcttctggctttcagtgatgataaaaaatgcaaaaaaggccggggaggtattcacgtccagggatgatgacaaagatgagaagagcgggagccttcccagtcctcttatatcctttatacctatgctggtgactgtaatagcaataaacctgaaaaataaggcgggggaaaatataatccccattgaatatgccttgctcatgggtatagccacaaccatcatactgatgtaccggaggtttgacagggcagaactaacagaggctgtattccagagtgtacccaaggcagcggtggcgatattcaatatatgtaccattgtcggattcggaacagtcattaagtccaccccggcctttgaattgcttgtagatgcagtcatacatatccctggcaattacctggtaggcgtttctgtcgggacagcgctgcttgcaggattctgcggttccgcgtcaggcggacttgggatcatcacacctatattctatgatatattcggggccatgcagggggtatcctatgccgccattgcaagagtcatggccatagcatcctcctccctggattcgcttccccacagcggttcggttaatacatccatcgggttgtgtggtgaatcccataagagtgcttacattccgattttctgcctttcggtggtgacgccggctatctgtacagcagtggcagtaattctgtttacgttgtttccagggtggccgtaaaatatttatcatttgtttagaaagaagtcagagttttttaaatataaatgttgcccagtctgctatacttgtagaaaacaaaagaaacggactggacaaagaatgaaattctgggcttactttttaattcccgtatacacggttttatttacaagaggatataattggtttaccaccaatttttctgttatcggcaatttttttgacaggaaaaagtcgtttttcctgtggggagttctggtgggaagttatttttatatgatacaccggaatataaaatcccgtgcagcgctgcacccaatctgcgccagattgataccggctgcactggtactgttgttctgcgccattacgacgccctaccttccggaggaattgcccctcaaatctgtactgcatatcgtatttgcatttttatccgcagtgctggtgcttttgtacctgttttggataatccggaccaggtatcagacagagccaggagcatacaggccttttctgtatggatggggagccattgtgggggtgtccgtaatccttttggcggtggccggaatcatcagcagcgcattggagatttatgtgacgctgacatccgttgccatggcgcagcgtctggcttgcagggttgccgtacaggaggaaatgccggacagcggtggagacacatccgaaaaagcttcgcggagaaaatctctgggaaaacgccgcaatcatctattgacataaaaaacggatttacatataataaggctagaaaaaacgtgcttttccagtggatatacacgaattcagccacaaagagagagtatatggcacagaggtgttatgactctctctttcaatatcagggaggatttttatgccagtatttgatttcagcgacacaccaaaaaaggaagaagagccacagtgcacttacacggtatattactccaatgagccggcggcttctccggagaagcccatgcttgttctggataacagcagccgggcctggagacaccattcctgcggcgttttcaccaaccaggccaagcggaccgctttcgagttcaaggaggaggacgggactgtcagcgcggatatcctgcaggttgacgcccgcttcaccagcctgctgcgctggctgggggaaaaccatatcagtgtccgattgtccggtcagaaccgcggagacggatacgcggtctataagattcgggaggtggcctttggaggagggaccaagctgtctgccgaggacggttttctacagtttatgattgaacggctgctggcaggcagcgcgccggagcaagaactggcagaggaggaccaggaggaaaacggtgacgacatgaagctgaccagtattcagagccttactgatttcatgaactgcgccggcaggacgctgccggacaatatacggatttgggcccgcaggaacctggcggtggcccgctcccatgaagtgactccggaggagaggcgccatgcccagcgcgccctttccatcatgatgaacattcagtggaagaatcactattttgaatccattgatcctgtggaggcccgcaggattctggatgaggaactgtacggcatggaacgggtcaaacagagaatcatagagaccatcatacagattaaccgcacccatacgcttcctgcatacggcatgctgctggttggcccggcaggtaccggaaagtcacagattgcctatgcggtagccaggatattaaagcttccgtggacaaccctggatatgagctccatcaatgattcggaacagctcaccggcagttcccgcatttattccaatgccaaacccggaattatcatggaagcgttctctatggcaggagaatccaatcttgtctttatcatcaacgaactggacaaggcgtcatcgggaaaaggaaacggcaatcccgccgatgtgctgctgaccctcctggacaatctgggatttacggacaattacatagagtgtatgatacccaccggcggcgtgtatcccattgccactgccaacgataagagccaaatcagcgcgcctctcatgtcgcgttttgcggtgattgatattccggattatacgccggaggagaagaaaattatattttcaaagtacgccatgccaaaggttttaaagcgcatggggctgcatgaaaatgagtgtgtggtgacagaggatgcgcttgacgcggtcattgaaaaatacgcggacaccacaggcatccgggatctggaacaggccgcggagcatatggccgccaatgccctttaccagatagaagtggacaatgtggctgcggtggtgtttgacggggatatggtgagggagctgctggggtaaaggcgtgttcctgcacagagcagaacagggaggagcgtatccagattcgctgtgcaatcaaaagattggggagggaaatagtatgtattatacaacagattatatatcgccggtgggcaggattaaactggctgctgacggcgaaagactggttgggctgtggctggaaggacagaaatattttgccggtactgttaaagaagagatgacggaggccccggaacttgggatttttaaagatacaaaggactggctggaccgctattttgcgggaaagaggcctgagtcctcagagcttttgctggctcccctgggaggagaattccggcagggtgtatgggaaatcctctgtcagatctcctatggacagctcactacgtatggcgatattgcaaagaaaatagcggagaagatgaaccgggaaaccatgtcagcccaggcagtgggcggagcagtgggccacaatcctatttccatcatcataccgtgccacagggtggtgggcgcggccggcagtctgaccggatatgccgggggcattgataaaaagatatggctgctgaagcatgaaggggtggacatggaaggcctgtttatacctgagaaggggacggcactttgaaggtaaagaaatgttactgaaaagccctgttatgggatttggctggggacgatgacggggtggtggcgggtgagaaagcaggtttggtaacacaaatgggccggcagcttcctgccggctcattttgtatgagaaaagttgtatgaaaagcattacgctttataaatcaaatatatcatcaaggtatgaataagatatgaacaggaatgacttttattctgtattttaccaactattttacctgtacttttctgaccggaccatgaccagcaggaagagagcgtagggactgcatctgttcaaaatgcggatagagagactatctggatgaggataaggggaaaaggtgagtctccccccaatcctttacgtgttccattatgggcatgaagctctgtcccaggtctgtcagggaatattccaccctgggaggaagctctttatagtcatgacggctgataaagccgtcttcttcaagggaacggagctgattaatcagggatgattctgatatgccgcctatatggcggcgcagcgctccaaatctgtgtatatcctggaaaccaatatagtacaggatttcaattttccacttccccccaaggactctctgaaccttctgtatgatttcacatcgttccggaactgatttttctgttttcacggtgactccccctgctgcgtgcttatagtattggcttttatcaatattccggctgctgtatcaggaatattgttgagtatgcagagtgattataacaccaacagtatcgttaaacaatgtaccacaaaaattttgggtacttttctttttgatgcatcatgtctataatcagcgtataaccaacaggaggggaaaaagatatggaatccgtgatatattatttttcagcaaccggcaatagtctgcgtattgcgaacatcatggcggaaaggatggatgggctgctgcttcctatgtcaagatataaggggacaaaatgcagcagccggcaaatcggcctggtttttcccacatatttctggggcgttcccagaaccgtggcagagtttgtggatgaaatgaaagttgaggcagataacccatatgtgtttgcagccgcaacctgcggagggcttgccggaggtgtattggggcatttggacgcacttcttaagaaaaaggggcttcatctggattatggaataacgattccgtctgtagcgaattttatagaggagtataatcccaagacacgttcggcggacagaaaactcagggaagctgatgagatggctgaaagggcttcggcagaagtgattgcagccaggcgcaacggaccatttgggttccatgtctgggacagaatattttataagctttatacggattataaactgaacagagacacaggatttcatgtggatgatacttgtgtccgctgcggtatttgccagaggatctgccccagccggaatattgtactgaaaaatgaaaaaccggaatttcagcaccgctgcgaacactgtgtagcgtgcatcaactgctgcccacaacaggccatccagtggaaacatgcaacacagaagagggtccgctaccggaatccgggtgtatctgttcacgatatcatagaaggtatgggaagtgcccgggatagctttatatcgaaggatcgagacatataaagtgtgaaaaccattccccaaaaccactccaaaaaattacagctgtccaaaaccagtctgagattgtacagaatcaaaattcagtatataataagtatgctttattatgaatactggaggaagaagaaaatgacatttacgtacccggcggtatttacgcctcataaaaacgataaaggctatcatgtaacatttccggatctgcagtgctgcgaggcagacggaccggacctggaggatgctgtggagcatgccagggaagcagcctacaactggctctatctggagattgaggagaaaacctttgagtttcctccccagacccatatggaggatatcaggctggaggaaggggagttcctgaaacacatcatggtgacagtaaagctgcttccggataatgattgattttattgcttttttttacattaagtggtaggataaagcatatcgagttaagaacagctggtgccgctgtctgtctttgtcagacagcgggtaatagggaaacaggtggaaatcctgtacgatctcgtcactgtaagtaaggagcccatggtttatgtcaaggacagtcactgattcagttagaattgggaaggcagccatgggtgttgatatacgagtcaggaaacctgccagttgttggtacaggaataattttccaaatcacgagtaattggttgtaccgatttacggtgtttcggccgcggatttctgactcagacggtaacggatttttacgcagggaaactgtgtcctgacggagggtgattccctcggggcacgggtacgctgcgtattacatatctgcagaaaaacgtatatccccaggacgcttgcggaatacgcttatgcgcgtgtggactgccgtttgggatttgtcagatacaggctgcatattcctctaccttggtttaaccgatacggtgtcataaaacaaggaggaaagagaagatgaagatgaaaaaactggcagtattttttgcggcagcagccctgacaacagtgaccgcagccggctgctccggcgggcagaaggagacggcggcagatgccgccaaagattctgaggcagtgacaactgcggagcagaccacaggggcaaaaacagaagtaccagagacaacagcagaggcagcagaggcggcagcggaggctgacgaggagaattacgatactggcgatgcttcaaaggataatgccagaaatcaggatggaatcggtgaaaatgagcttctggtagtcagctttggcaccagctacaatgacagcagacgtctgaccattggtgccattgaggacgctgttgagaaggcatttcctgatttcgcagtcaggagaggattcaccagccagattattattgatcacgtaaaatccagggataatgttgccattgacaatgtaggagaggcccttgaccgcgcggagaagaacggtgtcaggaatcttgtaattcagcccacccatctgatgaacggacttgagtatacggatttggtcaatgaggcggcggagtattctgacgcatttgacaaagtggcaatcggaaagccgcttctcaccacagaggatgatttcagggcagtcatgaaggctgtcacagaggcaactgcacagtatgatgacggtgagacagccatctgttttatgggacacggcacagaggcagagtccaaccaggtatatgcaaaaatgcaggatatgcttacagaggcaggttataagaattactatgtgggtaccgttgaagcagcgccaagcctggatgatgtcctggcagcggtggaggaaggaagctataagaaggtggttttggagccgctgatgatcgtggcaggcgaccatgccaacaatgatatggcaggagacgaagaaggttcctggaagactgcgtttgaggatgcgggctatgaagtgacatgccttgtcaacggactcggccagctggaagcaatccagcagctctttgtagaacatgctcaggcagcggttgacagtctgacaaaataaatcataagaataaacgggcggtcggggcaatttgctgatcgcccttttagaggtgggaatattggaagtaaaatacatgaaaatgaagctctgtgccctcctggccgccatagggctgtgtgcagggaacctttcgggctgcggaggaaagacgccggctgttgctgataccagtgccgccgcaaaatcttctgtagtggaactgtccgaagcggaactggcccaggaggaactggccgaaggggcatatgatgatgccccggcaaaaaacacccaaaaccaggagtcaggcagcctcggggatgcggtgaaagacggaatggagccggtttcggcggatgcgctgaaggatgggggctatgaggtcagggtggactccagctccggcatgttccggattacggagtgtgaacttacggtgcaggatggcgctatgagcgcggttatgaccatgagcgggaccggttatctgaaactgtatatgggaaccggggctgaggcggagcaggcttctgaggcggattttattccatttgtggagaatgcagatggaaagcacaccttcaaggtaccggtggaagcgctggacaaggaaattaactgcagcgccttcagcaggaaaaaggaaacatggtatgaccgtgtgctggtattttgttccggctcccttccggcagaggcctttgccgacggtgaggcggctacggcaaagagccttaagctggaagatggttcgtatacggtggcagtcaggctggagggcggttcaggccgggcgtctgtggagacgccggcggcgcttagggttgaggatggcaatgcatttgcggttattacatggggcagttccaactatgattatatgaaggttgacggggagaggctggatctgataagtaccgggggtaattcttcgtttgagattccggtccgtgtatttgaccggaagatgccggtcatagcggataccattgccatgagcgaacctcatgaggtggaatatacccttgtgtttgattcaaccacaattaaaaaggctgaatgatgagacggataaagaaattaatggcaattgccgccgccggaatccttatgacagcagtgtgtacaggctgttcctcggcagggcggaccggggcagatccggctgtcgcgaataaccggtccctgggttcctcccctgccccggttccggaaggctggagcggcataaagagaaccggcagtatggagcttctctatgcggaccagttttcagtggactattacgatggcggttacgcaatgataacgattaaggacagcggccgttatctggtggtgccggaaggaaaattacagccttccggccttccgggtgacgtggcggtcataaagcagcctctggagaatatttatctggcggcgacctcggccatggacctgttttgcagcctggatggaacagaccggattacactgtcagggacagatgcttccggctggtacatagaagaggcaaggtcagccatggaagatggcaggatgctctatgcgggcaaatacaacgcgccggactatgagcggattttgtccgggtcctgtgacctggcggtagaatccacgatgatttaccattccccggaagtaaaggagcagctggagagactggggataccggttctggtggaacgctccagctacgagcgccatcctcttggaaggatggaatggcttaaattatatggggtgctgctggaccgggaggaacaggcaaacagctgttttgccggacaggtgaagcagctggaacctgtcatggctcaggagagtaccggaaaaacagtatcatttttctatatcagttccaacggctatgtaaatgtcaggaagtcgggggattatgtggctgaaatgatagacctggccggaggaacctatgtgccccagggacttacggaaaatgaaaacgcgctgtccaccatgaatatgcagatggaaagcttttatgcctccgccagggatgcggattatattatatataacagcaccatagacggtgagctggacaatctgagccagcttttggagaaaagcagcctcctggctgattttaaggctgtgaaggagggaaatgtgtggtgtacggagaaaagcctgtttcaggagaccatgggcctgggggatatgattttggatatccaccgtatactgacggaggaggagccggaaggcctcaggtatatgcaccggctgcgttaaataaggagtagtctgaatgataaaaggtacttatataaaaaacagtatttcatttgcccttctggcggtcatgatgtgctttttatttatctggaacatcaattccggcagtgtgcacctgtcagtggaggaaataggtgaaattctgttcagaaggacaggggaggccgcttcataccgcattgtatgggacatacgcctcccccggattctctcggccgtgatactgggcggcgcgctgtccgtatcgggttttctgctccagacgttttttgcaaatcccatagcaggcccttttgtgctggggatttcatccggcgcaaagctggtggtttcccttgtgatgatagttttgctgggaaggggaatctccatcggatcggcggggatgattctggctgcctttgcaggctccatgatttccatgggatttgtcctgatgatttccggtaaggtgaagaagatgtccatgcttgttatctgcggggtgatgattagctatatctgttccgccataactgattttgtggtgacatttgcagaagatgccaacattgtcaatctccacaactggtccatgggcagcttttcaggcacctcctgggagaatgtaagtgtcatgacggcagtggttttcctgtcgctgattcttgtttttctcatggcaaagccgattggagcttaccagatgggggaagtgtatgcccagaacatgggggtgaacatactgcggttcagggtggccctgattcttctgtccagtattctttctgcctgtgtgactgcattcgcaggccctatatcctttgtgggaattgcggttccgcatctggtgaagagcctgtttaaaacggcaaagcccatactcatgattccgggctgcttcctgggcggcgcagtgttttgtctgttctgcgatttggcggccagaaccgtctttgcgcccacggaactcagcatcagctccgtgacagctgtattcggcgcgcctgtggtcatttacatgatggtgcataaccggaagggtatgcagtgaaatgaaggaaagatgcaggaaagatgcaggaaagatgcaggagaactgcgggtgaaatgcaggagaaatgcaggtaagatgcaggagaactgcgggtgaaatgcaggaaagatgcagggaaagagcaggagaaatgcaagcgaaatggagaggcggatttcatggcagaagattacatatggacagaaaatatgaccgtcggatacggcaaaacgcctctgatacggcaaatcggaattcatgttagggcgggagaaatcgtgacgctcatcgggccaaacggggctggtaaatccaccattctgcgaagcgtaatacggcggctgggactgctggaagggaccgtttacctggatggcatgcccatgaaggggatgggggagagggagattgcaaagaggatgtccattctgatgacagagcggattcacccggagcttatgaactgtgaggatgtggtaggcacaggccgctacccatataccggaaggatgggcatactgacggcagaggacagaggaaaggtcagggaggccatggagctggtccatgcatgggatctggcttcccgggatttttcgcagataagcgacgggcagaagcagcgcattcttctggcccgggccatctgtcaggaccccagtgtcattgtcctggacgagcccacctccttcctggatatccggcataagctggagcttctgaccattttaaaggacctggtacgcaggaagaaggtagcggtgctcatgtcccttcatgagttggatttagcgcagaaattatcagattatattgtctgcgtaaagggggaatacattgagcggtgcggaactccggaagagattttcacctcctcctatattaccgggctgtacggaatcaccaaaggcagctattatgcggaatttggctgcctggagatggaaccggtgaagggtaagcctcaggtatttgtcataggcggaaacggaagcgggattccggtttacaggagactgcagcgcatgggaatcccatttgcggcaggcattctccacgaaaatgatgtggattaccccattgccagggcgctggcctcccaggtgatatcggaaatgccttttgaaccgattcgggaagagacatatgaccgcgctgcagaggttttggcgtcctgcggtcaggttatctgctgtctgaaggaatttggtactttaaacgataagaacaggaaactggctgagctgggaagggataagcagggggctgacttgctggtataatctaatccacctttaactgcagctccgtcacctgttcctccacatgttttgtggtatggacgtctatccacaaaagctccagcaagggtccccggatattcatggaatgttccctggcatagtccaggagccggggaacataggtcctggtctggcggaagttgccgctgtagcagaccgacagataggtacccttcccgatgcagtgctcgccgtcagggtgaaggatgaacaccgcgtcatactgctggcatcgtccgtccatggcatcagacaggctgataaaggagcccatctggttgttgcctatgatatactgcctgtccggtccaaaggagaccagctgtttaatgagaatatccatttcttcgtccgtctcgtagctctgcatgatccggtggcaggcacggggcggcatttcttttaatgtgatggtcccgagagggagtccccgtgcctgggaaatggtttccctgcgggtgatgatattgtcccggagggatttaagccgttcaatgtgccggtcaatcacatccatctccttctggaacagttccagggaggaatcaatgcttcggttctcaatatatgcctttatctgctccatggaaaatcccagttcccgcaaatcgcggataacattcagacaccacaggtcctcggtgcggtaaatgcggtatccgttaggcgcccggcgggggaccagtatgcccagctcctcatagtagcgcagtatatccgtgcttatgttataaagggaggcaatctccccgattttatagaatgttgacatgaatcttctcccaaatatggcaatatttactgtttaccttggtattataccaaggtttatgatgggaatgcaagcagagcagcaaagtcattataaaggagttgtatcatgaatttagagggaatgtcactgaagaaaaagttctggaggtttgtatggccttccgtggtggcccagtggatctttgcgttatataccatggtggatggaatgtttgtggccaggggcgtgtctgaggtggccctgtcggctgtgaatattgcctctccctttgtaaacttcctgttttctgtttccatattgtttgccgtgggtacgtccaccgtggtagccattttcctggggcagggcaggcagcgggaggctaatcaggccaacactcagaacatggtggtgacaggagtcttatccctgtttatcatgctcatggtgtggctgtgcctggaccctattgtaagctttctgggagccacacagagcacgcaggagtatgtaaagcattatattttatccctgctgccctttacatggtggttcatcatatcatatacatttgagacattggtaaagacagacggatttccccggtttgcggctgcggctgtggcttcgggcgccctggtaaactgtgtgctggattatctgtttgtcatggtatttcgctggggcattgggggagccggggcagccacgggactttcccagatggttccggtattcctgtatctgaaacatttcctggggccaaaggcaaccattcgcttcgccaggccggtttgggacttgggacagtttatccgggtggtgaagattggcctgtcctccggttttacggagctgtcagcaggcttcacagtatttatgttcaaccatgccattctgcggtatattggtgaacagggagtggtgagctacacaatcatcgcatatgtgaataccatcgtggtcatgtccatggcgggaatcgcgcagggcatccagcctttaatcagctttcattacggcagacaggagcgggatgtatgcagcaggcttttgaagtactcgctgacagcgtccgtgggcgtggcgggaatagcctttatctcttccatggcaggtgctgactggctggtgggtattttcatctctgaaaagctggaagggctcagacagtattctgcgtctgtattcaggatattcagcctgtcgtttctggtggtgggatttaatattacaggggcagggtattttacagccattgagcggccgaaggagtctctgattatctctttgggcagaggtatggttatcatagcggcctcattggcagtctgtattggcgtggggggaggagaaggcatctggtgggcgcctgctgtatcagagctgatgtgcctgggcgtcaccctgattctggtgtatttgtatacaagaagggaaactttcaaatgcatatcttgaaaaggcagagtatcctgtgctagaatgaaaaacagaggtattaattgccctttgcctccatatatggtaccatatttagtgtttcggacaaaacaccaggtatgagaaaagaaagaggattgaaaaatgggaaaactctatggaatcggcgtaggaccgggagacccggaactgcttactttaaaagcgcaccgcattctcaatgcggcggatgtgattttttgtcctgaaaaggaggccggggcaggcagctttgcctttgatattatacagggacttttggaggacacaaaggcggaaatcgtaaatttagtttatccgatgcattatcacggcacgcagctgcgcgaaatgtggaagcagaacgcgggttgtatcgcgcagtatttaaatggggaccgtaccggcgcctttattacgctgggggatccggcggtttacagcacatttatgtatacccttccctacatagaggaagcgggcgtggaggtggaggtagtgcccggcgtcacttccttctgcgctgtggctgactccatgaaaatacccctggtggcctggaatgaggacctggtggtagcccctgtgcgtaaaaacagcagtgaggatttggggagggtgctcagggaacatgacaatgtggtcctgatgaaaccgtccactgacccgcaggccctgctgaaggctcttaaggagaaccatctggaggacaggtttgtgctgattaccaagacaggcacaggggaggagcgtctggtgactgactttgaggagctggagcggtatgatataccgtatctttccacggtcatcattaagaagcaggggaggcagtaatgattctatgtaatgacctgcataaacagttcggtgatgtggaagcagtgaagggtgtctccatggagattcccgacgggatgtttttgggcctgctgggaccaaatggggctggaaagacaacgctgatgcggataatgaccggacttctggcgccggatacaggcaccgtggcctttgacggacaggtgatggaccggaatgccgtggctgtcaagcaggccatcggcgtaaccagccagcatgtcaatctggacaaggaattgacggtggaagaaaatatggagtttgcaggccgcctttaccggatgggaaaggcggatattgctgtgtccacggaccgccttctggcctttctcggactggacagcgtccgaaaaagggcggcccagaacctgtcaggaggaatgaagcgcaagttgatgattgcaaagtccctgattcacaatccaaaatatctatttctggatgaaccaacggtaggcatcgaccccaatgcccgccgggatatatgggatttcctgcacatacagcacaaggaggggaaaaccatacttctgaccacacattatatcgaagaggcccagcacctgtgcgattatgtgatgctgattgacggagggaagatatttaaggaggacacgcccgccggactgattgatgaaatcgggcaatttaaggtggagtacgaagatggggacaggataaaggctgagttctttaaggacctgcctgctgcaaagtccagggcagccggaattgacgcgctgtgcagcgtgcttccttccacgctggaggacgtatttttccattacaccagcaagggggtgggaggatggaaataaccacgattttgtggcgggaatggctgttcctcaaacggaggttctggagagttacattttcacagatggtatcgccgcttttgtattttattacctttgggatgggcctgggaagagtgatggagatggatggaaggccctatctctactacctgataccgggcctcttagccatgaccaccatgcgcaacagctacacatcggtttccacccgcatcagcgtcatgcgcctccatgaaaagagctttgagtgttatctgtattcacccaccaggatgcatctgctggctatgggccatatccttgcgggagccctccgcggtatgtattccggtgtgtttatcgtactgttgggaatcgtgtcgggggccaggctggccatgaacgggtggcttttgaccgcggttatcctgaattcgctgatcttttccgcccttggctttctggcagccatgatgatggagagccattacgacatgaacaattttactaatattgtcataacgcccatgtcgtttctgtgcggcaccttcttttccctggacggcataccggaagcgcttaagtgggtggtgaatatgatgccgctgacccataccacccggcttatacgggaaatttcgtttggcggcagtgtcagctggccctccatggcatccgcggtcttgtttgcggcagcgtttaccggaggctgcgtgtggacgtgttaccgggaagcaaaagcataaaaacagggattatggaaaaaactataatattgaggaaaatagattgaagacaaaaaagaatgaacatgtgataaaagaggtatatcccggctctattgcgcaggagatggaaatagaaccgggcgatatactgctttcaatcaatcatgaagtgattgaggatgtatttgactatcggtatctgattaaggatgagtacattgaggtggtcataagaaaaccggacggggaagagtggctgctggaaatcgacaaggagtatgacgatgacctgggtgtggagtttgaaaacggcctgatgagcgattaccgttcgtgcagcaacaaatgcatattctgctttattgaccagatgccgccgggaatgcgggagaccctgtattttaaggacgacgattccaggctttctttcctgcagggaaattacattactctgaccaatatgaaggagagggacatagagagaatcatccgtatgcagctggcccccatcaacatatcggtgcagactaccaacccgcagctgcgctgtaagatgctcaacaaccgttttgcgggagataagcttaagtatctgcagatgctctatgacggccatgtggagatgaacggccaggtggtctgctgcaagaacgtaaatgacggagcagagttagagaggaccatccgggatttatcccgatacctgcctttcctgagaagcgtttccgtggtgcctgccggaattacaaaattcagggagggattgtttcccattgagttatataccaaggaagaggcaggcgctgtcatcgacatggtggaaagccgccagcaggagttttatgagcaatacggccttcatttcattcatgccagtgatgagtggtacattattgcaggcagggatttccctgaggaagagcgttacgacggctatatccagctggagaacggcgtgggtatgatgcgtatgttcatcaatgaatttaacgaggccctggaggatgtgatcagcaaaaaggagtatgaagagctggccggaaccgtttcaaggaccctgaccattgcaacgggaaagctgacgtatcccaccatctgcggcttcgcaggaaagctgatggatgcgtttccccatctcacggttcatgtgtacgctataaggaatgatttctttggggagaccattacggtatccggccttataacgggacaggacctgataggacagttaaaggaacggcaggcagcgggggaggatttgggagaagtactgcagattccctccaatatgctgcgggtgggtgagcaggtatttttagatgatctgacggtccgggatgtggagcgggagctggggatgaaggtggtggcagtggaatcaggaggcagggagttcattgacgccatattggatccggaatacagaatggaacgaaggaatgataattttgtgtacatccaggcctatgaccggaagtaagatatagttttaaactatagctgcccataaaatttacaaattatcccttccttttgttttgtgctatgattactgcaatcagaaaacatgagcagccggaaatcatggccaagacttattgaaggaagggaacaaacatacatgaagacatcatcattgttcaaccataaaacagtactgtccctggaggtttttcctcccaaaaggacagcgcccgttgacacgatttataacacgctggatgagcttaagggaatcacccctgattttatcagcgtcacatatggagcgggtggcagcgagaacagtcagacaacgcttaagattgcgtctgctattaagcataaatacggcatagagagcgtggcccatattccgtgcctgaacctgacaagggacgatgtcctgctgattctggaacagctgaaggaacagaaaatagagaatatactggccctgcggggggaccgcaccgcggacagggagccggctggggatttccggtacgcggcggatttggtggagtttataaagaaccatggggattttaatataataggcgcctgttacccggaaggccatcaggaatccggcggcctggtaagggatatgaaacacttaaaagataaggtggacgccggtgtcagccagcttatcacccagcttttctttgacaacgagtatttttaccgcttcagggaacggatggatttggttggaatccatgttccggtggaggccggaatcatgccggtggtcaacaaaaagcagattgagcgcatggtatccctgtgcggcgtaaagctgccgaaaaaattcatctccatgatggagcggtacggggataaccccattgccatgcgggacgcgggaatcgcctacgcggtagaccagattgtggacctggcagccggcggcgtggacggcatccacctgtataccatgaataatccttatattgccaaccggatttacgaatccgtattccggctgatggcgtcttagggtaggttctgccctaagactgactgctgatcagccggtgtaattcctccagatatttcccggcaaattcgctgagatggattctggggtccccaatccatccgatgaccatgttttcctctgtttccaggggaactgccatgatggagtcgccgttcaggttgcggtttaaaatgccgctgcatatggtatatccgtttagtccgatgagaagattgaacagggtggccctgtcgctgacatagattactttttttctgggaatggtgctgaggatttcctctgagaagtaaaaggaatttttttcgccctgctcaaaggccaggaaggggtaatcctccaaatcctcaatggcaacgctgtttctggcggacagggggtgggttacgctgatgaatacatgggggctggccttaaacagcggatggaataaaaggccgctttccttgaacagcttttccagcaccttccggttaaaatcattgatgtagaggatgcccagctcactcctgtaattctttacatcgtcgataatctcataggtgcgggtctccctcagggtgaattcatattcgtccgtgttctggcaggataccaggttggcgaacgcattgacggcaaaggcatagtgctgggtggatatggagcagatacgcttcaccggttttttgtttgtgtagtgctgctccaacagctcggcctgctccagcacctgtctggcataggacaggaactccattccctgggaagacagggcgatccccttggagctgcggttgaagatggatatgcccatttccttttccagctcccttactgaattggaaagactgggctgggttatgaaaagatgtttggctgcctcggaaatagagccgcagtttacgatggttacaatatagcgcagttgctgcagggtcatgactaatacctccattgcatttaatgcatggaggtattttagcacgaaatgatatagtttaaaactatgtcattccatatttttatgatttttgcggtaccgtcctgatgtcagccggctgatgcgtctgtgaagttcggaacagatacagtaaaaggttatgacggtaaggcagacggctgtcagcaggagggcatagtctgtgaaggattggggacggtttctgtatgccctgttaagaaatggtatccccaaaacaatggagaaataccagaaagcaggggcagcccatcttcccagggcccttatggggtaaaatccggcccgggcccggctgtttccccggtgggatgttccgggagcagcagagcatttccgggagacgtattctcccagctggcagacggcaaacagggcggtaaagtaaacagccgttccgatgatggtatgaagctgttttggcgtgagccatatgctccaggcccgggccggtgctgggccggatgatccggccgtttctgcccatgcagagccggatacgtctgtccatgccgtgcctgacattcccagatatatgggaatgaaaatggagaacaggatacgaaagccgttgacaaagatggtcagcagataggaagccagggcgcttagggccatccatcctatttttccctttatggttctcatccggtgaatataggaaaagaccagggctgtcatggaaatcatcaggaactggagaccggagcaggaggcagctatgatgaagcggcaggagtggctgacataacctgtctgagggacctttatgaagggaattccgctaagggcgctgacccaccgggcagtgggggccagaatccatgagaggctgtccgggcccccgcggctgtaataatatttcattcccagcagcaggaaggctcctgccagatagaaggggatgttgcggcggattaaagatttagcgctaggaatgtccattgattaagcctcctctgtttttctcttttttctgtcagcccggcttcggcggatacagcctgctgccattatgactcctgcggcacacatcagtatcagggttcctggttctgagccaatggtatatccggctcccacggcaaaattagatacgtgctgcggcagcggaaggggctgtttcacatccgcggcagaaccatcctggctgcggactgtttcagtcacggcaataaatgacgtgtagggcgtcatcatgctgtagtccagtccaagctgtgtgactgtttttttgatcatggcctgtctgactgcatcctggacatcctcccgtgtgccgtaatctgtcagacgttccacctttgtcctggcccacagataggggatggctgtattgtctgccggggcctctgcccggcctaccggtatttcctgcatataatcctggtttccggtttttccggttatacgaatggtgccggaaggctggccccgccattttccaaacaggacaatgggtctttgggcaaacagggtgggaaggatgtccggctctacatcgtaaacatcaaaaccgtcaaaggaaacatttatgccggtcatgacaggggactggatataagtgctgaaatcacaggctgtgtctgatgcctgtgacggttctgttacaacaaaggcttcgccggaaccggcttttgcgattccgtcgattaaatagcggttgacggaggtgccgattccaaaggagaagaaatctgctgtcttaagattcctgtttatgaggctgaatatggacgattcatcggacatatagccgtctgtgatagtgacaatgcttctggccatccgcgggtcccttggaagggagactgcctgttcaagggccggggccagctccgtgccgccgcctccgtcctggcgctcaatcaggtcaatggcctgccggatgttttctgcggtggcaggtacggattttggcgccatggaaacggctgtatctgagaacaggatcaggttaaactggtcagaatccctgagattgccaaccaggttccctatgagctcctttgcggtgtcaaggggatacccgaacatggagcctgacacatccagcacaaatatgtattcacggggcggaatctcttccgccctgacacgctccgggggctgtaccatcagcatgaagaaattttctttttccccggtgttcagcatgagtccgcagtttatctcctgcccggtaagtctgtaatccaggatgaagtcccggtcccctgcaaactccccggaatcagagagggttacatgggcaatggattcgctttccttttccaccttgattttatgggaactgctggtcaggctggaaatggggacgcctgcggagaggctgacggcaatttcataggtaccctgcggggcggtcccttcctccaggtaaggacttgccgtccactcatctcccccgcctgtttccggggcagagccggcataccgtgggccggtcacggtggggaacacaaactggtaaaccccgtccctgggggatatcagttcggtgtagtgcagttcaattcgcaccgtatccccgggcattacattggccacattcatggtaaatacattgggacgctgctgctccagcagagaggcgctttttccctcgcttttagcttcctcgaattctgttttggcctcttccctttcctttatttttgccgtgattacctcgttcccgatttccattttcattccatgtaccgtaaccctggcagatgccgggaacacgtagctggcattgatgggtattgtcccttcgttggcataggtctgggtgacatatgtttcggcaatgacaccgtttattgtggaggacacacttgtgtccttcagggggaactggtctgccgcctgtgcagcgtcctgtacaaagaaatagggggcaagggtcttgtccgccgtatccccgtccggttcctcaccgtagaccgcagcaggggtcagggccagcataagtagtgtcagacatacataaagccaggttttcttccgtttcattgtttgcacctcgtttgtttttgtttggggttttcttataatccagattacaatggccaggcatcaaaatggcatcaaagatgcatcatatttgcatcatatgaaaaaacaagtgaaaaccaaatgaaaaccaaatgaaaaaggaaatcattgacatcctgtaattttagttataaaataagtaccgggaatgaagttctcccttagtctgactagaaccgcttataaagctgatgacttctgcattatgtattaacgcagaaatgatcggctttttctgcgtttataaggaggaaaaggatatgctgattagtattgcttttatgttgatgctgggaatgtttctggggtgggtgtgcaggaagctgcgcctgcccggccttatggggatgatttttaccggggttcttctgggtccctacgccctgaatctgattgatgggtctatattgaatatttcttcagagctgagacggattgcccttattatcatattgatgagggcagggctttccctggatttaaatgaccttaaaaaggtggggcgcccggccgtgctcatgtgctttcttccggcctgctttgagatattgggaatggtccttctggcgccccggctactggggatttcggttctcgacgccgccatcatgggagctgtggtgggagcggtgtccccggctgtcatagttcccaagatgttaaagctgattgaagacgggtacggcacggataaggggattccgcagctgcttttggcaggggcatccgtggacgatgtgtttgtgattgtgatgttcacggcgtttacgggcctggcccagggcgggagcgtatcacccataagctttgttaagatacctgtttccattctgattggaagttttatcggactggcggccggctgggggctggccgtatattttaagagagtccatattcgggatacggtcaaggtcatcattctgctgtgtgtctcttttatcctggtgacgttagaggacagatattcggatattgtgcccttttcctccctgatttcagtcatgggaatcggaatcgcccttcagaagaaacgggaggaggcagcccgccgtctttccgttaagttcaataaggtgtgggtctgtgccgaaatcatgctctttgtcctggtaggggcaactgtaaacatccattatgcattgagcgcaggcgtgtgggcggttatactgatattcggcgtgctggttttcaggatggcaggcgtgttctgctgcctggccgggaccaggcttaatatgaaggagcgggtattctgcatgataggttatatgccaaaagctacggtacaggccgccataggcggggtgcctctggccatgggtctggcctgcggagatatcgtgctgacggtggctgtgctggccatattgattaccgcacctttgggagcttttttgattgacctgacctataagcgttttttgcaagaaagattataagaaagatcagaagaaagatgaatcctgccattgtggagatcagaaccgcatggtaaaatgagaaaagactggtttgcacaaaggagaggccaaatgaaggatgtaaagaaaatatgcaaaatagctgtcatccaggccgcgcctgtcatgtttgacaaggatgcctgcacacagaaggccgtggatttgattcaggaggcatcccggaggggagcccagcttatggtgtttccggaactgttcataccgggctacccttacggcatgacattcgggttccgggtgggcagccgcagcggggagggaaggcaggactggaagctgtatctggataactccattctggttcccgggaaagagacagaaaaaataggcatggctgcgcgggaagcaggggcttacgtcagcatcggtgtttccgaacgggatggggtgacaggaacgctttacaatacaaatctgtttttctcaccccggggaagcctggtttgtgtacacaggaagttaaagcccacaggggctgagcgggtggtatggggggacgccgaccggggatattttccggttgaggatacgccctggggggtgatgggaagcctgatctgctgggaaagctatatgcccctggccagggcggccttgtatgaaaagggagtggccctgtatatttcccctaatacaaatgacaatccggaatggcagtccacggtacagcacattgctctggagggaaggtgctatttcatcaactgtaacatgtatattacaagagacatgtatcctgaaaacctgtgctgccgggatgagattgacgggctgccggatacggtgtgccggggaggcagctgcattgtggacccatacgggcactacgtgacagagccggtgtgggataaggaagccgttatctatgcggatctggagatggacagggtaagcgccagccggatggaatttgatgtctgcggccactattcccgtccggatgtgctgaggcttcagattgacgacagataatccagaggaaagcaggttttatgggcgtgaagacagaatcagatacagggcagcatcagcggctggaggatgtgaagaaactggccagccgtattatgcacatgcactattgcgagcatgatatagagggaatcacctcctgcttttcagaacagttttcctggatgggggctggggagcaggagtatttgtcaggccggaaggcctgcgcggaccacttccgcaaattcagggagagcatacctgactgtaatatatgggatgaggagtacgatgtggtctgtcccatggaaaacgtgtatgttgttatgggaaggatgtggatagccacggatcccggcacccggatgtacctgaaagtacatcagagggtgacctttgtatttcgggatacggaggacgggcttacatgctcccatatccactgctccaatccttatcaggaaatgctggatggggaaagctttccggagaaaatcggcaggcagtcctatgagtatgtccaggagcgtttaaatgctctggaggaggagacaaaacagcagaaccgccagctggaggtcatcatgtcctccattgcgggcggattaaagataagcaatgacgatgaaacctactcctttgcatttgtcagcaaggaggcggcagccctgttcggctataccgtggaggaattcatggaggtaaccggggggacagctgtgggcaacgtatatcctccggaccttcccggcgccctggctgactgtgccgaggcgttcagggacggaaatcttacatattccacccgttacagggtgcgctgtaaggacggaagcctgaaatggatcattgacagcggaaaaaaagcccaggacgcagacgggaactggatggtcaacagcctgtacctggatgtgacccggtcagaggaggacgcccagcgcctgagggagcagacccagctgctgaccagtatttacgatacggttccatgcggcatcatccgttttgtcagggacatagagggcggataccgtcttgtttccatcaacagggccgtcctgaatctgatgggctacaaggatatggaggagggtttaaacgactggcacgacggcgtcctgggagctgtgctggaggaggaccgcctgattctgcaggaggcgtaccgcaaactgagggagattggtgaccggcaggaccaggaatacagggtcaggtggaaggacggaagtatccactggctggaggggaccagcatggtggtgggggtaactccccagggtgaggatattttacagcgcacggctgtggatatcacccagcgcaagattcttcaggaacagctggagcgggagcaggagatgtaccgggtttccatggaggtcagttcagccgtcatgtttgagtaccggatggacgaggatgtatttatcagctatgagccaaagacaggacagggtgtgctacgtaacgaactgagggattactccaggacgctgctaaaacggcaggtggtgcacccggatgatgtgcccacagtcattgacaatatatgcaacggccgatctgaggtatttgaagtccgcgtgtccgttcccggcggtgagcccggaacctatatatggcacagggtcaacagcaggctgatgatggagaatgggaagcccagccgggtggtgggcgcgctccacaatatccattccatgaaatcaaaactgtcagagaacagcgagcggctgtatatgagccagtcagcgcttcaggccatcaatggcgtgtatatgagtattttctatgtgaacctgccggaggacagctattatgcggtaaggctgccggaggtgcgcggtggggcggtgctgccgaggaacgggtgctactccacagagctttgcagttatatcctgtccgatgtggaccaggcggacagaaaacgggtgatgtccatctgtgagcgtgaatggcttctgggggaactggccggaggaaacgaacacattgaggtggagttcaggcacggcttctctcctctgtggctgcgtctggaggtccacatggttgcctccaaggagggcaggcccaggacggccattatagccctgcgcaacatcagcgccgagaaacagcgggaattggagtattatgatgaggagaagaaggcaaagcacgccctggaggaggcgtatgattcactgaaccgggccaaccaggcaaagtcggattttctttccaggatgagccacgacatccgcacgcccatgaatgcaatcatgggcatgactgccatagcccagagcaatcttaacaaccgtgataagatagaggactgtctgtctaaaatcagtctctcgggcagccaccttctggatttaatcaataaggtgctggacatgtcgaaaatagagtccggcaatgtgggactgagcgaagatgccttctgcctggaggaattggtggaggaggtatcccttatcgtaaaaccggatatggacagcaaaggacaggaactgtccatcagcttaaaagagatagaccaccatgccgtatatggggacgcggtccgggtcaaacagattctcattaatctgctgtccaacgccgtgaagtacacctctgacagggggcatatagccgtatccctggaagagaagctttccagtgaaagcggggtgggatgctttgagtttgtggtggaggacgacggaatcggcatggccccggaattcctggaaaagctgttcatgccctttgaacgggctgaggattcccgggtcagccaggtccagggaacgggactggggctggccataaccaggaatctggtgcagatgatgaacggcaccatacgggtggaaagccagctgaacaggggaacccggttcattgccaccatatatctgaaacttgccggggaggaagataccggagaacggtcccagaacggaaatacccccaggaccccggcttcatttccgcccggaacatgtgtgctgcttgcagaggacaatgagctgaaccgtgaaatcgtggtggagctgttgtctatgttcaacatcacggctgtatgcgctgtcaacggccgggaggccgtggaacggtttgagacagacccgcctgggacctacgcccttatcctcatggatatacagatgccggttatggacggttacacggctgccagtgctatccgcagcctgggaaagaccggcaggcggccggacgggactgggattcccattatcgcccttacggcaaacgcatttgccgacgacgtgtaccgggccaaacaggcgggaatggatgagcatgtaaccaagccgctggaaatcagccgtctgctggaaatcatgcaccggtacctggacgttccagcccggaaccgtacagaataaaagtccggattaaaagtttgttaaagaatgggccatccccttgtgtaatcccggtttatccaatataataggccgtaaacagaattacatgaggagaagacggattccatggatgacgaattcggcggcactgccccgaagcatagatatttcgatacaatttaccacataagtgggataaggcatggcttgcgcacaattgggcgcaggccgtgtctttttgttttttaccggcttgcccataaaaggtgcgccgtccatggatgttattcctgtccggacagaaaggaagaataatgaagaccgaagcgagaaaaatatttatcattaactgcatgtactttacaatcctgctgctggcagcctttgtactgctgaaatacgggctgcccatggtggccccctttgtcactgcgtttgtgatcgcgtatctgttaaggaggccaatctgctttgcgtcagtccgtctgcacatgaacaggaagattacagctattcttatggtgctcctgttctacagtgtggctgggctgctgtttacccttctctgcgtcaagatgttttccaacgggaaatcgttggtggcaagcctgccgtcggtttatgccaattatgcggaacctgtgtttaccgggattttcggaggcatcgaacaatatcttctgcggatggacccgtctctccttggggccttagaggagctggagggacattttgtgcagtccgcgggacagatggtatcaggaatctccatgtcagtcatgggatggctttccggcttcgcctcatcccttcctggtatgtttatcaatctgctgctcatggtcattaccacctttttcattgcggctgattatgaactgctgaccggattctgtctgcggcagctgggggaacggcccaaggaggtatttatggagatacagtcctatgtggtgggcaccctttttgtgtgtatccgctcctatgccctgattatgaccattacctttgtggaactgtccattggactgacgcttattggggtggagaattcactggttattgcgtttcttatcgctgtatttgacattcttcccgtgctggggacagggggaatcatgatcccgtggacggtcatcactgcccttatgggcagccacggcctggcactggggcttctggtggtgtatctggtcataacggttgtgcgcaatatcatagagcctaaaattgtagggagccagattggccttcacccggtggtgacgctggtgagcatgtttgtgggagcgcagcttttgggggtactgggattattcggatttcccattggcctgtccctgctgcgctatctgaatgagacagggtccatccggctgtttaagacggcaggggaagaatcgcagcagttattccataaggaacagatttaaaggaacagattgaaagaaccagatttcaggaaccagatttccttccatcacgtattgcatccctgccggtatgcttggtataatggtagggataagcgggagaggagggaatgcagaagattatgactgaaaaagaacggatgttgtcggaaaagctttatataccaatggatgaggcgcttgcagcagactgtgccaggtccaggcggctggtccgtctgattaatgggaccacggaagaacaggcggagtacagggtgcagctttttaaggaactgtttggcaggacaggggaaaatctatgggtggagccgccttttcactgcgactacggctgccatatttctgtgggtgaaaatttctatgccaattttgactgtatcattctggatgtatgtgatgtgaccatcggagataatgtattcctcgcccccagggtttgtatctataccgcagggcatcccatcgacgccggagtacgccgcagacagctggaatacggaaagaaggtagtgattgggaatgatgtgtgggtgggaggaaataccgtcatcaatcccggagtcaccattggggacaatgtggtcattggttcaggttccgtggttacgaaggacattccatccggcgtcattgcggccgggaacccctgccgtgtcctccggcctgttacagaggaggataccaggtactgggaggagcttgaaagagaatatcgaagggacagaggagagtaaagacatggaacaggaaggccagaagcatcagcgccgtgtgcgctacaagggaacgcatcccaaacgttacgaggaaaaatataaggagctccagccggaaaagtacccggaaaccgtggcaaaggtcatccagaagggaagcacccctgtgggtatgcatatccctatcatggtaaatgagatactggagttccttcagatacagcctggccagactggcctggacgccaccctgggatacgggggccataccagcaggatgctggagcgcctggagtcaaagggccatatctatgccctggatgtggattccatcgagatggaaaagaccaggcagcggcttgaacatatgggctatgggccggagatactcaccatccggaaactgaactttgccaatatagaccagatagccggagaattcgggccgctggattttgtgctggcagatttaggcgtgtcatccatgcagattgataatccgtccagaggcttttcttttaagaaagaaggccccctggacctgcgtctggaccctcttaagggagagcctgcatcagagcggctgaagggtcttacccaggaggaattaacaggcatgctcatggagaattccgacgaaccctacgcagaggagattgcccgtacggttatgggtgaaatcaagcggggaagggaggttgccaccaccaccaggctatatgagatggtagacagggcgctggcgttcattccggaggaggaacggaaggaggcagtgaagaagtcctgccagaggacatttcaggccctgcgcattgatgtgaacagcgaattcgaggtgttgtatgaatttctggacaagcttcccggcgtattaaagccgggaggaagggcagccatcctgacctttcactccggcgaggacaggattgtgaagaaatcatttaaggaaatgtacagggcaggcctttacagccaggttgccggggatgtgatacgtccttcggcagaggagtgcaggatgaacagccgtgcccattccacgaaaatgcggtgggccataaaagcagaagacagtaacagttaggcagaaacagttaggcagtaacagttagtcagaggcagggaggtatcataatgaaagctttatttatagggggaacaggaaccatcagcacagcggtggcagcgctggccatggataaaggatgggaggttacccttctcaacaggggttccaaacctgtgccggaggggatggagtccatggttgcggacattcacgacgaggcagcagtggcccgtataatggagggcaggacatatgatgtggtggcccagttcattgcatatggggcggaggacgtgcaacgcgacatacggctcttccaggaaaagacaaggcagtatatctttatcagcagcgcgtccgcgtaccagaaaccagcggcaggctgtcccataacggagagcacgcctttaatcaacccttactgggaatattcacgtaaaaagattgatgcggaggaggtgcttacggcagcataccgcaagaatggattcccggtaacgattgtgcgccccagccatacatatgatggtaaaaagccgccggtagccatacatggccataagggaaactggcagatattaaagcggatactggagggaaagccggttatcataccgggggacggcacctccctgtggacactgacccattccgctgattttgccagggggtatgtgggcctgatgggcaatccccatgccataggcaatgcctaccatattaccagcgatgagtccatgacatggaaccagatttatgaaacgctggcagaggcattggacagacctcttaacgcccttcatgtggcatctgattttctggcagagcacggaaaggaatatgattttgcaggccagcttctgggggataaggcgtgtacagtcctgtttgacaacacaaaaatcaagagggctgtgcctgattttgtatgcaccgtatccatggcagaggggattagaagctcggtccgctatatgatggaccatccggagagccagacaccggacccgcagtttgatgcgtggtgcgaccggattgccggggcatggaaggctgcggatgaggcatttggaaaatagggattggttgggaaacggttggatgcatcagcagtgaaagcggatatacggcaggaggtccggggcatatggatggatgtacatggtgtctgtgcaatgaaaagatgaagaaataccacgatgaagaatggggcgtccctcttcatgatgaccacaggcagtttgagtttctcatgatggaagttatgcagtgcgggctgaactggaatatgatgatacagaaacgggaaatcttcagacagtgctttgacgggtttgattacgacaagattgcgtcatatgaagaggaggatattgaacggattctgtcctgtgaaggaatgattaaatcccgcagaaaggtagaggctgttatccataatgccaggtgtttccagaaggtcaggcaggaatacggctcattcagctcgtacatatggggcttttccgggggaaagaccattctctacgcaggccatcaaaagggaaaaatcccggcccagaacgccctgtcccagcagctcagccaggatttgaggaaacgcggtttcaagtacctgggtccggtcacggtttactcccatctccaggcctgcggggtgattaatgaccatgtggaaggatgtttccggtatcatgatttgatagagcattaccccactgtgaagaagcgggataagaagtaggcgggctaagaagtaggatgtatctataatatttgtctgcaacatggagatgaaaggggttccaggctgtccagggctgggaatcccttttgtccgtatgggctgttttctgcggtctccgcccggaattcctctgctttctccatacgacagaaaagctttaactgaaattaagaattactaaaagaacaaaggccccatgtgtgctaccatagaatcatcagagatatcagggcggttggggaaccggaagcacctgatgcaaggaggagactattatgaaaatgagatggcgtgtggcagcggtcatagtatgtgtggcggcgttgtcttactgtgcggacaacaggcccgacctgacgctggctgagaaaccggtgatttacctgtacccggaacaggcccaggaggtcagtgtcaggctggactatgatgggaggcttacggacacgattccggcctacggggatggatggaaggtgacggcctggccggatggaagactggtggatcataacgacgggaaggaatatccctatttgttctgggaaggagaagaccgcacagcgtatgacatgacgaaagggtttgtggttttgggaagcgggacagaggcgtttctcagggagaagctggagcatttggggctgaaggaaaaggagtatgaagcattcatcgaatactggctgcccaggatggagggcaatccttataacctgattacattccagaaggaagcctatgaggagacggccgggcttcttatatcgccaaagccggacagcatactgagggtattcatggtatacatgccgctggagcagcctgtccaggcggaggaaccggagctggccccctttgagcgcaggggcttcaccgtggtggagtggggaggaaaggagattttggcagaatgaaagtaacacctgttgtttactataagaaacccggatatcccaccggggctgacatgaaatcccgtcccgaactgctaaaaaaagtgccgcacagatggtctgggaacggtgtggtgctgacggctctgggaatgtccctggcattgtgcgcatgcgcagcccggggagatatggagccgggaggtgtgaaacctgggaatacggaaccgggagttggggagccggaagatacaggggcaggaggtgcaggtcaggactaccggggcaaaacagaggacggagaagctcataaggggttggtggctcctgtattcatccacggggaggggacaggcgcctatggctgtatagcggtgaccgcgccatttttcctgtcagaggaggaggcctgggaaattataaagtccgaggcggaaagctacaaagggattacattttcccggaacaccccgcctgtgcttgaggatgtaaaactgccggagagccgtctgttcagcggcaaaacagagaaaaagcagtccctcagggacggtgatttatgtctggacggagcggacgcagataataagatagcatttgaattcatctcccaagacgatgtgtatgaatggagaaaggagaatgaggaagccgcggccacctttacactctatgatacaaagggcaccgcagaacagctgagggaggaactggtttcctatggacctgacatagctctgggaatcttttatgacccgtgtaatgatgtggatatggaaggcgcgtatgacgccatggcaaaggcagaggaacaggggatgacctttgactgggaaggagccaagctggaacaggaggccagggcaagggcaaaatcagaggaggagctgcgcgcccaggtgcgcgattttctggattggctgaaaggacagggggtaatctgatgcatgtgacgcttcacctgaccaatgcctgcaacctggcctgcggatactgttatgagtgtcaccagaaggactatatgacggtggagactgccaaaaaggcggctcttctggcagccgggaaagggcagtcctcctgcggcatcgtattcttcggcggggagcccctgctgtgcagggatgtgatttaccgcacagctgctgcctgccgggacatggaaaacgccctgaataccagattccattttaagataactacaaacggaacacttttagaccgtgaatttctggactattccagaaaaaaccgcatattaatcgcgctgtcccatgatggaacgaaaagggcccatgactttttccgaaggcataaggacggaaggggcagctatgacgaactggagtccgtgaccgaagaactgctggccgcccacccttacgcgccggttatgatgacggtatgcccggagacagttggcgagtatgccagagggataaaggaattgtggaataaaggtttccggtattttatatgcagcctgaactatgcaggggcatgggacaatggatccgtcagccagctgaaatcccagtacagcgaacttgcggaattttactatgaaatgacctgcagggaggaaaaattctatttcagcccttttgaggtcaagatagccagctggattaagggggatgcctactgccatgagcgctgcgagctgggcttaaagcagatttccgtggctccggacggcgttctctatccctgtacgcagtttgcgggccacagaggctatgccatcggcactgtggatgagggcatagaccaggctaaaaggcagcgtctgtatgcgcagagccggggagataaacctgaatgtagcggctgcgcggtaaaacagcgctgcaattgcacctgcgggtgcctgaattatcaggtgacaggaagcgtccgacaggtggcgcctatgctgtgcacccatgagcggttaatccttcccattgcggataagctggctgcccggctgtacaggcagagaaacggaatgttcatccagaaacattataacgatatgtttcccttgatttccctggtggaggacaagacgggaaaaggaggaaaagaaaaatgaagacgaggacagagtacacatgtcctttggaactgacccatgacattaccaagggaaaatggaaacccatcatcctgtggcagttaggccaggggccccattccctggccggtttaaaacgggagataaagggaatcagccagaaaatgctcatagaacagttaagggagctctgtgattacggaatggtgtcaaagacatcctatgagggatatcctttaaaggtggaatacgcgctgaccagcagggggactaagatgctggaagcagtggttatcatgcagggaatcggaatcgagatgatgatggaggacggaaaagaagaattcctgcgcaaaaagggattgctggattaagggggtatcagacacgccttaccccatggttacaaaaaagtgtgtaatttacagagagcatctttcatgttagagtgtggctgagggaatggggaccggcagtatgcgcatttccagaggtaacaggaagaaatatgaagggaatatgagaggaggaattttcatgagggatgcagaaacaaccatagggaatctggcggataaacagaccgtggcctttataggagcggcggatgaggagggatttcccgttgtcaaggccatgctggcgccgcggaaacgggaggggataaaggtgttctattttaccaccaatacctcatccagacatacagcgcagtaccgtgagaatccgaaggcctgtatctatttctgcgacaggcgcttcttccggggggccatgttaaagggaaccatggagatactggaggacagcgaaagcaaggaaatgatatggcgtgaaggagataccatgtattatccgggaggagtcacggacccggattactgtgtgatgcgttttacggctgtctcaggaaggttttacagcaattttcactcagaggattttgaggtgtaggcagaaaatacgttgtgccgccgatacgtcatccgtcatctctggggcggtgtccgtgacttaagaaaggcctggtctctgtcagcttttgcagggcagaggcccttttttgatcaaaaggaccggagccagacgcagcgggccggccggtgaatgcagatatgccaatatgcaaaggctgcttttatcccctattttatccggtattttatccgatatgggattaccatgtgatttttgcgtaatgtttgcagatgattcccaggaaatgtttgcaggtgattcacaggtgatttccgggtaatgttcttcttgacaaaactggaatatctggttattatgatattatcaaaaagataataattaaaagataataactgtaaaataatatctatccggtaataactgcctgaggacaacagacaatgtcagccccagggatttactgcaatgcagcacaatggcggattacacggatttcacagttttcacagggaggtaaaacacaatggtatatacatgggaagcacttaaaaaagcatacattgcaggccagcattttaaatttttatttttctggggacacaccccatcagcagacgggcttatcacggaagcatgtctgagccagtggtggaaatgcagcttcacggcagacggcacagtttattcctgcgcagagcagtttatgatggcggaaaaggccagaatgttcggtgacagggacatgctggggaacattatggaggccagggagccaaaagccatgaaagcctatgggagggcagtgaagaattttgacaaggaaacctgggatgccgcctgctatgaactggtgcgcgaagggaatatggcaaaattttcccagaatccggagctgtgggagtttttaaaatccaccaggaaacggattctggtggaggccagtccaagggaccgtatctggggaatcggtatgggaaagaacaacccggacgcagagtgtccgctgaaatggaagggcagcaacctgctggggtttgccctgacagaggccagggatttgctgcttgaaaaagaggaggggatggactgatatgggagaaaagaaagaaaacactccctgtctgcgggacaggaacggtctgacagaagaagagtttctgaaaagctacaatcccggtcattatgcccgcccgtcagtggcggcggatatggccattttcacggtgacggaccaggaggaatccaattacaggaagcttccggaaaagaacctaagcattctcctgattcagaggggaggtcatccctatctgggatgctgggccctgccgggcggttttgtgaggccggaggagacaacggagcaggcagccagaagagagctgagagaagaaaccggactggattatgggtatatggaacagctgtacacgttcagtgaaccgggaagggatcccagaacctgggtcatgagctgttcctatatggcattggtggactgcagccggcttacgatacaggccggtgatgacgccgacaatgccagatggttccgcatttcctacaggctgaccgatgaacaccgggattacaggcgcagccaggataccgggctggtggagtcagtggaacatatacagcactatgaacttaaattatggacggatgatacggtactttgttccggaattgagaagataaccaggaaaaacagacaggcagagaccgtggaatataagataacggataaccgggggctggcatttgaccacgccagaatcatatcctgcgccctggaaaggcttcgcggaaaggtggaatacacgggattggccctgcatctgatgccgcaggaatttaccctgacacagctgcagcaggtatatgaagtgattctggacaaatgccttctgaagcctgcgttccgccgcaagatagcttctctggtggaggaaaccgattcctttacggaacgggaaggccaccgcccctcgcgcctttacaggaggaaatgggaggaattttaagatatggacagaaaagcaattgcaagacagacattggacattatggaaaagggctggtatgagacagagggaacggtggtggaaatcagagcccgccagcaggagtcagtgaagaaaagcgtgctttttacgccggaacagggggagcggctgctggagcaatatgagacggttactaaaaagacagcaaaatataagtgctgtacatggaattgttccacagtggatgccattcttaagctggcaggagagaatcagtgcagatgcgctgtccttaattttgccagcgccaagaatccgggcggcggatttataaacggagccatggcccaggaggaaagcctggctgccagcagctgcctctataaaacacttacggcccacgaaacgtattataggatgaaccgggcatgcagtaccatgatttatacagatcacgccatattttcgccggatgtggtgtttttccgggacggaaggtttggcctgcttaaggaacctgtggaagcgtctgtgctcacccttccggctgtcaatatggggcaggtgatcctgaagggggaagacagggctttagcagagcagtccatgaagcgccgcatgaagctggcccttgccatctttgcctcccggggctgccgaaacctgatactgggcgcctacggatgcggcgtgttccgcaatgatccggttaaggtggcgggctggtggaaggagcttttggagcagtattttcccggtgactttgacaccattgtatacgcggttttggaccgctccgccacccaggcgtgttacagggcattccgggatatctgaaatgtgtgcatgacagctgcagcagtacctattgacttttaaaatgagccgtagtatacttgtcccaacaatgaaaaggggtgctggagtggaatccggctgagatggaatatgttctgaaccctgatacctgatctggataatgccagcgtaggaagcctgcagaagatgtgaatttttgtaagttttatcccgcccggactatccggacgggattttttattccgtatgatttgaagagaaaaggagaaataatatgaacgcaagcgtagcaatccagtcacttcccaaggcagcaaatgacgaagaattaatccgtatcgtggaccaggtcatcgactacatcaagagtacggggttaaactattatgtaggtccctttgagacaaccattgaaggggattatgaccagctgatggatattgtaaaagagtgccagcatattgcggtcagggcaggggcgccctcagtggctgcatacattaaggtttcttaccaccccgaaggagatgtgcttaccattgaaaagaaagtcaccaagcatcaccagtaaactgtggtctgtttcagccattctcgccatccttatcctgtggcagctttctgtatcccttggtctggtggagggatttatgctgccttcaccggtccaggtagcagaggcgtttataaaggaattcccggcccttatggagaatgccaggattacactgaccgaggcagggatgggacttgttttgggaattgccacgggctttggggcggccgtgctgatggaccggtttgacaaggcatacaaggcattttatcccatcattgtactgacccagacagtgccggctgtggccattgcgcctcttctggtactgtggtttggctatgaaatgactcccaaggtcatactcattgtgattaccacttttttccccataacggtggggctgctcaccggattcagggcagcggacccggatgctgtgaacctgctaaaggccatgggagcgggccggttccagatattttgctatatcaagctgccgggtgccatgggccagttcttttccagtctcaagatatcagcctcctatgcagtggtgggagccgtgatttctgagtggctgggcggatttggcggactgggcgtatacatgacaagggttaagaaggcattttcctttgacaagatgttcgcggtgattttcctgatatcggccatcagtttaattctgatgtgggccgtggaactacttcagaaaaaatgtatgccatgggaaaccagtcaaaaacagaaatagaacatggaacagatatccggcgtttcattaagaggagagattgaaaatgaaaaataagtgcgcaagtatgctgctggcctccctgtgcctgggcgtacttctcaccgggtgcggcaaggctccggattcaggagagaataccacccctgtccaggcggcgaaacaggatgtaagaaagctgacatttgtcctggactggacgcctaacaccaaccacacaggcatctatgttgcccgggaaaagggctattttaaggatgccggcctggaggtggagattgtgcagccgccggaaaacggggcagaggtgctggctgcctccggaaaggctcagtttgcgatgtccttccaggacagcctggcgccggcgttttcaggggataatccccttccggtgacagctgtggcaggcgtcatacagcacaatacatcgggcattatatccagaaggggcgagggtatggaccgcccaaagggactggaggggaaaaagtatgccacctgggaccttcctgtggaaaaggcgaccattaaggatgtgatggaagcagacggaggggattttgataaggtggaactcattcccagcaccgtgacggacgaggtgacggcgctgaagacaaaatccgtggatgccatatggattttttatgcatgggcaggagtcaagacagagctggaaggtctggaaactgactactttgcgtttgcggacttggatcctgtatttgatttttatacgccggttatcatagccaacaatacattcctcgcagaggagccggagacagccagggcgtttctggacgctgtcagcaggggatacgagtttgcgatagaacatccccgtgaggcaggggagatcctgtgcaaggcagctccggagctggacccggatctggtaaaagccagtcaggaatacctggcggacaagtaccaggcggatgcgccccaatggggatatattgaccaggagcgctgggatgcatattacgcatggctgaatgaaaaagggcttacggaaacgcccattgaggcgggaacaggatgttccaatgaataccttccgtaaggccggggacggcagtgctgtgccaggaggagaacatggagcaactaaaggtagagggaatctcaaaatcctttgacggggagccggtgctggcggatatatccatcaccctgaataagggggagctggtgtctctgctgggaatcagcggaggcggaaagaccaccctttttaacattattgctggtctgtcaaggccggacacagggcatgtccttctggacggagaggacgtaaccggatgccccgggcgggtgagttatatgctgcagaaggacctgctccttccctaccggaccatagaggacaatgtggcccttcctctgattgtaaaaggaatgaagaagaggaaggcacgggaggctgcctttccctatttccggcagttcggcctggagggcacccagaaaaagtatccggcccagttgtccgggggcatgcgccagagggcggctctgcttcggacgtatctgttttccggcagcgtggccctgttggatgagccattttccgcactggatatgctgaccaaaaaatccgtccataactggtatctgaaggtgatggacgaaatccatctgtccaccctgtttattacccacgacattgacgaggccatattgctgtccgaccggatttacctgctgacaggcaggcccggaaggataacggaggaacttatcataaaagagacaaagcccagggacagggatttcggccttacggaagaatttctggaatataagaggcatatactgagacatcttgaaaccaccgcctgaaaaatgaggagccatgataatggttccttattttattgcggtatttttaatccggcattttacgataaggttgacggggacaggtaaagaagattataattaatatatttcaatgaaaagctgcgtgcggaaaagaggtacttgcatgagtacgaaaggaagcagtgagaagacaagcatctatatcatagacagggattacaggctggtgcatttcaacgatgccctgaagcggcggtttaaggatgtgcgctgcggtgacgtctgttatgagaagctgtgcggagaggaccggccctgccagggctgtccgctgaatcgggattcggacggggctgtcatgttttataataaagcgatccagcagtgggtggaggtgagttccgggaacatggactggccgggcctggggccctgccgggtgattctggtgcgggaaatcaatgagggcaacaagaatctcttttacaatcttaccagtatttctgcctatgacgaattgtttgagttgaattttaccagggactattataagatactgtaccatcaggaaggaaagtatgtgattcctgcgccggagggaaccttaagctccatggtgcaggaggtatcggaacatatgattcacccggaggacgcccggcgttttttggaattctgggagccggggcgcattgcatcgtgcctgtcggaccagcacgcaagccgtatccttaaaggtgagttccgcaaacggaaggtggatggaacctggtgctgggtggcgcagattgtggtgcctattttaagcggcgctgaggacgaggacatcgtcatgtgctttatccaggacatcgacgaacagaaacgcagggaagaatccttggccctgggaaatcagttgacagaggagggcttagatcccattaccggactttgcaggaggccggtgtttttcaggcagtcggctgcctttcttaaacatgtgaaaaatcctgaagattactgccttatggctattgatattgagcatttcaagctttttaatgactggtacggacaggaggcgggggaccgccttctggccatgataggagaacttctgaacaagacgcagtcggaggagggcggccttgccggatatatgggcggagacgatttcgttatacttctacctgattcgcctgctgtcctgcgcaggctgcaggaggagataaccaggtatatgaaggaggcggtacagccggattccttccggcctttggcatctatggtattgacggcgggggccttgctgtcagcaatatgtacgacctggctgttatagccctgtcgtctgtgaagggcaattacgcccagagggtcagccggtatgacagccgcatgaagcagaagctggaggaggaccacaggcttctctctgagatacagcgggccctggaaaacggcgagattaccttctatgcccagcccaagtgcaacatgaggacaggaaagattgtggggcttgaatctctggtgcgctggaatcacccggagcggggcctcatagctccgggggtgttcatcccgcttttggagaataatggtctggtgacaaagctggatctgtatgtctgggaggaagtctgtagaaatgtaaagaaatggatagacagcggccgcaaaccggtccccatatcggtcaacgtatccaggatagacatatataccctgaacgtgacccgtgtattccaggaactcatcagccgttactgcctggatccaaggcttatagagatcgaaattacggagagcgcctatgtggaggagtacaaggttataacagccgtggtggaggaactgcggtccgcgggctttaccgtgctgatggatgattttggcagcggttactcctcccttaacatgcttaaagatgtgaatgtagatgtcctgaaaattgatatgaaatttctggacatggaccacgaaagcgtggggtaagggcatgggaatcctggaggcaatcacccgcatggccaatattgtgggcatccgtatgattgcagagggggttgagagcaaagagcagatggagctgcttcaggatatgggctgcacctatggacagggatattatttctaccatcccatgcccattgaggtttttgagcagatcctgtcagatgaggccaacattgacttcaggggaatcaaggcgcgacagattgagcgaatccgccttcaggagctgatgaacggggacatggtgagcgatgccatgatgaacaacatattgggcgctgttgcattttacgacctatacgatggaaggctggagctgcttcgggtcaatgagcagtactgttccgtcacccggaccacaggcatggacctggaggaggtgcgcaaaaccattctgggcaccgtatttgaagatgaccgggaccaggtgatggaaatattcagccgggccaggcagaatcctataaagggggcggagggggaactgcgcagcaggcggggggacggcacctccatgtggatgcatctgagggtattcttcctcagggagcaggacggccactggctttactacggggccataagcgacatatcccagcaaaagcaaagggagcagcagctggaggcctcccagcgcgccctgtcatccgcggtacatatatcagaaaaggacgagtccttcatgacgctgaccgaagagaaccgcagggccgcagccgccatctttgcccagatgacgcccggaggcatgataggaggctactgcgaggaaggatttccgctgtattttgccaatcatgagatggtaaagctgctgggctatgaaacctttgaggagctgtcagaggcaatccggggaaaggtggtcaataccatccatcctgatgaccggcagcgggtggcggcagacataggcccgcgatattacaccggcctggaatacaccaccacctaccgcatgcccaagaaggacggcacctggttctggaccctggacaagggccgtgtcatcgaggcggaggacggccgcctggccatcatcagcgcatgcacggacatctctgagagcatggaagcccagcgcctgttaagggagcgcaacagcgctctggccagggaaaatgcagagttaaacattctcaacaacgacatgcccggcggataccaccgctgcgccaggacaaaggactttgacttcacttatatcagcagccgtttccttgagatatttggttacagccggcagcagataaaggatctgtttgacaacaaatttatcaacatgatacatccggaggaccgccggagagtcaccggagaggtagactgcctggcctgccaggtaagctgcggcatcatggtttaccgcatgcaaagctcacggggctacatctggattatggaccagaccaactacctgatttacgaagacagggaataccttcagggagtggtcaccgatctttccgagcttcagagaatcatggattcaaccaaatcaatcaaactgccgtgacgcaaaagacggaccatcagctgtatgccgatagtccgtcttttccatactctccccaaaagaacatggctggtaatgaatttttttaccaatgttgtattcatgccctctgtccgctataatggttaatgaactaacaaccacgatgtaagcgcagacgaaacccaacagaaagagacagcccgtttaaccagccttatccgcacaagcgtacagcatatcagcccacagccataaaggcagaaggagacaacagccatgattctatatttttcaggaacaggaaacagtgaatataccgcgaaaagaatcagagaagagacagacgacaatatcatgaatctgggagagaaaatacgcagccgcgacttttcaagcatacactcagacaccccgtgggttgtggccgcccccacctatgcgtggagaattccccgcattctgcaggaatggctggaaaaaacagaactaaccggaaacaggaccatatacttcgtaatgacctgcggcggaaacattggaaacgcaggcagatacctaaaaaagctaaccgacgcaaaaggcctcaactatgcgggctgcgcccagataatcatgcctgaaaattacattgccatgttcgccactcccacccaggaagaagcagccggaataatccgcggttccctgagggcaatagacgaagccgcccggcaaatcaaggacagcaggccattcccccagcttcccataacacgaaaagacaaaatcaacagcagcatagtaaacatcctcttttacccaatgttcgtccacgccaaaaagttccaggcaaccagcgcctgcacatcctgcggcaaatgcgccgttatctgccccttaaacaacatccgtctgacaaacggaaccccggtctggggaaaaaactgcacccactgcatggcctgcataaaccgctgtccaagccaagccatcgaatacggaaaacacacccaaaccctcccccgctacacctgccccaaaagcatataatgaaaataaaccaagccctatttaatcccacccgcaagcgtggaagcgccagcggacatgagaaagaataagctggaaaaggtgtgggggacgggcggggagttttggggaattttaccaagggattacagccccctctcctggcttagagactgttcccgagggaaccatgagccaaacctccccgcccgtcccccacgccttttcccgactcaaatcccccgtccgcgtaccttccaccttacaaatccaacttcaaatccccatcctttatccaccccatcctgcgcagtacctccccaaacacaaaggtcagcacagcaggaagcaggaagcacaccagaaggatgcccacccacatactggttccgccgcccatggccgtatatacgccgatggggcctaccagcccgcaggtacccatgccggacccggccgggatattttccaggcggaataccatggtggctatggggccggtaatcatggatgccagtgtgggaggtatccagatacggggattgagtacaatattgcccatctgcagcatactggtgcccaggccctgggccatcagtccgccgattttattttcgcggtagctcataacggcaaatccaatcatctgggcgcagcagccggctgtggcagcacctccggccagtccgtccagggacagggcaatgcagatggcagcgctgctgatgggaagggtcagggcaatgccgataagagctgacaccaggatccccataatgaagggctgcatttccgtggctgtctttaccagatttccgaaccagttcatgaacccggccacgcctggtcccacgaactgggccaccagcacaccggagataatggtgatgccgggcgttacgatgatatcaagacgtgtttccttggatacaatcttgcccagttcagccgccacaatggtggcgaccagggcgcccacaggacctcccagggcattgcccgcgatgcctaccgtggcagcggaaaacagcaccagctgaggtgcctttaaggcgtgggcaatggcgatgcccagggctgcgccggtagcgcttttggcatagtcggcaatgacattgaaaatttctatctggaactgctggcccagggtaccgaagatggtgccgatgagaagggaagcaaacaggccgaaggccatggctcccagggcgtcaatcagataggtctgcaccgtgatgtttacatttttccgtttcaggaattctttcacacttgattttgccatactcatattctccctttatggggctgaggaatgtatcggaatttatacgctccggagcctttattttgttagggattttatcacatatttataaaaatgcaaggtttttgactaaaatcgcattttttgttaaaatattaacagattgcaaaataatactgtgtgggatataatggtatgaacaggggatattaacctggaaatgaggtggacgttatcgaattccagattttatatacactgcaggaacttcgcacgcctttggtagacgggcttatggtgttcattacctctctgggcgaccacggatggttctggatccttatgggtgtcctgcttttttcatttcccaggaccaggatattaggcggatgtatgcttatatccatagcagccggatttctcctgggcaatgtaatgcttaaaaatatagcggccaggcagcgtccctgctggctggatccttccgtggaactgctggtcgctgttccaaaggatttctcctttccatcggggcattccctggtgagctttgagggagcggtctgcatcttcctttttaacaggaaatgggggattccggccctgatgctggcggtgcttaccgcgttttccaggctgtatctctttgtacattttccaacggatgtgctggcgggaattgtcatgggaaccgtaatcgcgtggtccgtggtgagaacagcgaaaaggcggatgaaaaaaacggaccggatgtcagggaaaccatgacatggcggcaggccggacaacggatatggctatagaatgacagaatgaaagacaggtggaagttatgttggaacgcgctccgggaatttttgaagtggagcttcacagcaatcagaaaagcattgatgagattaagatattccttattccgggaaaggatggggagagaagcctgatggtggacgcgggctttcgcagcaggacgtgtctgcacgtcatggaagaggcgctgggaaaactgggaatcacctatgacaggctggatatattcctgacccacaagcatcatgaccactgcggtctggccagcgagtatgcggccagaggcgcgaggctgttcatgaatccccaggaagacaggcattgctatgactgtctgtactataaccacagccatggatccacggaggaccagccccaggtgctgcaaagcgtcggggtgacagaggatgggacgccggagatatggaacatgtttatggaagtaaaccaaaggatccgggagaacaggggatgggaattcgagattccgggatatccctatacgccggtcagtgagggacggattctgagctatggggattatgacctggagacagtggggcttaagggacatacctacgggcagatggggctgtacgaccggaaccataagatacttttttgcgcggaccaggtcattgacggcattgtgcccattgtgggcaccacctatcccgacgagcatctgcttaaggggtattttgactctctggaaaagctgaagcaccagtatgtggactgcctgattcttccggctcacaaggagcccatccgggatgtgaagcgggtggtggaccggattgtctttgcctatctggataagacggatttgatcaagcatatcctggaccacggccaccacaggatgaccaccaaggaggtggcgtgtctggcttacggtatagaccatgtgcccagggaccagtctgagttcatcaagcttaagatggtcataagcaagaccttttcctgtctggaatacctgtatgatgaggattttgccatccgtaccctggagaacggtacctattactgggaagcgccgtaataagccgcggaggaagatgtcaaaaaagtgcttgcatatcttcatatatagtgtatagtagaaggtacaataaaaacagaagcagagtaggtatatgtgcgttaagtgccggctggacagggagttgtcagctggacgaaagaggattcccaaagggaaactgtctgcggtacatatgccgcatcccgctgcaacagagatagatggagcggcctgttttatgtgcagccggtttacgccggccaaaagcgtgtgtgaaaatcaatgatacagcacgttctcgcacagggaagccatgtccgggcataatgatgcaccggatgggttttcggggccgttttttgtatgccaggaagaaaggttcctgcacctgccattgtatatctccgtttgtagtccgtgaaatctgcaaaggaggtaatgaatcatgaagaaattagcagaactgttcggcagctcgtcccgggagcttaagagtgtcaggaccatcactgtgtgcgccatgctggcggcagcggcaatcatcctggtaaatttccgcatcgaactgacgaacacccagagaatcggtttttccggcatacccaaccaattagtggcctatctgtttggccccgcagtcagctgtctgtttgcgggggcgctggatatcatcaagtatctcatcaagccggtgggggccttctttcccggcctgaccctggtgaccatgctggctggcctgatttacgggtttttcttttataagaaaccattaaagctgaccagggtgctggcggcccattttctggtctgcctggtgtgcaatgtgattctcaataccctgtgtctcagcatcctgtacgggcaggcattcatgatactcctgcctcccagggtcatacagaacatagtgaaatggcccattgattcctttatttttttcaatgtggccaagatgctggagatgtccggcgtgttccgggtggtcagaggaagcagggcagccgtacagcggtagcaggaagaggcagcagaaaccggcagccgccaggagaagattaaaagttatttatttaacgggtgaagcatttaacgagagcagagagggacagataccggttgtccctctctgtttacagcaaaatgccctcgggattcaggtatgaacctgtcccgggggcattttgctgtcaggtggtccgggcaggtcagaacagtccctgagaattgccggtttgtcctgttaattttgcgacgggctgttttgcaaaaagtacaccggctctgttgattcccctgtatggctgtgctatgattggggctgcaaaaatgagatgagagcagtttagaggaggaatcatgccatggcagttcatgtaatcgacgaagccaaccgttgtcttcagtgtaagaaacccatgtgtcagcagggatgcccaatccacacccccataccagccatgattaaggccctgaaagaggggggactggaggaggcaggggccatgctgttttccaacaaccccatgtcactggtgtgttcccttgtatgcaatcatgagcggcaatgcgagggccactgtgtcctgggaaggaaggggcagccggttcatgtgagcagcatagagaattatatatcggacacatgcctggagcgtattgacgtccagtgccagccaaagaatgggaaaaaggtggctgttatcggggcggggcctgcgggtatcacaatcgccatccttctgacaaagaaggggtacagtgtaaccatctttgactccagggacaagattggcggcgtactgcagtatggcataccggaattccgtctgcccaaggcgatactggagcgctataagaaaaagcttctgtccatgggaatcaggattcgtcccaataccaccataggaggggctctggaaatcaaggacctgttccgggacggatatgagagcatcttcatcggcaccggcgtatggcgtcccaagaagctgggaatcaagggagaatccctgggaaatgtgcattttgccattgattacctggctaatccggatgcctacgacttaggggacagggtggctgtcatcggagtgggcaattccgccatggacgtggccaggaccgtcatccgaaaagggtcccaccatgtgaccctctatgccaggggaagccattcggacgccagccttcatgagacgcagtatgccatgctggacggagctaaatttgagttcagcaggaatattgtggaaatcaatgacaacgggcctgtatttcagcagatactgtatgatgaggaaggcaatgtgacggggtattccggggaaaaagagcaggtttacgctgactctgttattatttccatcagccaggggccaaagagcaagctggtcaataccacagaggggctgaaggccaccagaaacggccttctgcagacggacgaacagggggagacaacagtggagggaatctttgcctccggcgatgtggttctgggagccaagaccgtggtggaggcagtggcctattccaagaccgtggcggatgccatggatgcctatatgaaggaaaaagccggtaaagaaaaaaatgaaaaagacgggaaaggactggcaggccgggaataaccgtggtaaaataggacttgaaaacgtttgcaaaggagaagggtccatgaaactgaatacaggcatgagatgccatgatttatgtccgaagatggaaatggagaagctgtttgcccaggtaagggaacatgatatccgtcaaatccagctggcattcggaaagtccatcagcgattatgattttaccgcaggccattacagctccggttttgcccggaccattgcccgggagctggagaagaaccaaatccatgtggctgtgctgggctgctatatcaatcctgtcaatcccattgaatccatacgccaggcagaggtggcgcgtttcatcgaacatatgaaatatgccagaatcataggggctgatatggtgggaaccgagacaggacgcctggatccggatttcagggtcacagaggaatcctatacagaggacgcctaccagctgcttttaaggagcatgagggagatcgtggctgcggctgagaagctgggagttattgtaggtgtggagggcgtatttaaccacacgctgtacagccctgcccggatgaagcggttcctggaggacattgattcccccaatgtggaggtgatactggacgccgtgaatctgatccaccccgaacaggcggagccggaggcacagaaagaggttattgacagggcttttgcatattacggcgaccgcataggcgcccttcatgtaaaggattttgtctttgacggccaggaacagctgttccgccatgtgggtgacggccttttccagtatgaaccccttatgaggcatgtaaaggagaggaagccccatattgccatgctgttggagaattccagcagggagcggtatcatgaagatgtgaagttcttacagacgatttacgatcaggtgtagatatggaacaccccaaagctgataaaaaggctttggggtgtcttttgatataggatatccggctctgtccgtcagatgcggatacaatcaggcattggctcccagctcccgtttcattttccggaaggaaagaaggaacagtgttaccgtggtgcatacggctatggtatcggcaatgggttctgccacgaataccgcaaacactttgttttcaaagaggttgggcagaacgtaaatcagcggtatcagcaggatgaccttccgcagcagagccaggaacagggaggttttgctgtctccgatggcgataaaggtctgctggcatgccagctgggctccaaagagcagggacgcggccatatagatgcggatggaccactcgctgaaggctgtcagggctgcatcctgggtaaagatgcggatatacaccatgggcacaaacatggccacagcccaaagtacggttgagtaggtcatacatgaggtcagaagcagccggaaggtcctgcttacgcggtcaagctttttggcgccgtagttaaagctgataatgggctgggcgccctgggtcagtccctgaaggggcagtagggagaactgcatcacgcttcccatgatggtcatggcccctactgccacatctcccccgtactttaagagggaggtattaaagcagatattcaggatgctttccgtgaactgcatgacaaaaggggctgcgcccagcgcaatggccggcatgagaatttcccttttgggccgcatgaagcaggtgcgtattttaaggtagctcttattcgatatcaggaacaggacaacccaggcagcggagattccctgggatatgatggtggccagggcagcgccccgaacgcccatgtgaaacacaaacatgagaatggggtccaggatgatgttgcatatggccccgatgagcacggtgtacatacctgtcttggcatatccctgggcattgataaaggcgttgagtccaagggccagctgtacaaaaatggttcccagggaataaatctgcatgtaagcccacccgtactctatggtattgccgctggctccgaacatcagcaggatgcggcggccgaagataaggaagaaggcagtcagcacaacggccacggttataagggcagtggtacagttgcccaggatgttttctgcttcgtccttcctgcccttgcccagcatgatagatgccctgggagcgccgcccatgcttaccagggcggcaaaggcggaaatcgccatgataaccgggaaggtgacgcctacccctgtaagcgcgttggcgccttcgccgggcaggtggccgatatacatacggtccaccatattatacagaacgttgatgatttgggctgtaatggccggcagggccaactgaaaaagaagcttccccacgctgcccgtgcccaggtccacctcttttgcttctttgtttttctccatataaatctcaatcctttcgtatttcaaaaatagccatttaaatactatatctcgaaaccaagggaaagtcaaccagagggccggctggcaaaaagccgaaaaaacaggccctgccggactaaatttactctgcggggataccggatctaacctgtatggcctgcttttttatgcggcagccggaaagagaggagagaacagaactcaccttaattatacatatcatacaaaaaaatagaataatagcgaaaaaaacagtattattttacagctatatgcataaaaatgtaattttatattgacaggaatgtcagataatattataatgcaaataacaatacaagttgtaataacaatatgtaataataaattgccaggaggtaacagtatgagagacaaaattgccggagccctttacgggatggccctgggcgatgccatggggatgcctgccgagttgtggggaagaaagagagtaaaggccttttttggacggattgagggattcttggacggaccggctgagaatgatgtggcgttcaactataagaagggccagttcaccgacgatacgggccaggcccttgttcttctggactccattgagtccactgactatgaaccggacaccagagacattgctctgaggatgctggcctgggctgagaaggaaaatgcctttgaaaacaatattctgggtcccacctccaaggtggccctggcaaatttcagggataacatccaggattccaggattacggataaggcgctgtccaacggaagcgctatgaggatagcacccatcggctgcctgttccggccggaacaaaaggaggacattgccagatatgtctacctggtgtcaagagccacacacaccagtgatgtgaccatagccggggctgccatgattgccgaggctgtgagttcggctattgtgaaggatgactttgagaaagtaatggaggatgtgtttgggattgaggagattggttacggcatgggctgcgagaccttcagtccaaggctgggagagcgcttaaggattggtctggacatcgccggatcctataagggggatgatgagggatttatccataagctctacgatgtggtgggtaccggggtaggtattattgagtctgtccctgccgccctttccgtggcatactatgcccaggatccaaacctgtcctgcctgctctgtgccaacatggcaggtgacacagacaccatcggagccatggccactgctgtctgcggggcatttacagggatgggaaggataaaaccggaatacatccggaccctgaggcagcagaatgatgcggactttgaccattacatccgtatactggaaaagggaagggagagatttgcatgaaaacccttgtaataggtgcggccatcattgatattatcatgaaaataaagcgtctgcctaaaagcggagaggatatcctgtgcagcgaaaccgtgtccgcggtgggaggatgtgcttacaacgtggcaggtacgctgcggggctttggcgtggaccacgaccttttcgtgcctgtgggaaggggcatgtacggggatatgatcgcaggcgatttggaaaagctgggataccaaatccttatcagggaagaggagtcggacaacggttactgcctgtgcctggtggaggaggatggagagcgcacatttatcacggtcaagggcgcggaagggcgcttcaggccttcctggtttgaacagctgtcccaggatgcctacgacagcatctatgtggccggataccaggtgtgcggtaccagcggcggggtcatttccgattggatggcgggcgcgaagggcaggatgaaggaaaaacgcgttttctttgccccgggaccggtcataaccgacattgaccaggctgtgatggagcgcatcctttcagtgggtcccattctccatctcaatgaaaaggaagcctttgattacgcaaagcagccgtctgtggaggactgcctgaagtacctgtacggcctgaatcataaccttgtggtggtcaccatgggagcttccggcaccatgtattatgacggcagcgtgatgaggcaggtccctgcctataaaacacaggtaaaggataccataggtgcaggcgacagccatgtggctgccatgattgccgggtactccaaagggctggatacggaacaatgcgtgaggcttgccaaccgggtggcctcggcaatcgttagcatccaggggccggtgatgaccggggaaatgtttgaacagcaggattttgcgccgtatatcctgaacgggtgcagtaaacatacgaatgtggaggggtagtttaaatgaataagataaaagagttctttcgtgattggagtatatttgagaaagtctggctgattttcgtgtgttccctgatgactgtcatatggtttatcaacggggatacgccgttcatgcttgtcttaagccttacaggcagcctgaacctggtgctgggagcaaagggcaaggtggcaggactttattttgccatcatcaacagcgccatgtacgcgtaccagtgtctgggaatcccgctgtacggcgaggtcatgtacaatgtgctctacagcattccggtcagcgccacggccatctatctgtggaagaagaacgcaaccagcgacggcgaggtcagattccgtaccatgacgcttaagcttgtggcaggggtagccatagccacagccgtgggagtctggggatattcagaattgttaaaatacatgggcggttcctttgcgttcatggattcactgaccacagtggtatccgttatagccagtatgctctatctgctgcgttattccgagcagtggcttatgtgggttattgtcaacgctctgtctattatcatgtggattatggtgtttgtatcaggggacaccacggccctgcttatcattgtaatgaaaacagtgaatctgctgaattccctctacggatacatgaactggaggaaaatatcgcagaaaacagcggaatgaacccttttctctctccaataagttgaaagaatgtcgctctcagtatataatgataaaaacaaaaagagagcggattgaggttattatgagagagaaattagccaaatatgagcagatcaggcaggatatcatacataaaatcgagagcatggaatacaggcccaaccaggtcattccgtcggaaaatgaactgtgcgcatcctatggggtaagcaggattacagtcaggaaggccatagacgagctggttcatgaggggctgctctaccgaatcaagggaaaaggaagctttgtcagggaccatggctcggaggggctgtcgcgtatctacagctttaccgaggccattctccatcagggaaagacgccgtccaaaaagctgctgtcactgaaggtggaggaagcagacgcggatataaggcgaaggatggggctggaggaaggggaggaggtctatgtcatcaagagcatttattatgcggacggcaggccttactgtatcaatacctctatcctccccaggaagctgtttcccaagctggagttatttgatttcaaccacaactccctgtatgaagtgcttaaatccttttaccagctctccttcacaaaggcgcgccagattttaaacgccacagtgggaagcagtgagatctacggatatctggagactgagcagaaccagcccttgctcagaatcaacgctgcctcattttgcctgtaccatgataatgaaactgtattcgagatatatgaatcctatatattgacggacatcctcagctattatgtggaaaaatataacacgtaagtacgcttccgttaatatatgggcggcaaagcaagaaaagagcggtccctgtttaaggcaggggccgctttttgtggaacaggagcagaagtcccatgtagctgaagctcaggaacagaatctgcacggctgtcatgataaagaggggaagctccttaagccagaagcaggactgggaaaatgccagatacatgccgatggaaatcagtaaaaggagcacgggcttaactatcatgttgacggtatcccagcaaaagggtaccagtcgctttaccgccaggaagctcatgagggccagggccagttcactgaccagcatgccccacaggtatcccaggataccgtatctgggaatggcaaagagtacaaacgccagccgtatgaccatggcaaacacattctggaaaaaggtggatgaagtcctgccaagaccgtttaagatgcttcccatggtagtggccaggtacataaaggggcacagccatgacaggatggtgatatatgtacctgcattctgatcgtggaatacgctgacgcccagctggttcccaaagatggtaaatatgccgatgcacagcacacccatatagcagctgtagcgcagggacatggatatcatggaggaaatacgggcctcgttgccgtcggcctgggcttcggccaccgtgggcagcaggagcacggccatggagttggtgatggcagagggaaacaggatgaagggcagggccatgctggtcagcacgccgtatacggacagggcctctgagtttgtgaggccggagctcatcagcctgttggggatccatatggcttccgcgcttcccaggacatttaatatcagacggtttcccataaggggaagggccagagccataaggggggccgcagtggcgccaaaggaaagggggatggccggagctcggcgggaatccccgtctttgcagggcgggaagaagccaaggcagaacacagtgaacacggcagatgccatctcaccaatcaggtgcccgtatacagccaggcttaccgtaatctggcgtccggattccagccagatgctggcgatgaggaacacggcgcccatgcgtatgacctgctccgccacctgggaaaaggcggggacacgggctttctgcatgccgtagtagtaaccgttgatacaggcgtggagggctgcaaagggaacagacactgccatcaccggcagatagggggcgcatcttggttccagcagaagcttttctgccaggaaaccggcatttccatagatgacccaggccaggagaaaggacatgcccatggcaatgaccagacccgtcctgaatacggccctgcccctggtctggttggcagccacgtactgcgacagggcggtctggatggagcctgcgcagacagcgaaacagatactgaatatggggtgcaccatattgtaaatccccagtccctcggcgccgatggtcctggacatgaagattcggtagaagaatcccagtatcctgcatatgaacccggtggaggtcaggagtagggtcccggtgatgaaggccattttcctgggtgacaagcgcttggagacaggggaggatgcggtcaatgagtgattcataaacgctcctggagatgggaattattaaaaatatatgataaattccaggatgtagaacacattggacggcgatttagaggccctctaacttgttaaattccctgaagatgccccggattatgactaaggtgagaaccagggttgcgatgtcggcaacgggctgggccagctggatgcccaaaaggcccaggaaatgggcggcgatgagaagcaccggaatgaggaacagaccctggcgtgagatagccagaagggtggcgcggaatccgtagccgatggactgggacatcatgttgctcatggtcagaaatccgttcatccacatggtggctatctgcaggcgcagggccagcgtgccgatggcaatgacttcaggatcgtttttccggaacaggctgattacatgaccggagaccaggaagccgcctgcgcacaccacaaccagtatgcaggtggtaaatttcacgcagaaccagtaggcctggcggacccggctgtattttctggcgccgtaggaaaatccgcacacgggctggaacccctggccgaagccgatgacggctgagttgacaaagtaaatcaggcggttcacaatggccatggcagcgatggccgcgtcgccaaatgggtgggccgtggtatttaacacaatagtcgctatgctggccataccctggcgggtcagggagggaaggcctccgcttaagatcttgccgtaaaggaaaagggagggacggaaattgccaatgcggatatggatacactccctgcgcaggttgcactgggcgaggagaatgcagaaactgataaactgggacaggccggtggcaatggcagccccggatgtgcccagaccaaggccgaagatgaagatggggtccagggcaatgttaaggatgccgccggcggtgattcccaccatggcaaaggcagccaggccctggagccgcagcaggttgttcatgataaaggaacacatcataaaaggcgtggccaggaaaatatagcgggcatattccactgcatagggcttgatggtttccgtggcgcccagaagcatcacaacctggtcaatgtggaacaggcagaaaacgcccagacaggtacccaggaggaagccggtaaaaaacgcgaccgagacagcgcgttccccgtcctcatggcgtccggcgcccagacaccgggccatgtagttgccgctgcccatgccgatggtaaaggacagggcctggatgatggccatggctgagaatatgatgcccacagcgccggaggcgctggtgccaagctggctcacaaaaaatgtatctgccatgttgtagatggcgctgaccatcatgctgatgatggtggggacggcaagccgcgggataaccttgtgtatgtccccgttcaccagcatttcgtaccgttcgttttctgattcattagagctcatgatataccgtccttttggaatattgttgaagttttgaaaggtatggcctctatgtacgtatcataatagttcatcagccttccttcacaggcagaaaccagcaccctcccgatagcaggaccggggcggtaattatgcattttaagataatcataatagatggccaagtcattatcagccggatcctcatatgagctttttagaagtacatgcagataaacacgcggcgcatcatccttgggacgaaggagcgtacccggatttgccgggacggcagtaaaccggccatagtcatatctggatggggtttgcggctgtatcaggatgactaattccttttcgtggtcatacaggtgggacaggttttctttattcaaaagctcataagcgcagatggccggaagggagagggataaaaagctgggttcagaatacaacattgttcttacggtattgacctggtctgatttaatgtcaatgtgtttcaacttatcctgtagatcctcaatcatatcacatatgtattcacggcggcactggagaagggaatagatttcttctgcatttaattcatgtatatgctttaaatcctggatgggtatggaaagctgccggtataaggtgatgtcgcacaaggtgcgcagtgtgtgcatggaccaggtgcggtagccattttcttcgctgtggtcgaatttgaccaggccttcctttccccagtatctcagtgttgcaattgaaacgctgaataaatcggctattttccctatataattttttttcggcataacaccatcctttgtattgataaacatgttgactctaaagctactttatggtttatagtacaatcatacattttttatatgtatagcttgatttcctgcaggaattgagtactattgcatatttttttccattataacaaaagggaaaaaatataacaataggaatagtaccataaaatatgaagggaagtgatgtaaaagtggcacctgttattgcaatcgtaatttgctttgcctttgtttcattaggggatattgtatcgttgaaaacgaaagcaaaatttccgtccctggcagttgctattgtcgcgtatcttatcgccatatggtgtggaatgcctaagacctatcctgatgtatccggactggcggcattgggggatatattgtttcctgtgtttgttgcagggcttgcaacaagtatcctcccaatatcaattgtaaagaactggaaatttgtcatcataggctgtattgcagtactggcagattttttatgtaccgtagtagtcggaggccttttttatgacccgagagagatgtttgcggcggcaatgacgacctgcggctccggcctgaccggagggctgattgtattagaccgtttgaagggaaccggcctgacagagatggtcaccataccgctcttgctggcgtgtaccattgacgcaatcggacagccggtgggttcgctgattacaagaaaatatgctgggaagcttattgcctcggacgcttatctgacagacaaaattgtggatcattccgatgggggaaagctcaacaaatggggggcgccttttaattcttctgaaaatccaagtccgcggttttgtgcctggattcctccaaagtatgagacagaggcagttgccttcttacagttgattgtcgttacggcactagccatgtggctgggaggcattaccggccttggctggtcaatcgtgctgattttacttggctttggcggcacattcatcggactgttccggatgaacatgctggaccgtacgcagaccggaggatttgtaatggctgctatctacgccctgctgtttcaaatgctcaacgatatgacgctccaggaaatcatggctaaaatcgttccgctgctgctggttatcctgttaagcggagtgggactggttctgggcggaatgctgggagcgaaagtatttggttttgatccgtggttaggcgcctcggccaccattggtttgttttacctatttcccggtgtgaggaatgtaatcaatgaggttgccagaagtttatccaggaatgaagaagagaggctttaccttgtagaaaaaatttctccgtcctgtataatagcggcctccatgggcagtaaattttgtttgttggcaggagttctattgatgccgcttatcatccggtaatgtgatgcggcaatgtatgagtaagaatcacaggaggtaataaaatgaaggtgtatatcagtgttgatatcgagggaaccgccaatgcggttggctgggactcaacagcgccgggcggattggactatgagcgcaaccgtctggagatgacaaaagaagcggttgccgccgccaggggagcacacgctgccggggctgatgaaatcgtaattaaggatgcccatggccacggaaataacattctcccggaatacatgccggagtatgtggagctgatcagaagctatacatatgccccggatgtaatggtagagggcatcgacgagagctttgacgctgctttttatgtgggctatcacagcgcggcagggtgtgagggcaataatctcgcccataccatttcgcattcaaaggtacattccatcaaagtaaatggggagatagcctctgagtttatgatttacagctatatggcagcctaccgcaatgtccccagtgtactattgaccggtgacagaagcctgtgccagacagggaagaagtatcacccatgccttgtgacagtaccggtaaaggacgacatcggaggcaggaatagaggaatcagcggggaattggcatgtaaacagattgagaaggctgcaaagcatgccttggaacaggatttggcagaagccagaattgtactgcctggacatttcgatgtagagctgtgttttaaggaccatacactggcgaaatcaggaagctattatcccggcgcaacccagaaagatccttataccataaccttccagtcagatgactggtatgatgtgggaagattccttattttcaccattttataaaaggatatctgtatataacaaatcccattggaaaaagaaagcaacggcgcttaaggacataatggtatcacatcaatgtccccaggcgcctttttccatgatgtgaaaaggaaatatatcctccttgcccttataacctaattgcgcaaaagcccggctgagtgtgtaaacatgcgttactgctattattcctcatcctcacaaccgcaggtgggatgcgtcagctggtagcggtcccccatatttttatatccccagtcacacatgaggctgagaatcggaaaaagtgtctttccgtgttctgttatggaatattcaacctggacaggaagcgtgggaatgactgtccggtcaataattccatcctcctctaattctctcagctgcgcggtcagcgtctttttgggggcggttcccagataacgcaggatttcattataacgttttacacccccgtactgcaggtagtgcagaatcagcggcttccatttcccgccgatgaccttgagagtcacctctatttcgctggaaacaatttttatgtctggcattcgtgacgcctcctttaagtgttttaaggaactgtgtttattatatcagattttttgcctgtctgcactatacttgtctgtaagatgaatgcgcctgaaatgaaggttggcagaaagcggaagggagagcatgggtaagaaatggaagaaagggggaagaacggggaggaaaggagaggaaagggcgagagggaacgtgataagcagcaatagggggagaaacctgcggacgggttgccccccttttttgcttgtgatttgttaggccaggggcctgtttttgatggtactagaaattaaaatgctccggatccgccccaaccctggctgcgcggtttaagcgggtgactgcttccatgtcctggtcggataattcaaaatcgaaaatagactggttggagacaatccgctcccggtgtgtggatttgggaatgactaccacatttctctggatatcccagcgcaggacaatctgggccggtgtcctgccgtatttttgtgccaaccggaccagcgtttcatcctgaagcaaatttccgccggtcccccccaggggactccatacttccacggcaatatcgcggctgaaacaataatcaatcagttcattattattaaagtagggatgggattccacctgattgacggcaggcatgacgtctgccctcttctccagttcatccaaatggcatttgtggaaattgctgaccccgatggcccttattctgccttgtttatagagcttctccatggcagtccaggcctcggtgaaaccctctgcaggccaatgaatcaggtaaaggtcgatgtaatctgtctgaagggcggccaggctttcattaaatgcttcctctgtccgtccggcccgtatatcatcattccacagctttgtggtaaggaaaatctgctggcggggaattttgctttcacgaattgcgtctcccacgcttttttcatttccatatatctttgcagtgtcgatgtgcctgtatccggcctccagcgcccagcaaacagcgtccatggtctgctgtccgtctgcggtttgatagacacccaggcctaactggggaattttattcccctggttcaattgtacatagtgcataggatactccttcctgtcctaatgtgcggcagtcttttcaggtccatggtccgccattctgtatattgccagcatatcatcttcatgaagaaccatggcagagcctttctgcccgccggacgccaccgcgcatttgcgggccattgtctttaaatccccgtccgtgggcgcgattcccagctcctgcaaggaggtgggcatatggatggcgcggtaaaagtcctccattgcgcagatgcccttaagggctgtatcatcaggtgcgccgaggtcctcaattcccattacattgacggcaaagcggtggaaccggggcaggcagtttttatagacatatcttgcccagcttccccagattgcagccagtccggctccatgggcaacatcaaacagtccgccgatttcatgctccaatgcatgggaggcaaagtcacccccggcatttccgcagccggtaagtccattgtgggaaaggctgccggcccataaaatttctgcgcgggcatcgtagttcaggggatcctccgcaaggatttttgcatttttaatgacggtgcgcatcagtgcttccgccatactgtccgttatttccatgttgccgccgtttgtgaagtaccgctccatggtgtgcatgaggatatccgtacacccgcaggctgtctggtaatcaggaagtgtttttgtgagatccgggttcatgactgcaaatctggggcggctgaggtcattgctgtagccgcgtttgatccatccgtcttccttggtgatgacagaggaatcgctcatctcgctgccggtggcggcaatggtcaggacaacgccgatggggaggcagtgggacggctggcgcttatagtcataaaaatcccatacatcgccctcattcaccgctccataaccgattgcctttgcggagtcgatggcgcttccgcctccaacggccaggatgaaatcaacgccctcttttttacataattcaatgccttcatagaccagacccagcctgggattgggcacagcgcctcccaattccacaaaatccatgtgttcggccgccagtgaagccttaaccctgtcaagaagaccggaacgtatcacgcttccgcctccgtagtggatcaggacctttttgcctccctgctcctttacaagagatccggtctgtttttccgtgtcctttccaaaaaccacttttgtaggtgtgtaatactgaaaattgtgcattttcttcttcccttctttaatgagtgctgtgtgaatagatgctgtttgtgttttctttacactgcaagtataagaggattgcctgaaaagcacaagaaggcacatttttttcaccagggtactttaaagtgcccttacggcctgtttattgcttttttccttttccagcactctttttgattatctggtgcctcaggagtatggctgccatgcggatacacactgggttaaattgtatgggccggcggacggagcaggcacggcgtttgcaggtgaatccggcgcggcaggccaaagaagccgctgtctggagatttccatggaagaaaagccattttatttttcagccatcccatatacgccccaggaactggagagcgcccttcaccgggaagagcttcccgctccgcgccggaccgtggtatccatcctgggcgccatgcgtggcgtgggcggtattgacagctggggatcggatgtggaaccggcttaccatgtgccggcagatgaggatattgagtatggatttgtgattcgcaggggacaggatgtataaatcatggcaagataagtgatttctgaaaaccaaatgttcttaaaaccaaacagcctgatgcgtcagattggctctgtccggagcctttgacgcagcaggctgttttttgtctgcaggagttttactgtatctggcctggttatcaggcgggggcgggatgggggaatccgaagctgtccagacggctttgaggcgaaatatagccgcagcggattgtgcccggcagccggatggtttataatagagtcattgggtgattttatgggaggtattatgagagagctgatttgggggaagacgctgcggtcccggctgatccggtataacttttttattatctgggttatagccatatttgtcagtgtttgtacctatattacggccagcaggaaaacgctggaggtggccaagaactcgctgcagcatcatgtggagagtatatcctaccggtatcagctggcctacgaggaaatgattaacattgtcctcaactgcacggagagaaagacctttaacctgggggaaatcgggcggggacttacgcccggggccaggaagaaggggctggattacgcggagcttatcaaggattactgcgctatttcggagtatggggattatattgtgaagctgtccgtgtttgatgaccggggagggatggtgcagaccggttcttcctttggaagcacggatgatgcgaaggggattctggatgggggatggctggaccgggagctggataagaccatggacagctatgagctggatttggtggactctccctttttccagcatgaaggacaggtcctgcccattgccaggacactgaccggaagcaggtcggttccgggaggatgggtggtgctctgcctgtccacggatctgtttcaggatgtgcttaaggatacctcgggaggccaggaggccgtggtggtgaccagtgagggaaaactcattgcctccctctatgaaccggaggaccatcgggaggaaaatgacagggtaatcaggcagctgcagcagtcggggcaggacaaggggctgctggagatgaagattcacggcaggaacagcctggtggcctttgaacaatatgaccgcagcggcgtcatggtctatgagaccattaccctggacagtctcagcaatgacaggctcatgattatccagaccgtcatcatcatgtttgcggcctgcctgattttcggatttattctgtcggtgctgattaccaatcagattaaaaagcccattgaccggctggtcaggcacatcggccatgtggctgcgggaaatttcaccagggacccggacatagagggggaggatgaaatcggcaccgtgggcaaggttgtaaatgacatgtcggagcggattgataccctgatggcggaacggctggaacatgagaaggagaagggggatttggagctgaaaatgcttcaggcccaaatcaatccccattttctctacaataccctggattccatacggtggattgccgtcatacagaagaacagcgggattgtcaagatggttacggccctgtccggcctgcttaagaatatggccaagggattcaatgaaaaggtgaccctgcagaaggaactggatttcctgggggattatgtcaccatcgaaaaggtgaagtatgtggagctcttcgacctggaggtccgggtggatgagccggagctttatgaggccctggtcatcaagcttacccttcagcccctggtggagaatgctattttcaatggaattgaaccgggaggaaagcacggcaccatcttaatccatgcttacagggaaggggatgtgttcatcatcaaggtgagggataacggcgtgggaattgcgcgggaaaagatggcctcgattctgaaccatacggaaaaggtaaagggcagctccatgagcggaatcggccttcccaatgtggaccggcgtatcaagcttaactatggagaggaatacggccttacgattgagagccaggaaggggaatttacagaaatcaccataaaaatgccgcttgaatatgaatgcgaaggtgaatccagataaaacaggtaaggggaagagacagatgtatcgtgtgatgatagtggatgatgagccgttgattctggcgggtatcgcatcccttcttgattggaaagagtatggatgtgagatttccgggaaggccgcaaacggccagcaggctctaaagcttatggaggaacagaagcctgatattgtgataacggatatcaagatgcctggaatggacggaatcgggtttatgaaggctgtgaaggaacggggatgggatgatgtgatttttatcctgctgaccaatctggaggaattcagcctggccagacaggcattgtccctgggtgccgtggagtatctggtaaagatggagctgacagaggaaaagctggcggacagcttaaagcttgccatggaacggcgggagatgaagcgcaaggcagaggcggcgggtacggctgtgactgtttccagggaagaggctgtcaggggatacatcgaaaagcttctgacagatggaggaacatttagcggaggagccagctccggtaatgcaggtgaagccagcgcacaaaatcagggggaggggtacgattcgtgtctgaggcggccggtgctggccattatcagctttaactacggatatgaaggattctcctctgattttacaagggaggatcagaaaaaggtcatttcctttgcggaaaatatcatcgaacagatggtgaaggggtattttgaccacagctgcctggtgcgccgggaactgaacagtctggtgttagtgatgtccacagatggaatagaggactacagggaacagatacgcagccttggggagaaaatcatatccgtggttaaggattattttgaagtgtctgtgtccgtggctgtcagcagcaggaaggagagcctgggagagttcggagcccttctgtacgaggccatgagcgccaccaaccattatttttatcactccctggacccggtggtattctattccgaggaatgcgagaccagcgccaggcatacgggaagcttccacatcggattcctgaaaaaggatctgtcccaggcagtggctttaaatgacagcggacgcctggaggagatactgaaccaggtggcatgtctgctaagggagcataatccttccaggcagcaggcggtcaatgcctgcgccaatctgtattttttcctgtcctccttctttgaggacggggaggagccggattttccctatgaggtcaatattatggaaaagctgggacggctggggaccctggggcagatcatacagtggattaactggtttaaggaggcggtttcgcggattctggagcggcgcagggataccagggtggataagattgcggagatggtcagggagtatgtgatggagcattataaggagcgcattaccctgggacaggcagccgaggcgctgaatataagccagggttatctgagcactgcctttaagaagcagtccggtgaatcctttacaaactatgtgtccgccatcaagattgagaaggcaaaggagctgatagccagccatcagtatatgatgtacgaggtatcggatttgctgggctttgatacgcctttttatttcagcaaggtgtttaagaaggttacgggcatgtcgccgaaagaatatgaggcccagtgcctgaagcagaaaaaattataaaaacatgaaaattttatataaaacaataaaacccatctgaaaattttacaaaaagtatgatttgggtcgattcggtttgggaatcggttctggtatagttatatcagaatttgaaatgcaaattttaaggagggttttattatgagattaaagaaaacagtggcattggctctggtgaccgccatggcggcaaccatggcagcgggctgcggcagttcatcctcagacaagggttcagcggcacctgagagcacggcggcaggcagcgaagcagcaggcggcgaggctgacagcaaggagacagagaaaggggctgcctcaggggaaaagcagaaactgaccgtatctgtgtgggacaacgacgctacacctcagtttacttccgtgacaaaggcattcatggaaaaatatccggatgtggaagtggagtatattgacgccccttctgatgagtacgcaaacaaggtgactgtcatgctggcaggcggcgatgctgacccggacgtgattttcataaaggatacagagaaccaggttaccatgaaggacaagggacagattctgaacctggatgagtatattgcaaaggacggaatcgacctgaccatgtacaacggtgttgccgaccagttaaagatggatggcagcagctacacccttcctttccgtaaggactggtatatgctctactttaacaaggatttatttgacaaggcaggggttccttatccttccgcagacatgacatgggatgagtatgaggagctggctaagaagatgacaagcggcgagggcagcgcaaaggtatacggaacacacaaccatacctggcaggcgctggtgtccaactgggccgtacaggatggcaagaacacccttatgagcgaggattacagcttcttaaagccatattatgagcaggcattaaggatgcaggacgagggcgtggtacagagctatgccaacttaaagacaggcagcatccattatatcagcgtatttgagcagcagcagtgcgccatgattcccatgggttcatggttcatcggaaccctgacacaggataaggacgcgggcaagtttgactttaactggggcgtgaccgccattcctcacccggctgatacaaaggcaggcgctacggttggctccaccacaccggttgccatcaatgcaaagtccgatgtgccggatctggcatgggagtatgtgaagttcgtaaccggcgaagagggcgcccaggtactggctgacaacggaatcttcccggcagcagagtcccaggccatcagcgacaagctggcagcaatccccggattccctgaggatggacaggacgcgcttaagaccaccagctgggtactggaccgtcctttggatgccaagatggcagctgtgagaaaggtgctggaggaagagcatgacctgattatgattggcgaggaggatgtggacacaggcatcgccaatatgaaccagagggcacaggaagccagagaagactaatggcagaaacaggattgtgatgcagtaagagtattaggataacaagcaaagagcgtctgattaacgtaacagcgagggttgggcgctctttttgcgccttaaaataaggaaaatggtgattaaaatgacaggaaaacagaaaaaaaaatggaagaggaacgccatcggttactcttttatccttcctaattttatcggatattttatatttatctttgttccggtaatattgacatttgtcttatgtgtgatgaaatgggacggatccagcacacctatggagtttgtggggcttaaaaatttcgtgaagctgtttcatgacagcggctttcggatttctgtcacaaacaccctgtattacgcggtgtttaccgtgcctcttaccatggtggcggcccttctcatcgctgtgctgttaaattccaagataaagggcattgtggtgtacaggactgcgtttttcttcccctatgtggcctccctggtagcggtgggcgcagtgtggaacatgctgttccagccggaattcggccctgtcaatgaattcctcaaattcatcggcattgccaatccgcccaagtggtgcgcatccacggactgggccatgaccgttattatcattgtcagcgtgtggaagtatatggggtattacatggtggtgtatctggcggctctccagggtatttcccaggatttgtacgaggctgccagcatcgacggcgccacgggcttcaagaaattccgctatatcaccattcccatgttaaagccaaccacgtttttcgttatcatcatgatgaccattcagtgctttaaggtattcgacctgatctatgtcatgaccggcggcgggcccggaagatccaccaatgtactggtgaaccatatctacaacgcggcctttgtggactttaagttcggctatgccagcgccagcgcccttgtgctctttgccattgtgctggtggtgaccctggtccagttccagggcgaaaagaagttcacggattacgtataggaggggcagaggatggaaacgagaacgttaaaaagtaaaataggtatctatatgctgctgagcgtgctggcagtgctggtggtcattccctttgggtggatgctcctggcgtccgtaaaaaccagcaatgaggtgttcagcattcccatgaagctgtttccaaaggaattccagtgggtgaactaccagaccatctgggataagataccccttctggttttctttaagaatacctttaagatagcggtgtgcaccaccctgctccaggtgctgaccagctgttttgccgcttacggtttttccaaggtggagtttaagggaagggatttcctgttcctggtatcggtcaccacctttgcagtgccctggcaggcatatatggtgcctcagtttgcccttatttccaggatgggccttacggattcccatctggggctgattctgatgcaggctttttccggctttggcgtgttcctaatccgtcagtttatgataggggtgcccaatgagcttttggaggcggccaggatagacggtctttccgagtatgggattttcgcaaagattgccctgccccttgtgaagccaggcatcgcaaccctggtgatctttacatttgtaaatatctggaatgattttatgggaccattgatttatttaaacagcaccaagttaaagaccatccagttaggtatccgcatgttcatttcccagtacggggccgactatgcgttgattatggcggcgtctgtgtgctccctggttccggtgctgattgtgttcatggtatgccagaagtggtttgtggagggcattacggccggcggtgtaaagggctgatggatgacggcctgacaggggaatgtaagtgacgcgcagagacaactgatgtgcagatacaactgacgcgcagatataactgatgcgcagatgtaaaaccggggaggacaaagatggagaataagaagattgacatgaaatggtgcagcggatactgcaggcagtactggccggaggaatgtgcccatattctgcggattgcagatgacgcagtggcacaaagattcctgtttgaccttccctgggacatggaacagaccgtaaaggccgtgacatttgagggaaaaatcgactggcggcatatgcccgaaggcgacccggaattcatataccagtttaaccgccaccggtactggatctgtatgggccaggcatatgccctgaccggggacgggaaatatgccaggtgttttgtgaaccagctgtattcctggctggaggacaatcccataaaccaggagacaaagaacactacctggaggaccatagaggcaggtatccggggagaaaactgggtaaaggccatggaatattttgaggactgtcctgtggtgacccgggcggtaagggaacggtttctggaagggctccgggtccacggggaatatctgatggactgccgggtgccgttcagtgataagagcaactggggagtgctggaaagccacggactgtttgccattggcgcatatcttatgaaatgtagaggaaatgcctcgggagaagatgtcgcgggcgcagctgctcatgatacagctgcccatgatacagctgccacggacgcagccgcgggccttgcacgccggggggaagcctatgtggcagaggccgtcctgcgcctggtgcgggaactggatatccagattatggatgacggagtccagtgggagcagtctcccatgtaccacaacgaggtgctgcgctgtctgctggaggtgctgcgcgtggcagggcaacagggaatcagcctgccccggtcccttcctgaaaaagccagggcaatggccttggcggacctggcctggatgaagcctgacaggacccagcccttaaatggtgacagcgacaggacggacctgcgggatgtgttcacccctgcggcctggattttaaaggataaccggctcaggtatgccggatacgaccgcctggattttgagagcgtctgggatcttggggcggatgctgccctggaatacgagagcatgagatccgagacgccggaatgcctttttcatgccctggagcaaagcggaaactggtgcctccggtccggatgggacagaaatgcggattacctccactttaagtgcggttccctgggaggcggccatggacattttgacaaactgcatgtggatttgtccatagccggggaagatgtgcttattgattccggaagatatacctatgtggacggcagcctgcgcaggcagcttaagtcctcctgtgcccacaatgtgcctgtggtggactggcaggaatatacccagtgcaccggttcctgggacgtgaaaggaaggaccgcgcccgcgggacaggactggagccaaaaggggccgtatacatttttacagggaacccatctgggatatctgcctgccggggttctggtaaaccgcagaattatatccataggaaccaggattcatatgatcgccgatgaattttatggaacgggaacccatgtgctgagccaggtattccatctgaatcccgccggaagcgtggaaatgcgggaggatgtctttctgtaccatggaattagggcagaggcagcgttttacagggtggccccgtggtctggtgggggcggcggcaaaatggagctggaagagactccggtgtcctttcactataaccagctggaatacgcaccctgcgtcagtctgtggcgggaatccgctctgccctgctccatgctgacagtggcagccggatacgaaacaggcagcggcaacccctatacggtcagccgcgtatctgtcacctcccctgttaccggcagatgcttaaaggacgaggaggcggaagcggtgcggatacaggatggaaaacattcctggctggtagtcctgaatcatctggaaactggggcggacggcgaatacatcggcgcggaaggtagatacggcctggggcgggtcatggtctgcgacgaagcggacagggaaggccggatgaccgtgctccagtggtaaacaggaccagtaccaatgccgcccggcggcaccagaatcatataaaggagcagacaaaggagcagacaaaggagcagacaatgcagacaaaggacagtttacaaacctatacaatcatggaaaagagtgaagccgaagcctgcctggacctggcggtaagcctggtgcgggaaaacctgaagacctttacccgctgttttccggattccaacagccggaaccaattctatccccaaagcagcaaccgggaatggaccaccggcttctggaccggggaaatatggctggcatatgagcggaccggggaggaggtatttaaggaggcaggaaccatacaggcagaatccttcctggagcgcataaaggagcgggtggacgtggacaaccatgacatgggatttctctataccccttcctgcgtggccgcgtaccgtcttacaggcaatgagacagccaggaaggccgcgctcatggctgcggataacctgataggaagattccaggaaaagggacagtttttccaggcttggggagagctgggggcaaaggacaattaccgtctgattatcgactgcctcctcaacatgccgttactgttctgggccagtgagacaacgggagaccagacgtaccggaaaaaggcagaagcccatataaggacagccatggactgtgtgattcggccggaccacagtacgtaccacacctatttctttgacccggagacaggagctcctgtaaaaggcgtcacccaccagggcaaccgggacggctctgcctggagcaggggccaggcctgggggatatacggaagcgccctgagctaccggattgagagaaaaccggagtatgcggatgtgttccggaaggtgacggattattttctaaagcatctgccgtcagatttaatcccttattgggattttgattttgacgacggcagctcagagcctagggattcctcctccgcggcaattgcggcctgcggtatgctggagatggttaagtatatggaaggcggggaggcggcatattatggggatatggccaggcgtctggtgaaggcgctcagtgaccggtgcgcagtgaggtgtcatgaggagtccaacggccttcttctccacggtacctatgccagggccagcgcaggcaatccctgcgccaaccggggcgtggatgagtgcaatacctggggcgattatttctatatggaggcgcttacaagacttgcgggggattgggagccgtactggtattaacagaatacgtaatagaatatataatagaatatcctgttaaatgatgagagggcagaacgaatttttatatgattcgactgcccttttgcggttcctttgggcctgaataatccggcctatgattgtttaagtgcacacgtgcttcatataataacagtagtaccatataaaacaagtattcctattgaaattgtaggaatactatggtatagtaaaaagcgtagatgaagcttttaactttaggactacagaaaggcggatttttattatgaagcaattgatttatctggataacgcagccaccacaaagaccaggccggaggtggtggaggccatgcttccatactttacagaatattacggtaatccctcctcggtctacgatttttccactgagagtaaaaaggctgtaaaccatgcaagggagaccattgcccagtcactgggggcaaagaccaatgagatatatttcacggccggaggcagcgaggccgataactgggccctggtggccacggcggaggcctatggaaataaaggaaaacacatcataaccaccaagattgaacaccacgccatccttcacacctgccagtacctggagaaaaggggatacgaggtcacatatctggatgtggatgaaaatggagtggtcaagctggatgagcttaagaaggctatcaggccggataccatcctcatatcagtgatgtttgccaataatgagatcggcaccattgagcctatcaaggaaatcggggccatcgccagggaaaacgggattctgttccacaccgatgcggtacaggcatttgcccatgtgcccatccatgtggatgagtacaatattgacatgctcagctccagcggacacaagctgaacgggcccaagggaatcggattcctctatatccgcacaggcgtaaagattcgttcctttatccacggaggcgcccaggagcgcaagcgccgtgcgggaacagagaatgtgcccggcatagtgggatacggcaaggcagtggagctggccatggccaccatggaggaacgggctgccagggaaacgcagctgcgggattatctgatgaagcgggttatggatgaggtgccctttaccagaatcaacggatcacgcaccagccgccttcccaacaatgtgaattttgctttccagtttattgaaggtgaatcccttctcatcaaactggatatggcgggaatctgcggatccagcggttccgcctgtacctctgggtcactggacccctcccatgtgcttttggccatcgggctgccccatgagattgcccacggctccctccgtcttaccttaagcgaggagaacacagaggaagagatggattatgtggtggagcagattaaggatatcgtgggatacctgcgcagcatgtcgcctttgtatgaggattatatgaagcacaatggcagtgagaaaaaataatatacagggagaatcctgtatgaaagataaacttggaacgattcaggaggaatatagatgtacacagaaaaagtaatggaccattttgagcaccccagaaatgtgggtgagatagagaaccccagcggaatggggacagtgggaaatcccaaatgcggcgatatcatgcggatttacctggatattgatgagaatcaggttatccgtgacgtgaagttcaaaacctttggctgcggggctgccgtggcaaccagcagcatggccacggagctggtaaagggaaagacagtccgggaggccatggctgttaccaataaagcagtcatggaagcacttgacggactgccgcctgttaaggtacactgttctctgttggcagaggaagcaatccatgcggccctctgggattatgcacagaaaaacggtattaccattgagggcttagaaaagcccaaggataatattgaggaagaggaagaagaggagaactattgagcaggaaggtagtagtaggcatgtcaggaggagttgactcctccgtggcagcctggctgttaaaggaacagggttacgatgtgattggcgtgaccatgcagatttggcaggatgaggatactgaggtccaggaggcagagggcggctgctgcggtttaagcgcggtggatgacgccagaagggttgccatggacctgggtatcccttattatgtcatgaattttaaggaagagttccgtaaaaacgtgatggattattttgtgggtgagtacgtggagggaaggacgcccaacccgtgtattgcctgcaaccgccatgtgaagtgggagtcgctgctcaggcggagcatggccattggggctgattacatcgccaccggccattatgcgcagatagacaggctgccgggagggcgttattccctgaaaacctcggttacagccgcaaaagaccagacatacgctctctataacctgacccaggaacagctgtcccataccctgatgcctgtgggaagctaccacaaggaggagatacgggatatggcaaagcgcctggggctgccggtggcgcataaaccggacagccaggagatttgctttatccctgaccacgactacgcgtcgtttattgaggagtacactggaagggagctgccgccgggaaacttcgtggacctggacggccgtgttctggggcgccatcggggcattacacactatacggtgggccagagaaaggggctgaacctttccatgggacgccctgttttcgtggtggaaatacgccctgaaacgaatgaagttgtcatcggtaacaatgaggatgtatttacaaatgtgctccgctgcgataaactgaactggatggcagttgacggacttcacggaaagcccatggacgtcatggccaaaatcagatacagccacagaggaagcccctgtaccatccgcgaaatcggggatgatatggtggaatgctgtttccatgagccggtccgggctgtgactcccgggcaggccgtggtattctacgacggggattatgtggcaggcggaggtaccataataagatgaagcggaagataagagaaagaagcgccggatgtaaaagcagcggggcgcccacagacagaatagaacataacggaacggcacgcagcaaacggcgggcaaatggtctggccgccattggtctggcaggcatcctggccgccggcatgggactgaccggttgccaaaactatgagtccagcagcgagatgaaggccagaatccagtccgaaggcggggaggcgtcctggagccgggagagcccggcagccgtcggggcctcagctgtacagggagaaggcagtgcggataatggcaataaggctgagaccatcaaactggacacagagcggaccacagcccccatgccccaatttgaggatgtgtcggacacggtttatgtgaaatcatcagacggcggcagtgtgcgtatacgctctgcctgcgataccggggatgattccaacattcttacatacgccagtcccgggacagcgctaaagcgcaccgggaagggagagcaatggaccagaattgattataatgggacagcgggctacatatcatcgggatatataaccacccaggttccggagaccgcagctttgccgcctcaggcatgtgtggacagcggggaggtaaccctgaatccttcgtggaaatacgcggagttttccaagattaattcgggtgcggcagtcctgtaccgttccgaggcagccagtcccaaaggcattacggtttgtgtcaacgcgggtcatggaacaaaggggggagcttctgtcaagacgcagtgtcatcccgacggcactcccaaggtaaccggaggcactaccggcgcaggggccacctctgcggcagccgtgtcaggcggcatgaccttttctgacggaactcctgagagtaaggtgacgctgtccatggcaaaaatacttaaggataagctgctggcggcaggatatgatgtgctgatgatccgggagagcgacgatgtccagctggacaacatagccagaaccgtcattgccaacaatgcaagcgactgccatattgcccttcactgggattccaccaccaataacaaaggggcattttacatgagtgttcccaatgtggaatcataccgcagcatggaacctgtaaagtcccactggcagcagcacaacgcccttggtgaaagcctggtggctggccttaagggggcgggagtcaagatattttccggcggctccatggccatggatctgacccagacttccttttccacggtgccttctgtggatatagagctgggagataaggcatccgaccactcttcggccacgctggccacgctggcagacggactggtggccggggtgaaccagtattttggacaataaagaacaattgtaaatgtaaggaaaacgtaaatccttccacatttacaaataatacctgatgcgttacaatggacataacaccaaaggtttgtttaagacaaggagggattacatgaaattgatgaaacgtctggcggcagtggttctgggagttgcccttttatgtcccatgaccgcctatgcggcccagtcacaggaagcattggagctgtacaaggcagtggaagccagaaaccagaacatgacggatatgaacgccttttacgatttcaagatgaagatgtcaggcagcctgtttgagaatgaaggtattgatcccgttgatatgcggctggagatgaatatgaagatgaatcatatacaggatcccagccagatgcgctacatggcctattgccgtatgacggttccggaaagtgagcctatcacctattccatgtattatctggacggttatatctacatggatatgctgggccagaaggttaagtaccctgtggccatgggagacatgatgaaccaggccctggcgtcatccaaggcattcgatgtgccggaagatttggttggagactttagcctgtgggatgagggagagaacaaggtcatcggctataccatcaatgatgccaagatgaacgagtacatgcagatggtactgggttccaccggacttacaggcatgctggacggccttgatatgaagcttcacaatatccgcggagaatatgtggttaatccggccggcgactgcattaagatgcgccttaagatggatatggatatgaccatgcagggtgagaccttcagtgtgaatctggacggcgatgtgggaatagcggatcccggccagcccgtggatgtgcctgttccaaatcctgcggaatataccgagatgcaggcagcagccagttagaggaaatttgaggctgtatgaaaggcagttttagaatttgcgaaaatgtctaaaaaattaacgccaactactacacaaaacacggattttagtgtataatgcagtagttggcatttttttggaggagtacccaagtggctgaagggtctggcttcgaacaccagtaggtcggtagcaccggcgcgagggttcaaatccctcctcctccgtttatgcaatgaggacagtccgtaaggactgtacctgaaacagaacacataccagcacaatgcccggagcgggccgtatctgcggtcctccgggcattgtgctgttttgtgctgtgacgattgcaggcatctgcaccggcccgggaaggaagggggtaaaagtgcgcggaaaaatgcagccctgattcatcaggactgcatgcggttttcaggaaattcctgaggaaaatcatgggtggcgttatcagcaccgggtaaatctatttcaggaatgtctccatccccataggtgctgctgtttcttcctggaagttccaggggttcctgtctgccgggatcctgctttccgggtgtctgtattctgtccatgtgccatcatccttccgtaaacatattttccacgtagttgcgcatttcctcatggctcattatgtttctggccctgtttaccacctgtttctgctccggctccgtaagaccggagaaacggctcatggcttcgggattcatggccagctccatggtaaatccaatgggaagttcatctcgctctatcatattcatcacctcaggattagtatggaaggcggggatggaaaatatgcatggcaggattgggtatttagcaggattcggtatttaaaatgtacctgtaacggaaccgggaatggtgaattgtacggcacccatgtatcccggcgccacatcatattcattaaaggtaatcacaagttcgccgttttcattgaagtaataactttcatcgcctgttagtcccttgaaatcctcatccggcatatcggattggtagaagtacaccacagagtcatcctttgccatctgttgagccatctggctttttatattatcgctgacggcctccagcatttccggacggtcatggaacaggtcttttaaggagatgatgctgccggtagccttatctatggtaaataccttgacaaactgagtgccgctggccatggtaagggtggtatcaatgcggatggacaggtatttgctgttgtctgtcaccactttatactgtgaatccaggccatagtgcccctctccgttgtccctggacaattcttcctcgtacatggcgataagctcattgccgtaatcctctatggatttgttggccggtacctgggcgccctcggtcccttcaatcgtcacctggggaaccttgatatctgcctcaaaattatcttttttatcttcataggtgcggaaggttaccacctttgcaatggatccaatgaccggaatctgttccatggcattggcaagggccggagtggcgttggccagcacggtaatggcaatcatggcagcggcagcggccccgcctgttttttttgcgaatttcatgataatcacacctttctgttctttttttgcctgggcaatgcccgcaagcatgcgttcctttgcttccgttggaaccggtatgctttcataatctgatttcagcttatccatcggtctgttttcttcctgtttcatgagcatggctcctttctgaaaaatggttctggtttgcgcccaagggcattggctccagttccagccttagttttttcagggtacggtaaagcctggcctttactgtattgagattttcacctactatatcagcaatatcttctaatttaagatcctcaaaataccgcagtatgatgacggtcctgcttttgtcatccagccgttttatcatctgttttaagtccaggtcctggtaatggtcctctgtgggagtctccggcatttcttctgtgggtgtttctttctttttcctgcgcagcatatccaggcttgtgttgaccacgatccggtaaatccatgtggacaggtagtctttatttctgacccctttgcagtccttaattgcccgataggcgctttcctggactacatccagggcatcatcctggtttcgcatcagcttaaatgccaggcggtagtagcgttcataattttctgtaaggagacgttctgtttccgccgtattgttgtataagcccatgtatctgcatcctcctttcgtatccttctgactgttagacgtctgaggcggggataaagttgcatctattttaagattttacagattggtttataaaatgcaacatccattgtgttttaagctgaaaaatgttatattgttcatgtgacagaatcagcggaacatgaatcaatgaaaggtgtacgaaaggatgaaagaggaacggaccaacgatatagacaggatgagagaatacgaagatatccggcaggtaccgctggagcccaacaggcctgcgtcaggccggcagaatcctcctgtgggggattcctacatagggggcaggcccagacgagagcggatttccaggagaaagcccggtataggagatggggcgccggaggccagaacgtctgcagccagaacatctgcagccagaaagtctgctgacagaacggcgcaggaggtccagaacaccggaaagaaggctgaccggtcccaaagaagtaaaaaagcaggaaattcaggctcaggagaacaccggaaccgttcgggcaaaggcgtgtccttccttgcacttttgctggtgctcatattgggcgccggcgccggtctgggcggaggctattacctctggggatgggagcggccttataccgtggatttgaaggcggtggaggtgccggattatgtagagcaggattttataaggaagaatatattttccagaccggacgtggggcgtcagaaggtggataagattgtcatacactatgtggccaatcccggctccacggccaagaataacagggactattttgacagcctggctgaccaggacccgcaaaaaagcggttcgtctgccagcagccattttgtggtggggctggaaggtgaagttatccagtgcatccctgtaaatgagattgcctatgccaatgcccctttaaacaacaccacagtcgccatagaggtgtgccatccggacgacagcggaaagttcaatgatgccacctatgaatccctggtggatttgacagccttcctctgcaggcagctgaaactgacgcccggggacgttatacgccattatgatgtgaatgaaaaactctgccccaagtattatgtggagcatgaggacgcatgggagcagtttcttaaggatgtaaagacggccatgaagacggaaagtgcgggatgaggtgcatagacatattaaactaaatacataaatataataaatgccgtacagtcttgaggtaaaagattgtacggcgttttcagacgcagacggaaacttccggctaaagaggaatgaattccggctttctgccatggtacacggtaaaatatctataaccgcagtcagacagcagttcgcggcaggtgtcaaaggcataacccacatattccggggtatgggcgtcggaaccaatggttatcatctcgcctcccagctcccggtagcgcatgagaatcttccggcagggattgggctggcccaggccgtacttgaaaccgcctgtgttgcactccagggatttgccgttttcaataagaatctttaagagagggtcaatccactggctcagatgccggtagtcgtaaaagtcattctggtggggagcgtagcgcaccgcataatccagatggccaaaggaatcaaaggtgcggcacaggtctctgacacgcaccagggaggcttcaaagaaatcctcaaagccgggcacctcgccccgcttgttccagtattccgggtcatatgggtccatgctctttacaaaatggctggatccgatgatgaaatcaaaggaatccccatagcgctttacaaagtgatccaaatattccttaagatgatcctgaagtcccagctcgattccgatgttgatgcggatgcggtccctgtactctgcctggagcatgcgcagggacgtgagataggtggggatatccaggataaaatcacagtcgcagaatccggaatcgtagtcgtggtggtcggtaatgcacatctccttcatgcccagttctatggctttctcaatctgcaggctgatgggggtgttggagtcaccggaaaattcagtgtgcagatggcagtcgtatatcatcggagcttctcctttgcttctatataaataatagcttcttaataaaaaacagcagtatttttattaataccggcattttcatacgcatttcataacaacattatagcagaaaatacccgaatggcaagattccagtcttttcttcgtataaaaaggtcaaagatccgtaaaaataaaaaaaggacttgccatttctttagaaattgattacaatagagagaagttgattaatatttaacaataatatattttttaacaaactaggaggaattgaatcatggcagtaaaagtagcgattaatggatttggacgtattggacgtctggctttccgtcagatgttcggagcagaaggttacgatgtagtagctatcaatgacttaaccgatcctaagatgttagctcatctgttaaagtatgatacagcacagggtggatatgccggcgtttatggccagggtctgcacactgttgaggctggagaggattccatcactgtagacggcaagaaaatcaccatctacaaggagccaaaggctgctgatcttccatggggcgaaatcggcgtagacgtagttctggagtgtacaggattctactgctctaaggacaaagctcaggcacacatcgaggcaggcgctaagaaagttgttatctccgctcctgcaggcaatgaccttcctactattgtatacagcgttaatgagaatgtactgacagctgatgataagattatctccgcagcttcctgtacaacaaactgcttagctcctatggctaaggctctgaatgattatgctcctatccagagcggtatcatgtccaccatccacgcttacacaggcgatcagatgattctggacggaccacacagaaaaggcgatttaagaagagcaagagccggcgcagctaacatcgttcctaactccactggtgcagctaaggctatcggcctggttatcccagagctgaacggcaagttaatcggttccgcacagcgtgtacctgtaccaaccggttccaccacaatcttaacagctgttgttaagaaggctggtgttacaaaggaagacatcaacgcagctatgaaggcagctgccagcgagtcctttggatacaatgaggatgccatcgtatcttccgacgttatcggcatgagatatggttctctgttcgatgcaacacagaccatggtagctcagattgcagatgatctgtatgaagtacaggttgtttcatggtatgacaatgagaactcctacacaagccagatggtaaggacaatcaagtactttgctgagttaggctaattgtgacaacaggacagtaatttctaagtagactcatgaagggtccggtcgtttgggccgggccctttgttcgccaaatgtatcaatgactctgaaaggggaaagaaatatgttaaacaagaaaacagttgatgatttaaaagatttacagggaaaaaaagtactggtacgctgtgatttcaacgttccgttaaaggaaggcgttatccagaactataaccgtattgacggagccatccctaccataaagaagcttcttgaccagggcgccaaggttatcctgtgctcccatttaggcaagccaaagggcgagcccgttccggagatgagccttgctcctgttgctcctgctctgagcgaaagactgggcgtagaggttaagtttgtggacgatccaaaggtaacagggcctgagacacagaaggtagctgctgagttaaaggacggagaggttctgcttcttcagaatacccgttacagagttgaggagaccaaattcaaagacggcgatgctgcaagcgaggcttatgcaaaagagctggctgacctgtgcgacggcattttcgtaaacgacgcattcggcacagcccacagggcacactgctccaacgtaggcgttaccagatttaccaaggagaacgtggtgggatacctgatggaaaaggaaatcaggttcttaggacaggcggttgagaatccggttcgtccattcgtggccattctgggcggcgccaaggtttccgataagattaatgtaattaacaacctgttagacaaggttgacaccctgattatcggcggaggtatggcttacacctttgcaaaggcacagggccaggaaatcggcaattccttatgtgaggcagataagctggactatgcactggagatgattaagaaggcagaagagaagggcgttaagctgctgcttcctgttgatcatgtggaaggaaaggaattctccaacgacaccgagcataaagtagtggatgtaattgacgcaggctggtcaggatttgacatcggacctaagaccatcgcgctttacaaggaagcactgcagggcgccaagacggttgtgtggaatggacctatgggcgtgttcgagttctccaacttcgcagaaggcacactggaagtatgccgtgcggttgctgaactggcagatgccaccacggttatcggcggcggcgactctgtcaatgctgtgaagagactgggctttgctgataagatgacccatatctccaccggcggcggcgcttccctggaattcctggagggcaaggaactgccaggtgtggctgcagctgacaacaaagcttaattcggttttcccataagtgattacagtgtgaaagggagaggtaaaatacaatgtcaagaaagaaaattatagcaggcaactggaagatgaacatgactccgtcagaggcggttgcccttgtaaacgagttaaagccattggtagcgaatgaggatgtggatgtggtattctgtgtgcctgccattgacattattcctgctatggaagcagctaagggatccaatatctgtatcggagccgagaacatgtactatgaggagaagggcgcttatacaggcgagatttctcccaacatgctggtagacgccggcgttaagtacgtaatcatcggtcattcagagagacgcgagtatttcgcagagacagatgagaccgtgaacaaaaaggtgttaaaggcctttgaacacggcatcacaccgattgtctgctgcggagagacactcacacagagggagcagggaatcaccattgactggatccgccagcagattaagattgcattcctgaatgtgacagctgaccaggctaagactgcggttattgcttacgagccaatctgggcaatcggaaccggcaaggtggctaccacagagcaggctgaggaagtctgcgcagctatccgtgtatgcattggagagatttacgatgaggctacagctgaggcaatccgtatccagtacggcggctctgtatccgcatcttccgctccggagcttttcgcacagccggatattgatggaggactggtaggcggcgcttccttaaagcctgactttggcaagattgtaaattacaacaagtaataacggaatgtgtgccctgctcctgaccggagcgtgacccaatgcgggattcacgcgccataaggcggcagggcatttaaaacagaaggagattgaaaatgagtaaaaaaccaaccgtattaatgattttagacggctacggactgaacgataactgccagcacaacgctgtatgcgagggcaagactccggttatggaccagctcatgagccagtgcccctttgtaaagggcgaggccagcggcatggcagtgggacttcccgagggacagatgggcaactctgaggtaggtcatctgaacatgggagcaggtcgtatcgtataccaggaactgaccagaatcacaaaatccattcaggatggggactttttccagattccggagttcctcacagcaattgaaaactgcaaaaaacatgattctgcccttcatatgttcgggctggtgtctgacggcggcgtacacagccacaacacccatatctacggcctgctggagctggctaagaagaacggcttaaagaaggtttatgtacactgtttcctggatggccgcgatacgcctcctgaatcaggaaagggctttgtggagcagctggaagcaaagatgaaggagatcggcgtaggcgaggtagcgtctgtcatgggacgttactatgccatggaccgtgataagagatgggaccgcgtggagttggcttacaacgctctgacaaagggcgaaggaaatcaggctgaaagcgctgctgcaggcatccaggcttcttatgacagcggcaaggcagatgagttcgtcatcccctttgtggtgatgaaggacggcaagcctgcggccaccatccaggataaggattccgtgattttctacaacttccgtccggaccgtgcaagggagattacccgtgcattctgcgacgacagctttgacggcttcccaagggagaaaaggctggacctggtgtatgtatgctttacggattatgatgagaccatccagaacaagctggttgcctttaagaaggagagtatcaccaatacctttggcgaattcctggcagcccacaaaaagacacaggtaaggattgcggagactgagaaatatgcgcatgtgaccttcttctttaacggcggtgtggaagaacccaacgagggtgaggaccgcattctggttccttctccaaaggaagttgcaacctatgatttaaagcctgagatgagcgccaacggcgtgtgcgataagctggtggaagccatcaaatccgacaaatacgatgtcatcatcatcaactttgcaaaccctgacatggtaggccataccggggtagaggacgcagccatcaaggccatcgagacagtggacgcctgcgtgggccgtgcagtggaggccatcagggaagtggacggcgtcatgtttatctgtgcggaccatggaaatgcggagcagctggtggactatgagaccggggagccatttacagctcataccactaatccggtaccattcatcctggtaaatgcagacccatcctgcaagctgcgtgaaggcggcgccctgtgcgatatcgttcccacccttattgagctcatgggaatggagcagcctaaggaaatgaccggcaaatcattgctggttaagtaagaagaatgaagtgagaataaatatgcgtaaaagccagctccgaatgtccggggctggcttttttggccgaagagtgctggattaggcgcaaatgaatctaaaatcagtcagacgacagcatgccttgggcggacttgctgggccgataccgtatcatttgtatcattgccggtgtccggggctttttttcgtgtctgttcttccaaagccgcggcgcccgctttatgcacaggctgttcaactccgtctgctttggcgatatctggtccgcttgcagaagaactgccggcaatcactttctcagcagcggccttttcagcagcggccttttcagcagcggccttcccagcagcggccttttcagcagcggccttcccagcagcggcttttccagcagctgccttatcaacagctgcctttcccggaacgcttccggataacttgatggaagcttttgcgcaggcaggccctaccatttcatacaaaagcccgctggacaggatgatggttgaaagcagctggccgctttcggcagggagcatgcgctgccccagcacagccaggccgatggaaacgccggcctgaggaatcagcgccaggccaaagtagcggcggatttccggtgaagcgtgggtaaccgcggcgcccagggcggaaccggtgtatttcccggcaatgcggaccagaaagtaaacaataccgatcacgccggcagctgccaggctgggaatggaaagcctcataccggaaagcacgaagaacatcaccaggaggggaggcgtgaactggtttaactgcttaaataagtgtttgttgccgctggcattgatataggctgcgccggaggccatacatgccaacaggggagaaacattaagggaagtacagattccggccacgcccataatggtgacacaggccagaaccaggctgtggtccttgctgcggcgcttgtgtatcagcctgctgagcaccacaccggatagtcctcccagcgccagggccaataagttaaagagcaccggaaaggcaatctgcgaaaccgtcacagagccgtttgaggagctggcctggacaaaggccgcgcacacgctgaaggctatcagggacactgcatcgtccagggcaaccacctgcaggatggtgtccacaaagggccctttggccttgtactgccggatggtcataatggtggaggcaggggccgtggcgcagccgatggctcccaaaagcagactgaaggacagggataaccccataatcagcatgacaattgtgataaagatgcctgcggtcagggattcaaacagggtcagaatcaccattttctttccattggctttcagggatgacagtttgaaatattttcctactccaaatgcgataaatgccagggcaaggtctgtgataaaatccatctgtccaatatattgtgaagggacaagattcaggcaccagggcccgatgatgactcccgcaataatataaccggtaacattaggcaggtgaagccgctttgtgattcgtgtcaacagaaagccggatgccagcatgactgctatggtcaatatgattcctgctgctcccaggtttgataaaaatagtgccataatcaacactcctttctgcgtttttttgttttgcttgattatagtagtgtttggtgataaaatcaaatgatattatttgattgggatataaaaaatatttatatatggagggggactggcctgtgtttgacatgaaagtaaagactcttctggctgttatcgagtccggaagctatactaaggcagctcagaagctgaatctgacccagccggcggtgagtcatcagattcgtttgctggaaaatgagttcgatataaaaatattttataggagcaaaaacaaactgaagctgactccccagggaaagattctggtgcagtacgcccgcagggcagctgccgtttattccaacgcctgccaggctattgaggacagcaagacggagaccagccatctgaatgtaggcatcacccccacggcgggggagaccattattccccaggtgctggccaccctctgtaatgagaatccggatatacatataaatatttctgtcaataccattcaaaaaatttatagccgcctgaaggcatatgaattggattttgccgtggtggagggaggggtgccggatgcggcgttagtgtccaccaccctggacacggattacctgtgtctggctgtttcgcccatgcaccgtctggccagggccaagacagtgtccgtggaggagatacgccatgaaaagctgattctgcgcagccgcagcgcaggcacaaggcagctgtttgagaaacatctgggggccagggacatgagcctggaagagtttaacgtgatgatggaactggataacgtgtccatgatcaaggagttggtaaccatggatttgggaattaccatcattgccaaaagcgcctgccgcgaagaacttgccagcggccggctggccattattcccattgaaaattcctccatggtgcgccagatcgacatggtatatcagaaggatttcctgcatccggagtttatccagaatattcgcggtatctatgaacagctgaaggcaaagtaatatttcctgtgaggggcttttccggccgggaagatgggctgcctgagcggttgcggctttcaagctgcggctttcaagttacggttttaaagttatgaaatatcccttccatttttatgggaaataggataaaatggaagttggtgccctcaaaggccgtagaagtctctgatggcctgttttgtataattttaattgatataacatatgataggagtttgaattgtgtctggaaaaaaaggtatgaaaacgaagaagcttttggaaagcttccttccatattatggaagatataagaagattctgatatttgatttattctgtgcggctctgactacattgggagaactgattcttcctctgatgctgcgctatatcacaaaccaggggatgcagaatctggcatccatgacagccggaattgtaatcagaatcggcggtctgtacctgcttctgcggattattgactccctggcagcctattacatggcctatacagggcatgtgatgggtgtatacattgaaacagatatgcgccaggacgcctttgagcatttgcagatgctgtcagacagttattacagcaacacaaaggttggacagatcatgtcacgtattaccagtgatttgtttgacgtgacggaatttgcccaccactgtccggaggagttctttatagcagccctaaaaaccgtggtctccttcatcatcctgtcaggcatcaatctggaactgaccctgctcatatttgtgctggtgccggttatgattatttcctgtacctggtttaacatgaaggtgaaggaggcattccgcaggcagagaaaccagataggcgagctcaatgcccagattgaggacaccctgctgggcaaccgtgtggtcagggcctttgccaatgagccggtggagattgccaagttcggcaagggcaaccgggatttcatggatattaagaagtatacctaccgctacatggcggcttttcagattaccaccaggtcctttgacggactgatgtatgtggtggtgattgtggcaggaggcattttcatgattcagggcaaggtggagccgggagatttggtggcctataccatgtatgtaaccacccttcttaccactatacgcagaatcatagagtttgcggagcagttccagcgtggaatcaccggtatcgaacgtttccaggaaatcatggatgtggtgccggatatcaaggacagcaaaaatgcaaagaagatggagcatgtaaagggcgccattacctttgaccacgtaagttttgagtatccggatgaccatgtgccagtactggaggacattaacatcaccgtaaggccaggggagaggattgccctggtaggtccctccggcggcggtaagaccaccatgtgcaaccttctgcccaggttttatgataccacctcaggcagcattgccatagacgggcaggatataaagaacgttacactgcagagccttcgttccaacatcggcgtggtacagcaggacgtttacctgttctcaggttctgtctatgagaatatcagctacgggcgtccgggagccaccagggaagaagttatggaagctgccaaactggcaggcgcccatgagtttatcactgagctgcaggacggatatgatacgtatgtgggcgagcggggggtcaagctgtcaggaggacagaagcagcgtatcagcattgcccgtgtattcctgaagaacccggccattcttattctggatgaggctacatcggctcttgacaatgagagtgaatacctggtatcccagtcattggagaagctggcagtgggccgtaccactcttactattgcccaccgcctgaccaccatccagggtgcggaccgcatacttgtgctggcaggcaataagattgtggaagaggggaatcatgaacagctgctggagaagaagggaatgtattaccagttatatacaactgcaaacaggctgaaccaggggattgcataaaggagaacatttaatatgaaaatagctattgttgcggacagcaacagcggagtaatgcaggatgaggcaaaggagctgggcatatatgtgcttcccatgcctttcatgatagatgggcaggttttttatgagggaattgatttaagccatgaagatttttacgcaaggatggaggaaggggctgaaatcaccacatcccagccatcgcctaaagacgtgacggaacagtgggaacagcttctggaggaccatgatcaggtggtgtacattcccatgtccagcggactcagcggttcctgccagacggctcttatgctggcggaagattatgaggggcgcgttcaggtggtgaacaaccagaggatttctgttacccagagacagtctgccctggacgccagggatttggcagagcggggatggagcggtgagcagataaaggaaaagcttgaggcaaccaggtttgacagctccatttatatcacggtggatacccttaaatatctgaaaaaggggggcaggattacacctgctgcggcagcgctggggacattgctcaaaataaagccggtgctcaccatccagggagaaaagctggatgcgtttgcaaaggcaaggaccatgaagcaggccaagaccatcatgctgactgccctggcccatgacctggaggatcgtctggcagatccgaaggcagaacacacctatctgcagattgcccatacatgcagtgagcaggcagcccaggagctggaagagactgtaagggagttgtatcccggggttcccgtgtttggggctcccctgtccctcagcattggatgccatatcggccctggcgccctggcagtcgcctgtaccaggaaattaaaggagctggaataagtgtcggaaaagaaatttgttaagaagctgcgtaccttcggcatgagcatgaaggtaccgctgacagccatcatcataggcgctgccctgattcctctctttctggaggccggcattatgctgggaacattccggcagagccagctggacgccaggtttatagagatacagaaccagtgtgttatactcagcaataagatgacccggtccggctatatgacggccgagaaaaagaacaatgccagcctggacagccagatgcagaccctgtctgatgtctataacggaagaattgtcattgtgggaagcaatttccgagtggtgacagatacctttaatctggccacgggaaagtattatttatcagaagaagtcatcaagtgtttcaagggtgagaacagcagccattacaacaaggatatgcagtattttgcccagaccattcccgtgtatgacacggcggacgcaaaagctgtgagcggagtcattgtggttaccgcatccacggagaacattctgtccctgacagataaggttatgggaaagtcccatctgtttctggtgtgtatggttcttcttatcagtgttttgggggtggcggcggcccatttgctgctgcgtccttttaagaagcttcagatgtcctttgacagggtggctcagggagatttggatgcggacatcacagaggagacttacagggagaccagactcctgtcccagtcagtccagaagtccctgagcaagctcaaggctgtagaccagtcgcgccaggagtttgtctctaatgtgtcccatgagctgaaaacgcccatcacctctatccgtgtgctggctgattccctgatggggatggaagacgtgccggtggagctgtaccgggagtttatgacggatatttcggatgagattgaccgggagaaccagatcatagaggatttgctgatgctggtcaaaatggataagacagccgaggaccagatgaacatagagcaggtgaatatcaacggggaactggagctgattttaaaacgtctgcgtcccattgccaaacgtggaaatgtggaactgatcctggagagcatccgggaagtgacagcggatgtggataaggtaaagatatccctggcaatcaccaatctggtggaaaatgccatcaaatacaaccgggattcaggtatggttcgcgtgaccctggatgcagatcacaaatatttctacatcaaggtggctgacaccggtatcgggataccggaggacgcgctggaacatatattcgagcggtttttccgggtggataaggcccgctccagggaagtgggcggcaccgggctgggactggctatcgcgaaaaatgtcattcagatgcaccatggtatcatagatgtggagagtacggtgggagagggaaccaccttcagcgtgaggataccccttaactatgtaccgagacaggaggcaaagccatgagcagacataccgcgagcagacatactgtgagcagaaataccgtgagcagacatgtcatgagcagacataccatgggaatacatgcggtgaaaaggctgatactgcctttgatggcggttgtattcctgctgtcgggctgcggagagggggaaagccctgtctccaatcctgccgagggcagatatctgatttattatctgaatgcgtccatcaccaagctggttccccaggagtacgagacggaaacaaaggataagggggagctggtgaatgaactgatggaccagttcctgaatgtgccaaaggatttggactgccagcccggcctgacggaccgggtgacctaccaggggagccgccaggaggaacaggtgctgtatctgtacttcgacatgaattacacagccatgaaggcggaacgggagattctctgccgggcagccctcaccaggaccctgacgcagattgagggaattgactatatcaatatttactgcggtgaccagcctctgatggaccggcagggaaatccggtgggaatgctgtcggccactgattttatcatgaataccagcaatgtaaatgcctacgaaaagacggagctgaccctgtattttgccgatgagacaggcaaccgcctggtgccggagaaacgggaggtagtccacaacatcaatacctccctggaacagctggtagtagagcagctcattgcaggaccgggacaggaggggcataatcccacgcttccgtcggactgcaagatactgagcctgtcagtgacagataatgtatgctatatcaactttgattccgcctttgccaatacaactctggcagtgaatgagtatatcccgatctattccattgtggattctctttcagagatgacaacggtgacaaaggtgcagattatgatcaacggctcccaggatgtgatgttccgggatgtggtgtccttaaataccacctttgagagaagccagaattatattgacggaaagaatgaatagacgaaaggaaatttaactgaatatgaagagaccgctggttgtactggcagcaggttacgtacttggagaggtgctggccctgcaggttaagacggcggtggacttaggtgttctggcgtggctgtgtgcagctgcggcaggaatcctatggcttttggatacagggaggggagtactgcgcccttctgctccaagagcgaagatgcagggcaggagcaaccggaaacatagagtgcttctgctctttttggtatgtctactgtctggttcgtctgtgggaatgacaagaggacagcaggaaaaagggattctggaccatgaggagtccgtggcccggaccatgaccggcgcccggatattggtaagaggagtaattaaaaaggcagaacaaaaggaaaatacgattacccttatgctggaggaggtgacggccgaggcaggtaaaaggtctgtgaagttcaggaggatggtggtgtatgcggagaacaggacaacggagaaagatgattctgacttaggggaagagctggctgtgggggtaaaagtacaggtgagaggcaagctggctccggtggaagggccgggaaatcccggagaatttgatttcaggacctattaccgaacaaagggaactgcatgcaggctgtacggggagaacctggcagtggcgggaggagaggcaatcccttattacaagggaatcgcagagtttcggatgcaatgtgccggtgtacttgaaaagatatgcatgccggaggatgtggctgtatttaaagccgtgcttctgggagatacatctgatatgaatccggagatgcgggatatgtaccagcgcaacggaatttcacatcttctggctgtcagcggacagcatctggctattatcggcggagggatctatctgatgattcgtcgggccggagccggatatggcaaggccgggatgatatcagctgttcttgttatcagctatggaataatgacaggcagttccggctccgccataagggcggttatcatgatagtatgcctgtggctggcggcggttaaaggaagaagctacgacaccctgtcggcgttgggagcggcagccttaattcttctgtacagacagccctatctgctgtaccacagcggatttgaattgtcctttggggcagttctggcgatcagcggattgggaggatgggtgcagtcattccttgaattggagcgggcgtgggaaaagacgcttcttatcagcttgagcgtacaaatcgtacttacgcccattgtgctgtaccactattttcagcatccgctttacggcatttttttaaatcttttggttatacctcttgtttctatcttaatgtattcgggtattctggggattgtactgggaagcttctggatccagggaggagtggcagcagtgggggccggacattatattttgaggttttatgagctgctgtgcaaatttgcggaagggctgcccggatacagtctggtgctggggcgtccgtcgccgggcagtctggtaatgtattttggcatacacggaatgggaacagcagttgtgctgttttgtatcaggggccggagtgcctttattcgggcaaaatctcctgcaaggtgtaacgcttatctggcagaaagggatttacaaacacgcatatcttccatcagttgtaaacccatgatgttaatgtattttttggggatttatgcccttagttttgcggctttggtcccgcgtcccgtaaaaggactggaggttgtctgtctggatgtgggacaaggggacggcctgttgctcaggtctggtaagagggcggtgctcatagatggaggcagcagcagccagaaaaaactggggaatattgtgctggagccttatttaaaaagccagggaatatcgtggattgattatgcggtggtaagtcatggagacagcgaccatataaacggtcttatatacctgctggaggagtcagaggacataagaataggtaccctggtgctgccagtgatgggaaagggggaggaggtatatgaaaatctggctgcactggccaggagagaaggggcagctgtggtttatatgaaaaccggagactgggtggaaactggggagctgacgcttacctgtctgtatgccggtgaagattttggcaggaaggaccgtaacagccactctctggttttgtgcggggattataagggatttcatatgttgtttacaggagatatgggggaagaacaggagagcagtctggtcagactggcagaacaggagggggccctgcaggatatacatttgaatcatgtacagatactgaaaacagcccatcatggttccaggacatcttcatcggaggtatttctggaccgattgaggattcaattagctgtggtttcctatggaaaggaaaattcttatgggcatccgtcgccggagacaatggagcgtttcaggaggcaggggattgcggttctggaaaccggaaaaaagggagccataacacttaaaacaaacggtacatcgctgcgggtccatgcatttctggaggaaaaatctcgtcagaattagctggatgaaatacgcttctgacagccatattataaatatggaagagattgtggaatcttggaaggagcaggggatgaattatcaagaaacagctaacgagattttgtctcacataggcggggcagagaatatcagggagatgacacactgttttaccagacttcggtttgaattaagggatccggaaaaggcagagcgcggtaagatagagcggatagaaggtgtgatagcggttgtggaaagcagcggccagttccaggttgtcatggggacaaaggtaggccggatatatgacctgctgaaggaaatgaccggtacagaaagaaaagcgggtgaaaaaagagaaaaggtttatcatagggacagtaaggacagagagaaaaacacaccgggaagtcatttgggaaacagaatgattcagtcggtttcctccatgtttacgcctatggtacctgccattgctgcatctggccttttgaaaggattcctgaccatagccaggatgctggcatccaatcaaggcatcgacattacaggaaaccatacctacgtaatcctgctggctgccacggatgcgattttctattttatgccaatcatcctggcctataccagcgccagggtgtttggggccaatgaatttgtggccatggctctggggggaaccatgtgttacccttcggttctcagtcttatgacaggggaagaacacatcagcatgctgggagtggcattgaccagggccaattacacatcatcagtcatccctattataataggtgtgtttatcctggcttatgtacagcggtttctggagcgggtgataccggaggttctgaaaattattctggtaccggggctctccctgctggtaatggtgcctgcggtatttatggtgtttgggccggtgggaatttatctgggaaatataattcattttatctacacaggccttatgggaataagtcctgttttgtgcggcggtttcatcggaggcatgtggtgtgtgtttgttatttttggatcccacagagccttggtacctattggaatccaggatgtggcactgaacggccggcaaaacctgcttgcatttgcaggggctgcgaatttttctcagggcggggctgccctgggggttatgatgcggaccagaagcagggagctaaaagcagtggcggcatcggcatcagtggcagcctctgtctgcggcataacagagcctgccatctatgggtgtaacctgcggcttaaacgtcctatgatttacgcggttatatgcggagccgcaggaggggctgtcatgggggcgggaggcgtgtacggggatgcttttgcaaataacggtatccttacactggcaacctatgctgcttttggaatgaaaaaattcctcttttatctggctggtattggtatatcattcttcgggtctgccattttgacaatgctgctgggatttgaggatatggaccaggaaccagaggaaacttcatgggaaaggaattaactgcaggagggaaacaatgcatcagaaaacgacagaatttccggaaggatttttgtggggggcttcatcatccgcatttcagattgaggggggatggaatctgggaggaaaagggatgacagtggcagatttcaattcctttaaacgatcccatatacaggcagatactaaggtggccagtgacttctatcatcactggaaggaggacattgattacatggcagagcttgggctcaaaatgtacaggttctccattgcgtgggccagaatcataccggatggcgatggagctgttcatgaggaggggattaaattctatgacagaatcattgactgcctgctgtcaaggggaatccagccctttgtcaccctgtaccattttgacctgccctacgcgttggcggaaaaatacaatggctgggaatcacgccggtgtgtcctggcctttgaacggtatgccaggatatgcttcagggcttttggcgaccgggttaaatactggcaggtccacaatgaacagaacctgatggtgcgggtggatgagaggatgaatattgatgccgcggataaatgggaggcagaccggctcagggcccagatggattatcatatgtttctggcccatgccctggccgtaaaggcatgccatgagctggtttccggaggaaagataggcccggccgtgtcgtcctgctgtacctatccggaaacaccccgtccggaggatgtgtgggctgcggcgaacaatgattggtttaaggcggaatactgtctggacatgcatcaatatggcagatatccgggatactacaggcggtatcttaaagagcgtaatattatgccgtccgcggaggatggggatgaggagatactcaaatggggcgcttctgattacattgctgtcaactattacaggacactttgtgtcagatatcttccggcagatgagattcatcctgtgggggaacggtgctttccgggcaatgaggtggattttgaccagtatggatacttttcccatgtgaaaaatcctcatctggtttcgactataatggtatcgtaatttaagacacttcaagagacatttcttaatgaatctgatatactgtaaacactaca

SEQ ID NO: 3202 - DNA, 294 bp, Unknown
  gut microbiota DNA sequence
cctcaaattccttaatcccacagctctgtgcattcgcaatccagtcatcaaattccctctgctgctgacgatacgcttccatctggcagatatcataaaaccactctttcatgcggtgtgccagacgcagatcctcgctatagtgaagcattaaatcacaggcctgtttgttctcatccttcagctttttatagcgggtcagaatgagtttccggctgcgtttataatacttacgcagagaaaccggcatggaccgctgcagccgtttgcgtacattttcaatcgcccatgtca

SEQ ID NO: 3203 - DNA, 339 bp, Unknown
  gut microbiota DNA sequence
cgctgcagccgtttgcgtacattttcaatcgcccatgtcatctgccggatgaaatgatatttatccacgatgattgtagcgtttggaaagaaggtctgtgcaagttcggtgtaggggcgccacatatcgcagacgaagaactttaccttaaggcgttctttcctgggaatattccgccaataatcagccagatggctctgggtccgatccgggagaatgtcgaggatccggcgctttttcgaatcaaccagaatgcactgatattttccggtagaagcattgcctttgaattcgtcaatggaaagcgcttgtggaagctggtcaggcggaggatagcaa

SEQ ID NO: 3204 - DNA, 7234 bp, Unknown
  gut microbiota DNA sequence
gcaaatataaaaattatataaaatattgttgacttttatcttaagatttgctatgatgctgttagtgaagtaaatctttggaagttataattaaataattaataaggattgttactgttcggcaggcaaaaccaagtttgttaaggggatgatgtgtacccgtgcgtatgcgcacatgggtctctttaacaaagttggtttttttgttttcatcaggagcaattatgaaaatagctaaaataatcaataataatgtagtgagcacctgcgatgaagagggcagggagatcatcgtcatgggaagaggcgtcggcttcaaagcaaaggaaggcaataccattgacgaggaaaaggtggagaagatattccgcctggagagtcagaacaccatggataagttcaaggaactgctggagaaccttcccatggagcatgtacagatatcggcagaaattatcggttatgccaaagaggttcttaaccggcctattaacccaaatgtgtatatcacccttacggatcatataaactttgcactggagcggtacaaacagaagatgatgttttccaatcccttgatcagggaggtacgcagcttttaccacgcggaatatctcattggcgaatatgccattgccatgattgaaagggacctgggagtaaagctcccggtggacgaggcagcttccattgcccttcacatcgtcaatgcggagtatgatgcacctatgggtgatacaattaagatcaccaatctgatacagcaggtattggaggtggtcagggagtattttagtatagagctggatgagcagtccctcagctatgagaggttcatcactcatctgcgttttctggcccagcgggtatttacaggggagcatatgaatctggataacctggagttccaggaggtcattgaccgtctgtatccggaggaatatgcctgcagccagaaaatacaggcgctcatcaagctgcagtacaggcaccaggtaacagaggaagaagtggcttacctggccctgcacattaaacgtatcaggactaaataattattttggcaggtcccttgggggacgtgaaaggagagcagcaaggatgtttggatcacttaagaagttattcgggggagaagaaaaggaagagaagataatcgcagcgccggtcaatggaacagccattcccatgagccaggtaagcgaccccactttcagccaggagatcctgggaaagggaacagcagtcataccgtcggacggcagggtggttgcgccggcagacggactggtgaccatggtatttgacacaaagcatgccatcagcatgcagacagacaacggcgcggagctgattatccacatcggacttgacacggtacagcttaaggggcagtactttgatgctcatgtggcagcaggggataaggtaaagcagggcgacctccttttagactttgacatagataagattaaggaagctggttatgatgtgactacgccggttattatctgcaacacgcctcagtttccaaagatggaatgtgtgaacggaatggaagtaagggccggagaaacagccatcatcaaattgtaaggaataaaggcggggacgagttgacagagcggagctttatcttaaaagacgaaatggggcttcacgcaaggccggccgccatgcttatggtcaggatgctccatgtaagatccaccgtggaaatcatctgcggggaccgcagggcggacgggaaggatgtcatgagcatcatggccatgaacaccacggcaggagatgaggtcatcttccgcatcgacggacccgatgaggaagatgccatgaaagaagtggaagctgtcctggaaaccggtgcctgacacattggcgggggaccggcgggcaggcgcggaaactgtccaaaaaaatgtaacagtgatttaagcctggaaacaggtttgaatagagtatttatcaaaatgtaattcagagtactcctacgggaaaagtatagaaggaggctctaaaaaagaaaggggatttatgttatgatgaagtatttgcagaaactaggtaaggccatcatgcttcctgttgccgttctgccggttgcagctattatgatgggtattggctatgccatgtgtcctgccaccatgcagggcggtgacgtaaccggtatcatccagattattggttttgcgctggtgaagattggcagtgccgtaatcgacaagctgcccatgctgtttgcagtaggtgtggcaatcggtttatcaaaggaccagcacggtgcggcaggtcttgcaggcttggttgcatttctgactgtcaccacagtacttaacagcggagttgttgccacaatgatgggcgcagaagaagctcctctggccttctccaagattgacaacgcgtttatcggtatcatttccggtattacagcgtccgtttgttacaacaagttcagcagcgcgcagctgccgaccgcacttgctttcttctcaggaaagcgctgtgtgcccatcgttacatccttcgtaatggttgcagagtccgccatcctgtactttgtatggccgatgctgttcaacgcccttgtatgggttggcgagcatatcatgggacttggtcctgtaggcgcaggtctctatgcatttgcaaaccgtctcctgattccgaccggactgcatcacgcactgaacgcagtattctggtttgacattgcaggaattgctgatatcaacaaattctggggcttcgcagaaggcggaatcaagggagttaccggtatgtaccaggcaggattcttcccggtaatgatgttcggccttccggcagctgcatttgcaatgtaccagacagcaaagccagagaagaagcagtatgcggcaggtatcctgattgcaggagcagtagcatccttcgtatcaggcgttaccgagcctctggaattctccttcatgttcctggctcccggactgtaccttgtacacgccgttctgaccggtatttccgtagcagtagcagccgcattccactggaccgcaggcttctgcttcagcgcaggcgtaacggacttcatcttcagctgcaggcttccaatggccaaccagccatttatgctgttagtacagggtgttgtattcgcagttatctactacgtagtattccgcgccgtcatcaccaaattcgaccttccaacaccaggacgtgagaaagaagatttagacgcagaaatgacagccgtattagcaaacgacgatttcaccaaggtagcagccattatattagaaggattaggcggcaaaggaaatgtagtaacattagacaactgcattacaaggctgagattagagataaaagactacacattagtagacgagaaaaagataaaatccgcaggcgtagccggagtcatgaggcccagcaagacatctgtacaggtaatagtaggaaccaaagtacagtttgtagcagacgaaatgcaaaaaatgctatagcaatgagccgggcaaaaagccagacaaaaaaccaggggggaagaatgcattatctcttcccccctggttttttatccggctttttatggggcgaacgccccacagccctgggaacgccgaggcgtttccagggctgccgcccggcggatccgctccctcccatacctaattccgcccccaagcgtccctggcccccggccaggcagcccaccccattccaccccacccctcatccacccccataaaataattatcacccaacccaacccccgtcccctcttgtccccccacccaaaatatgctatcctataactcagagcactatcacctacccatcccacccaccccattccccacccccaaatcccaactatccaaagaaacggagggcgccccccaaatgaagcagattatccgcaagcggctatgcatcgtaatcctgacagccatgctgaccaccctcctcatcaactattacatagaaatccacaatgcccaaaacgaaatgtataccagcgcccgggaaatgttctggcaggtaggccagatactggaccaaaacgaaaaagaggcagaaaaagaacgagaaaacctgaaagagcaatgtttcatccgggccaaagcaatcgcctacatcctgcaggaccgtccccaggtcacgggagaccagcaggagatggaaaagatagcccgcctgctgcaggtagacgagttccacttatttgacacaaaaggcaatctatacgccggatccgagcccaaatactttggccttaactttaactccggccagcaaatgcagtttttcctgccaatgttagagaactatgatctccagatgtgccaggacataacccccaacacagcagagggaaagctgatgcagtatgcggcggtctggcgtgaagacagaaagggcatcatacaggtaggtttagagccgacaacggttttggattccatgaagctgaccgagctgtcctacatattctccctggtcacatcagaaaaggactccaccgtatacgccatagatcctgagagcgaaaccatactgggatccacagatgaaacactggtgggaaaacaaatccaggagataggacttcacccggaccagctgtccgtcaccaaccgggcagtcagggcagtgttaaaccagaaggacagctactgcgtttttggaaagagcaattccgttatactgggcatgtccgctaccagcgcttcactgtaccgggaagtgaacagaagcacccttatggtggcagtatatctcataggactgtccctgctgatgatcacgttcatttccaaagacatagaccgctatattctggaaggaatatcctccatacacaataacctggtaaaaataaccaagggaaatctggacaccagggtagaggtggacagcacgccggaattcagggaactgagcttccaaatcaacaaaatggtagagagtcttttggataccaccaacaagatatcaaaaattctggagatggtcagggttcccataggcgtatatgaatataaccgggatatgaagcgcgtcatggcgaccagccgtctggcaggcatcctcaggcttaaggaccaggaagcagaggagcttctggcagaccattgcttattcgagcaaaagatggatgacctgagaagccgtccggtggagcgggaagagagaatttaccagttggagggctctgatttgcactatatccgactggaatcctttgagcgggagaacagtgttctcggcatgattgcagatgtgacagatgatgttatggagaagaagcagattgagcgtgagcgggacattgacctgttgacaggcatgtacaacagaagggcattttaccgccatatggaacaactgctcagggagccggagcagttagaccatggcatgatgctcatggctgacgcggataacctgaaacaggtcaatgacaagtacggccatgaaaatggggaccgttacctgacagccattgcgggcctgctcaaaggctgcggctggagcaactgcattgcagcccgcctcagcggggacgagtttgcgctgttcctatataaatgcagttcacgaaaccaattgatggaatatgaggccgggcttagaaaaaccatggaaacatgtacggcagagctggataacggagaacgcatacaagtgcgtttttcggacggatacgccttttatcctgaggacggcaccgatacagcctgcctgctaaaacatgcagaccaatccatgtatgaggcaaagcgggcctataaggcagcgtcggtcgggaaaaaagatgagagcagaggcagtaaggagggcaatgtttcatgaaatggattaaaaagcagcgtatcataaccatatgcctaaaagacgtgctggccatggttatcctgtcagcaatgctgggtctggcggcatgccgcgcagatacagggagccatataagtaataccggggcaggcgcggaaaatcatggtatgcaggataataccagcgcaccggagagctttggcagccaggaaggtaaggcggagccggacagctttggaagccaggaaggtaacggggagccggacagttcctctgtcccggatcatgacgctgaccaaccctgggcagatgaaccaaggcgggttctgacgcaagaggagctgcgcggttttgaggaatatctgaaccggatcgacaactacggatttcttatgtcagactacaaaagcccggaatatataaacctgaatgaagtgttttattccggagccggcctggaacagtccccgttaacagaggaagaaagggaaatgtacctgaaaaccgttggacagccggagctttacacagacctggtgaggctgggtacggagcagatgaacgggtttctcacagagaaaaccggactgacgctggaacagatgaaaacagggattgggtggatttacctggctccctatgaccggtattatgcggaacacggcgataccaacataagaagtttcttctgccccggcggcgaggtggatggcgggatatacaggatacggtgtctttccgacggatacagccagtttaatctggaaagcatagtaaccctgaagcaggtgtccaaaggatatcagtttttatccaatgaaatcatatgggattatcatggctcctataaggaggatgcaaaagcccctacggcagaagcactgcattacgttatatcggcttacaaaatggaggttgaggaaggcggcacaggcatataccctgcgggggcagtgcctgatgactatggtagtcctgtatttgattccgatgccagatattattccatggaggaaatggagcagattagctggaggccggaactgacagcggtattccgcaacgagatttatgcccgccatggatatatttttaagagtgatttctggaatgattttttcagcacatttacctggtattcaggggaataccccgcagattcctttgacacaggcgtgttcaatgaatatgagaaggctaatctgaagctggcggttgaaatggaaaaataagacgacagcagagctgctgctgattatttgggaggaaagacatatgcccgggactgatgtccggcgggcatttgtctttcctccctcttgacatatcccggaaattttgttattatacatttagatgttttaataaatatctaaatgtataaatgggaagaagccggatt

SEQ ID NO: 3205 - DNA, 391 bp, Unknown
  gut microbiota DNA sequence
aattcagatcagggctgtcagtttacaagcaatgagtacatgaatttcctcaaagagaaccagatccgtcaaagcatggatggtaaaagccggtgggctgacaatatcatgattgaacgatggttccgaagcttcaagtacgaggaagcatatctgacccaatataacaatatcagagaagcacggaaggcaatcggtaaatatgtgcacacttacaactttgaacgttgtcattctgcactcaataatcaaacaccggcatcctgctattatccgattctgttactggatgatcatgcagcctaaggggggattttctcccctacccagttacatatatcagttcattataaaaagcttagatttttgtcttgacaactgaaccactata

SEQ ID NO: 3206 - DNA, 25985 bp, Unknown
  gut microbiota DNA sequence
gaagtctataaggaacagagcttttccaaggctgctgagaacctttacatatcccagccggccctcagttccatgattaagaagattgagacaaagataggcatgcccctctttgaccggagcaccagccccatccagctgacggaatgcggcaagaaatacatcaagaccgccgagaaaatcatggacctggaaaatgagttcgcctactatgtgggcaatctccaggaactgaaaacaggccgtctgtccgtgggcgggacctatctcttttcatctttcatttttccacccatcattgataagttccgcagggcctaccctcacgtgaagctgaacctgtttgagggacacaccccgctgctggagcaaaagctctttgccggagaactggacattatcatagacaactatctgctggacgcgggcatctacgaaaaggagcgcttcatggaggaacgcctgctgctggctgttccctcctcctttgacagcaaccggagagcggtaaaataccagcttaaggcttccgacataaagcgctgccttcaccagaacgatacctttccggccgtatccctaaagaagttcaaggatgagccctttgtcatgctgcggtcccacaatgataccagggaacgtgtggacgccatacttggccgggcaggaatccagttaaactataccttaaagctgaaccagctcttaaccacctatcacctgacagagtacggcatgggcgcctcatttgtcagcgacaccgtggtcaaatgccttccggaaaacccggatatcatatattataagattgacgaccccgaggcagtaagagatgtttacctgtattataaaaaaaataaatacctgacccggagcatgattgaatttatcaaaatggcaattccgggaattgagaaaaactcggagaagtatgtataatcatatgcttataagtgttataagtgtcattttttcagcaaataaaaatacagaagggggtaagaaaaatggttggatggccagaaatccttaaaaaggaaaacctgacaagggaagaaaaaaaatgtatctgcaaccggctcatgaccacggagagccacatggaacagctgatactgaagcatttcacagaggaggatttccgcagggtctggatgcgcaaaatcggcgggggcgtaattggaggcaaggcctgcggcctgctggttgccaggaagctgattgaactcaacatgccggagtacgcagggcatgtggaaccccataactcctttttcatcggcacggatgttttctaccggtatctggtatataaccgctgtgcggagttaaaggccagacaccgtctggaaaaggaacattttaaggagaccgaggaactgaccaaacggctgcggggcggttccctgcccgaagatatacgtgaagagctgagcgatatgctggaccactacgggaccacccctatcattgtccgttccagcagcatcatggaggacggatacggcaatgcattctccggcaaatacgaatcaatcttctgtatgaaccagggcactaaggaggaacggatggaggaactggaggaagccatccgccgcgtatacgccagcaccatgaacgaacaggccattgaataccgcaggaaacgccacctgctggatgtggatgaacagatggccctgctgattcagcaggtggccgggcagcagtacggcgacctctatatgccggtggctgccggtatgggctgttcctataacccttataaatggatggagcacctgaacccggaagcaggaatgctgcgcatggtcatggggctggggaccagggctgtggagaggacgcccggcgattacccccgtcttatcggccttgacagggcgcaggccaacttaaggaccaccctggctgaacgccacaaattttcccagcgcaaggtggatgtcctggattttggaaccaagtctctctgcaccaagtccctggaaaaaatactggacctttttcccaaatggcagaagaaaatggtgctgagcagggatacggatgccgaggacatgctggccgagcgccatatatacagaaccatctattttggggactgccagggcctggtggacaatctggaattcatacggatgatgcgcaccctcatgaagatgctggagaaagaatatgaacgcccggtggatgtggagtttgctgtcaccagtccggaggaaggcatgtggaggctgaacctgctgcaatgccgtccccttcagaccgccaaatctgagcaggtacatataccggacggcgtggaccacgaatttctctttgacgtgcgcagaacgtccatgcgccggtccaaggaggagcccatcgactacattgtgtgggtggatccccagaaatactatgaatacgaatatgccaagaagccggacgtggcccgtttaatcagccgcatcaaccagcattttgaggatacggataagaagctgatgctgctggtgcccggccgcatcggaacctcgtcccctgaattaggcgtacccgtggtctatgcggaaatcagccagttcagcgccatctgcgaggtggcttacggaaaggcaggctaccacccggatctttcctacggcagccacatgttccaggacatggtggaggcagatgtgtattacggcgccatcaatgacaacagcaagaccaggctgtaccgccctgaactcctcaccagatatcctgaggtgctgaaggatattctgcccggcgaatcccaggaactggctgacattgtaaagatccatgatgtaagccggtccggtgccacactgaccctggatgcccaggagggccgtgcggtgtgccggatacgcggggaacagcagactgccgagcggtaaggggaatacagcgccccatacagcaggcgggaaacatgagacatgatacctgtatcatgtcagactgcagatacatcggtgctcaggacgcaagtccgggcaccgaactactttaacatagcctaatttttaaaaattttatgttgaaaggcagggacaatcaaacattcatttactgccagtattagaaattcttgcttctgcgcttgttcttaatcaattctaaatcaggattcactctatctttctgctgccgatacaaccggaaaaacatactgcacgttcaactttagaaatacggattcagcaaaaaatcccatttaaaaacactccgacgatttctggatatactgacagtttttaaataacctaaaaaaacgcatcaggctcatactaatcatgaagcctgtacaaggccaatcaacagaaaggagtgaatcatatgaatttatgcaattgcgacgccaaagttcctgcatcacaatgcgggtgcagcaaagagcttcccgctcccggaccaggagtacagctggccattgccactgttcccatgcagccctgggaaacaccttatgagccatccaaagccctgaaacagggaactatttttccctgcctggatctgccgttttttatagtaggaggtgaaaaaaatgcctgaccgctgccagctgcttcagcagattaatgagataagttttgttgtcaatgacctgaacctgtatctggatacccacccaacagacggccaggcattagacgcgttcagccaggccatggcccagagaaaacagcttctggattcctttgccaaggaatatgaaccccttaccctgaactgtgtctgccctgaaaccaataacaagtccgaatcccataccaagtatcccggccagaagcattttacctggtcagacggacctctgccatgggactgcccggaacattaaaataaggaggtgtctgaccatgtggacttatgaaaaacggttacaatttcccgtaaaaattacccagacctgtcccaagacagcgtccctgattatcagccagttcggcggtcctgacggcgaattagctgcttccatgcgttatctttcccagcgttacactatgccatgcaaggaagtgggcggactgctgacagatattggcacagaagagcttgcccatctggaaatgatctgcgccattatctatcagctgaccaagaatctgaccccggaacaggccaagacagcaggctttgacgcctattatatcgaccacaccacggctctttggcctacggctgctgcaggtgttccctttaatgcctgcgaattccagtccaaaggcgatgccatcacagaccttcatgaggacctggcggcagaacagaaggccaggaccacgtatgacaacctgatccgcattattgaaaacccggaggtaagagaaccccttaaattcctccgggccagggaagtcgtgcatttccagcgtttcggggaggcgctggaaaagataaagtccaagctggatgaaaagaatttttactacttcaatcctgagtttgataagcagtttgtacagaaccagaaataaaagataaaacacgacgctgcctcgcatgctgaactgtatgcggagcagcggactacatacaccaactttggaggttttacgtgattaactcaactgacactcaaagggattcctggaaaacaaattggggatttatcctgtcctgcatcggttccgccgttggaatgggcaatatatggatgtttcccgccagagtctccaaatacggcggcggaacctttctgcttccctatttcctctttgtcattatgataggcctttccggcgttatcggggaaatggcattcggccgcgccgcccgctccggacctataggcgcctttggccaggccatggccagcaggggaaaaggacggcgtctgggagaagccatcggatatatcccggttctgggctccctgtccctggctatcggatactctgtcatcgtgggctggatcctccgctacagcgcgggttctctgaccggcactacactggctcccggcgatgtggacggctttgcccttgcttttagttccatggccggatccttcggaaataatttctggcagactgttggactggttatcacctttatcatcatggtactgggcatatccggcggtattgaaaaaatcaacaaaataatcatgcccctattcttcctcttgttcctgggactggctgtctacatggcgttccagccctctgccgcggatggataccgctatatcttccgtattgaccttaaaggcctggcagatcccatgacatgggtattcgccctgggacaggcgttcttctcactgtcactggcaggaaacggcaccttaatctacggctcctatctggatgaccgggaggatgtgaccaatgcagcatggaaggtagccctttttgacaccctggcagccctgcttgctgctcttgtcatcatcccggccatggcaactgcgggttccgggctggatgaaggcggacccggactgattttcatttaccttcccaacctttttaaatccatgcccggaagccgtgtcctggttatcgtgttcttcacagccgtactgtttgccgggatctcctccctgattaatctgttcgaggcccccattgccgctttacagcagcagtttaaactcagccgcaggacatctgtctccgtaataacggctgccgccctggccatcggactgtgcatccagggcattgtatccgggtggatggattttgtatccatctatatctgccctcttggagcaggtttggccggtatcatgtttttctgggtatttggatcggactatgcgaaaaaagaagtggaaaaaggccgtctgcgtcccataggaccctggttttctttcatgacatcctatctgttctgcggtttaacggcggcggtctttgttttgggaattgtatttggaggaatcgggtagtataattataccaatgatacatgtgattccctgtcattcgcaaactgacagggagtcttcttttatttacgaaagacgaggtagcttatgaaatcttcatcaactcaagaaaatccactgggtattctgcccgtgaaccagcttttggcccggtttgccatacccagcatcatagccatgctggtcagcgccctgtataacattgtagaccagttttacataggaagaagcgtgggtatgctgggaaatgctgccaccaacgtggcctttccccttaccatcacctgtactgccatctccctgatgtgcggcatcggcggggctgccaattttaatctgtcccttggcagcggcgaaaaagaggaagccacacgctatgcaggcaacgctgtatttatgctggctgccattggaatcctcctatgtctcacggtcaggcttttcctgaaaccgcttatgattgtatttggggccactccggatgttctggactattcactgacctataccggcatcacgtcccttggatttccattccttatcctgaccacaggcggctccaacctgatccgcgcagacggcagtccccgtttttccatgatgtgtactctcacgggcgccgtcctcaataccatactggacccgttgtttatcttcggcttccacatggggatggcgggggccgcactggctaccatcatcgggcagatcatatccggcatcatggtcattgtatacctgacccggtttaagacagtgcgcctgtccctgggctctcttgtgcctgttccatcccatatgaaggccattgccgccctgggtatggcccccttctttaaccagatggccatgatggtggtacagattgtaatgaacaacatccttcgctattacggagcccaatcccactatggaagtgagattcccctggcctgcgcaggcatcataaccaaggtgaacatgatattcttctccctggtcatcggtctgtcccagggattacagcctattgtcagctttaactacggcgccaggaaattcaggcgggtccgagaggcttatctgaaagctgtgctcatcgcaaccatgatttccaccctgtccttcctgtgcttccagctgatacccaggcaaatcatcggcatctttggctcaggcagcgaggaatactttcactttgcggaacaatacttccgcatattcctgttcttcacatttttaaacgggctccagcctatcacggctaattactttacgtccatcggaaaggcggcaaagggtatcttcatctcccttaccaggcagattatcttccttctgcccctgattgtggtccttcccatgttcctcggcattgagggcgtgatgtactctgcaccggttgctgatttaatggctgccctcctggccctggtatttgttaccagggagcttcgcagaatgcggggtatggaagaagagatgaactgcggggcggagatggcggactaatcgcagcctgacggattggcggcctgacggattggcggcctgacgaattggcggcctgacgaattggcagcctgacagattggcggcctgacgcattaagggcggctcagatgtcccttgcagcccggataaagaaatcctcctggccgaaattgccggacttaagaatcagctccatcccttcctgttccgcaggatacataaccggaacccccggagcaatggaccgtccgatatgaaaggtgtgcatttccagcttctgcataacggcgcctgacgtctcccctcctgctgctatgattctttttcttccagattccaaggcataggcggctgttccggccaatagttcctcgttataatgttccagtggcggatatgactccctccactctgcttttatacgatttacctcatcaggcggcgctgaagtgtacaccagcgctgcctgatctttattttcttccaggaatgccctgatgtgttccattgtctggatgccctgcacaaaccggaggggatggatacgcaaagaagcaccgccctttgactcataatacctgatttgtgtcctggtagcctcagaacagcttccagccagtatgacaggagccgcacaacgggacggtgtgagaacactcctctcctcatccggttcccatgtacgggcaatcatcctgagcagaccggatccgcctgacaaaagcggaagattcccgtattgtttagcaatcattctcccgtgcttctcttcataataatccgagatcaggtaataatgccctggtttctcgtaaggcctgaacccccgttccagttcacctgcccccaggttaaagcaggggtagcggctctgcctctccatcaggtactttagcctggaatccctcattgggttcagagggtgatccttcatcggactatcttccagcagtactccattgacatacagcttaccatccttcacgcttcttccattttccagcagagcagggcataaaagcgtgtacggtatgtcccaccgttctagggctgcatccagaaccgggcctatgtttccattttccgtggaatcaaaggtggaacaatatttaaaatacagcatacgtgccccatgggccttcagccaggaaaaggcagccatgctccggtccaccgcctcgccgggaggacaggttctggttttcagtgctatgaccactgcctgggcttccaagatatcctcatcctccctctcaggtatcccgttgctgagtatcacatttgcgcctcctgcctgaagaaaggaggcggcatcgctggcccctgtgaaatcatctgccacacatcctaatatcatactttaacctctcttatcaaccctttaacgccttggcggctgcctccacacctgaatccatgctgctcaggattggttttgtgatatctgccagacatggaatcaatacgctcatgctggcctgtgccaggaccagaacatcatactgtttccccgtatcccgaatcagcgcttccagtatctgattatgcttttcctgattcttctccactgtcagcgcttcaaacgcatcggaagccaaataggaatccaccacaaccttctttttctctgcttctgcaatatggcttatgagcctcgcacttggctccagcgtggttttcaccgtgccgtatacagctattttttcacccttttccactgcactgcgggccattggttcatcaattttaaggtaaggaatctttaaaaggggtcttatgacatccactccctcccccaccgaggaacaggcgttaagaatcagctctgctccccagtcctgtgcctcaagagcatatgttaaaagccgcctggtaacctcctttgtcagcattccttcctttttcacatcatttaaaagactatcatccacaatgttcatcacctcggcgtccggtaccagcgccttaagcctgctgttgatgccgtcgcaggtaacaactgtggtatggattaccgcaacctttctttccatatgcccctcctgattctataaaactacatttcttcttaccagcgactttttctttgccatttccatataatcctcaggcagtttccttacctggcgccctgcccccaggattgccagatacatttcacaggccctctccacattgtcgctggatatcatggcatcttccatggtaagacctgtgccgatggcgccatggctggccatgagcaggcctgcgtttgtcccaatggtattccttacatgcgctgccagctcaccggatcctggaggtgcaaacggggccaccagtatctccccgcccagatacaccacgccctcaatgtcaatgaccggcaccttctcaacaccgtccatggcgctgacagccgtggcaaatttggagtgtgtgtgcacgatgcagttaacctccggtctttccttataaatacccagatgcatggaaaattcaatggaaggcttatagggtcccgacaccacatttccatccatatcccccacagccaggtcctccggcttcatcgtgagatacggtctggctgacggggtaatgacaaacaatggttctccctccaccctggcgctgatattgccggctgtacccaatgcataccccttgtccaccatggtcctgcatccccacatgacctgctcttttgctttttgtattgctctttgtattgtttcctgtgacatatgattttctcccctctttggttcctattattttaatggctgttaattcaaatatattttcgtatcagcctggcaatctcatgtgcgtcctgcgccctccgcatggcgcttatattaccctcgtcctccagcaaatcgaacagctggtagagtgcgggcaagtgtctggtcttatccggtgtggccagcacaacgatgatatcagcatccatatatccgttaaaggacagtttttcaggaagcttaagaaacgacattcccatgctgtaaacaccgtcatccacacctgcatgggcgataatcacgccgtctgcaatcatgatgaaccgtttatccgtttccaccatatcaatggctttttcaatataattcctgttaataaaaccattgtccagcagcggtgcggatgccatacggattgcattctgccagtcgggcatttcccgggtaatctgaatcctctcgtccggcagcaggaagggcagacggctctgaagctttacctctccctccgaaacccgtatgttatccaataccttttccctgaatgatttcttggcaatatcattggcaaaaggaaacaccacaaactgttttttatctgtctccagccttacggtggagaacactatctgaaaatccttatcatattcataaaaatcccttaaggacaggcactctaaaaattcaatctcaggcagaagctctgacagagacacaaagagatactgcgatacggtgagtccattggtacacaccaccacggccctctctttttcctggacctgaatcagttttccctccttatgaagccatgatgcaaagagaaccgtaatatacacaagctcagggtccggaaaagtacatgtgagatacacttcatagggccttacggcctttctcacgatttcatgaagatactggtattttggcagtatcatgtccgtgatatccggttccacatgatatccataccagatccggtacacggcaggcttcatgtgctgataaaggatttccaaaaattccgcccttccgtccagccgtacacagctgatggactcaaaacgttccagcatgtgcatgcccgcgtccctgagcagctccagattccctatatcttcatagaccctgttatggacctttgaaatttgtatctgaactgcaaaatttacgatctcattttcatcctttatcctgtacttatctgcaaaggcagccaccacggaatattctttggtggtggttaccaggcggtaccggtccatggcttccacggtcttttcatttttaatccgaatcagtgtaaaataaaaaatatacagaagctccttcagacgttcatctgtaaattgaagctgaagcttattttctatctcctcgatatttgccctgagctcctttaccccttcctccctgattccgtatatacggttcaggttctcctcaccgcccggcatgttcagaagctttctgagggcatgtgtcaaaagctctcttttgtgatattcacttccgtaaaggcggtacccttccttcctgttatatgccagctccaaactgaatctgtttacccgttcctgtaccttcttgaagtcactgagcagcgtgtttttactgatttgaagctcctctgtaaaatgataggtggaaagctcatcctcgtggcagagcagccgtagctcaatccaatatgcccgctcctcgtccgaataggtataggaggacttggtgattgctgcttctttggcggaataatgctcagccaccggaccgggcaccataaagtacccggtcttcagccgcttaatctccggatggccgttatccctaagatagtcattgattttgtcaaagctatagctgagctgctttctcgtaagatggaacttttcctccagccccttgcctgtagctgatgaattatctacaatctcctgaaaaatcatataacttctgctatccagatacacgatatcacctcgtcaattcgattgcttactgtcccgccttggcattcccagcctccagagccgcgtcttccctggcctcacgcattaaatcacggtaatataaaataaaccctgccagccagactgcaaatataatcaaaggcatgaaattaccttttaaaaacataaacagatgggaaatagaatacgtaaatacaggaccattaatcaggctgttgctgatcagctctcccgcctgaaggtcaatactgcctgttgcgatggctaactctgtcatgaatggagcaaaggcagtccccacccacaggaacaccggagcgccgatgacgcagaggatagacatttgaagcaggtttcctcttgtcaccagaaacgccggcaatgccagggatgcgctcataagacctgcaaagggaaggatttcattgcccggcagcaccatggaataaatcagcataaacggtatgctccaaaggatagccagccatatctcattacagccgccaaggataggccagtccagacctacaatcagagtctttccttcaaactttttattcatgaaagcgctgaccgcctcagaaatgggagacaaggcctgcatgaaatatttggccaccaccgggaacagcgtcatggcagctgcagccttgattcctgtggtaagaatctgggccagggaatactttgcgagaattccaaacaggcagcccaatataaatcccatcacatggttttccgcaaaaataccaaccttgtcttttaacatatccgtgtcaaattccctgttaagtcccggaatttttcttaaaacaagggcaatcgggtataaaatagctccaaagaataacgtagcatgggtcacggacacacccggaattcctgtaagcttttcaattcggtgctgatgtgcgtccgaagatttaagttccagtataatctgaaccgccgcaatcacaaaggccagaatcacactatgagtaatggataccacggcaactgccgtaaatatcttaagccatacattccataaatctgcgttgatggtatttgtcttgttgagaagtatcatcactacattgactgctatcaaaagcggaaacatgagaaatgcatagggccatgcccatgatatggtagccatggtgctccatccgccgtcaacaatgggcagcgagattcccgtagaggtcatgatggcctgggcggccggggttatgctgtccttcataaaggatatgagaagattcatgcccgtaaatgccacaccaagtgtgatgccggatgaaatcgcgtcctttatcttcatccccaccattatactgccgacaatcattataatcggtacaaatatgggagcccctaatcccaaaaagaaattaacaacatttgttaatacctgcatactttcccctccttctccctatcagcttttgttgaccgcatcaatgagctttttcagttcatcttcctgcctgacccctgtcaggaacgcgattccgttgataacaggtaccggatattcctttaccgtctttgtgatggttatataagccacacagtcttttatatccctgtccagggacttgatattaaccgcgtccaccaccgcgtccacctttctctctttaagcagacggtttaccttactggcaacagcctgtgacgtggcaactccatttgcacatgcaactataattctcttcatatgttcaccctataccttccattgataataccagattaaaatatgcttctatattagcagcctgcctcagcctttccataaaatcaggtctctggcaattgtttaccagtatctgaagcagttccacatgggcatcccccaccgcctcctgcttaaaaccaagcagaaatacaaaccgcaccatatggactacctcgttggcagccatctccctccatggaatcggttccttcaggcggatacaggcaataaatgcattcttaatgcattccgggtctgtatggggtatagccactgcatatggctctatgggaagggccgtgggatattccttctctctttcctttatgctttcaagaaaatcccctgtcacatatcccaattccataagccgcccggacattacttcaaataattcgtctgtgtttctcacatccaaatccagctgaatcaggtccttgtatacaatatctcccgtcatgatttggtactcctcattaattaatattaaagttacacgcgcgctcatgtatcttctccatacctgcattataaaggccggacatgtgtatttcaattcaaatagggcccatattttgtgcaatatgatgctcattcctgtgatgcgcaattattttatacataattgtgccttattttccctgtttcacccggataccatgtcactatttacaacaacatggtttgccaaatcacagggcagaatacaccttcttattgttccacaaaaaaatcctgatgacaggtacttctcaaaccgtcatcaggattctccctttcttctgttttctgcggctgtccaatcttctctcccagcctcacacccagccatcaatcacatcaattgaaaacttaaaatggtcttccggcataccctgctccttcagccgccgtctgattgtcttcatataatggtttgatatggccctgcatatttcctccgtatttccggtgcggcacacgtccaccagttccttgtggatggggtactggcgttctatcatggcccggctgtcagggttgcccgcataataattgatggcatttccatagtttaagtccgtccatcccttaatcagccgcggtaagccggtggaacgtatgatggcctcatgaagcatgttatcacaggcaatggatttgttataatccgtttcctttaagtccttcatggattccaatgcagcatccatctcggcaaaggcagtctctgaaaacactcccctgcacagctttactgccaaaatctcataggtggccctcagcagataaatctcgtaaatgtcctccagggtgatatttttcaccgaacaccccacatttctcacatattccaccaggccttcctgttccagctgtcttaaagcctcccggatcggcccgcggctcaccccaagttcgtccgaaatatcctgttcaataattctcattcccggcgccagctcgtggttgaatattttcatacgaatgacgtccaccacattttcacgcagtgtctgatacgttaattttcccataaaagcaattccttttcataatcccacaacaattccagtgtattctgtcacaaaataatagtatcataagaaaatcccacggtaaacatattgtctgaaaaaatggcaaaactccggcaccttggatcacaagcgccggagtttgtctgaggctttcgcctttcatcatgtttacaggccgcatatacccttgatgacataggatacaaagatgcccacatagtttccgcaggctccggctattacacccatgattaagccgacgttaatcagggatttccagtctgcgcccgccgcggtcagggatgaggttggcccgtctacaatacatcccaccatggacaggattacatactcatacttaatcttaaatatgcggcagataataaggtgcagtacgatacatccaatcagcataaacagtacatacagtgtcatcattagcgcggaaccgataaactgctgtaaatccacagcaaatccaatggttgcaaggaaggtcagggaaataaacagacccaggtcaagatttccgcgcagcttctggacaggctttaactgtgccaggccaatggataccgtggtaagaatcagcagccttcccgctttccagaaggtatccggaaaaatggactgtgcaatcacagtacatacaaaggaaacaccgaaaccaatggtcaaaagccatgcaatatcccggatagaccatctcttatcggacatcagaggctcgtcctctccgtcgtccagctcctcttttgtaaactggtaaggccacagcttgttccagcgtttggacgcctttaagatagccggagccgcgaacagaaataccattaagggggtggacaccacgtagtcagctgcattggcggccgcaagggtttcccttgaacagtccagaccggttgcgatagctgtcaggttaggtgttccgcctgtgtaggtgcctacaaacatgccggcgcacttccagccctcagtaattcttggggcaaagaataatcccagtatgatggcaataaaacatacggaaaaaatagcagataccaaagcaataaccggctccctgttcagcttcttcagctcacgcatattcatgctgagcaggcagatagatatggcgggcgtcacgcagtatgtagacaacgcactgtaaaaatcatgtgaaatcggcaccacatgggtgttagaaagaataattcccaataccactactgtcaaaaccggccccagtgacttaaatgctttgaatctctgtaaccaaagcgcaaatgctaccatgattaaaatcacgaatatcaggccttcggtacgtgtaataagtgcttccatctttttttcctcttcacctttcatatattgatgattgtaaattgtggattgtggattgtcaacaatccgtattagcattatattaacacaagttttaaaaatattcaatatacaaaagtaaaaactatgttttttatgcattatttccagtttctgttgattttcaagataaaccagacctgtcctgtctcttttccatacccacattccaaaaaaagtaaaaaaatcccgcagacaagccaatatggcctgcctgcgggatccaatccgcacattatatattccgtctgcgcgatacagtgcagactacacgatgccctgtcccagcatagcctcaaccaccttctcaaatccggcgatattagcaccagccacatagttgcccgcaacctggtaacgctctgctgcctctgatacctttgcaaaaatatttaccatgatggtgtgaagcttatcgtccacttcctcaaaggaccatgacattcttaaggcgttctggctctgctccagaccggaagttgccacgccgcctgcattggcagccttacccggcataaagagaatcttcttctccacaaacaaatctgtggcttccctggtggacggcatattagcgccctctgccactgcaaagcatccgttggcgagaagtgtctgggcatcttccagattcagctcattctgggttgcgcagggaagagcgatatcacatgggatgctccagattcctcttccctctgtatacactgcggttgggacctcatctacatactccttgatacgtcctctgcgtacttccttgatttccttcacaatatccagctgaatgccgtccttgtcatagatataaccgttggaatcgcttaaagccactacctttgctcccagctgctgtgccttctcagttgcgtagatggccacattgccggaaccggatacaacgatggttttgcctgccatatccttgccgttgtgctttaacatctcatccagaatgtataccaggccatatccggttgcctgtgtcctggccagggaaccgccaaaggtaagtcccttgcctgtaagtacgccctcatacaatcctgtgattctcttatactgtccaaagaggtatcccacttccctgccgcctacaccgatatctccggccgggatatccgtatccttgccaatgtggcggtacagctctgtcatgaagctctggcagaaagccatgacctcgcggtctgatttgcctttgggatcgaagttggaaccgcccttgcctccgcccatgggaaggcctgtcagggagtttttaagtgtctgctcaaaaccgagaaacttgaggatgctctggtttacagatggatggaaacgcaggccgcccttatatggtcctatggcgctgttgaactggatcctgtatcccttgttcacctggacagctccattgtcatctacccacggtaccctgaaagatacaattctttccggctccgtgaaacgttcaagaataccttccctgcggtatttttcctcattggcatcaatgaccagctttaaggaatccagtacttccttgacagcctgatgaaactccggctcacccgggttctgtgctactactctctcataaatctcatcaacgtatgacatttcaatcgacctcctggatttttgtttgtgaagtgtggggatgctgtgccggcagtgggtccggcacacactttaggaaaagtataacaagttaatatgttaaagtcaagaagtatgtaaaccgattttcaaaatcactgcagccggattttccgcggttttaccggatgtttcatcatttaccacctgaaatcggtccggaactccacttcacccctttggccgctccagacagaacagcttcttattctctgaaccgcactgcgtcaccttaaaattaagcaggtttccttcctcggtccagaactccatggcatccagaatccgcgtcaccgtggaccggttcataagctgttccttttccatggcaaagggtccgaactccctgttgacaaactctgttatctccgtaacggaaagaggtctttcctttgtggcatgattctccaggatattaacaatcaataatggaaacatggtctgatgcatgtgaatcttcctcgctttccgcatcaaaaaagggcctgcctggggccctttgtaccatgttcgctaaaagttcataaaacgtatttatgaatcgtttcgtcttatcccgggctttggcagttcctgttttcagttacaccaatccgtccgctgccatagcatgaataactgccggcaccggacttcccataactatataaccttacctttataaacactgcttctgccataatgctctccttccgattatgagtatacactttttcttccaaatttgtcaacgcagatgggaggattcggacctccggaccggttactgccggcctgctccttagcggggagccgcattcgaccactctgccacatctgctgattgtgcgcccataccttatcccggtatgggcgcgcccggaacctgtctgttaacagtcctgatgcgccgggttggattcgagccaacaatgttcaccacctgggtcacggttttacagaccgcttgcttcagccatttgcataccggcgcttatggagggaggccggggaggcctccgttctcttatgtcagtactatagcatatggacctgggcagatttgcattatttttaaattaacccggcattctcattcctgtacaccattatccctgtataccgttaatcctgcaccccggccagctctgccagctgctccagcacgcctttaccgccgttaagggatatattgcccaccttgtcgcagatcttctccagatactccatttccttcagcttgaacagggtgcggttttcatccataagcctggcagtgttcaaaaggcttctggtggaagccacttcctcccgccgcatgatgacattggcctgggcctttttttctgccatcagcacggtattcatgatttcccttatctctcccggaaggataatgtccttgatacctgccccggttatctccacgcagtattcctcctgatactcctttagcttatccagcacaaaccttccgatttcctccttctgttccaggagctcatccagcctgtaccgccccacatactcccgcagtttcagctggacataggtatagagctgggaagccaccccctctacggtctgaaccagcttctccggattggtaatccggtaattgcagattatatttaaccgcacagccaccttatctgcggtaaggatttcctggccggagatgtcaagctgctggatcttcatgttgaaaactttgcaggtaacctcccttccgtaattccagaagtaataggttcctgtgtccagtttcttttcatagcggttgtcaaaatacaaaagacctgtctctccgtcctttataactattttcttatagtacttggatggcatcagatccatatacatccggggaagggtatcctccatataaggctgtgttatgtcgatgagccggaattcatttttctcaaatacattccagtacaatgtctcaggctttgtgattacttccctgtatgccttattcacaaaccggagagctatgcactcatccggcagcactgccttcactaccctggaggcaaacttttcatccttcatgaggatttcctccggtattccgcatgttttgacttcccctgtcataggcactgtctgtacctcatatcccaacatgttcaggtaagaatacctgcctgctgtcagcagttccacgaaccggccatccttcatcaggtagccgcattcctgctctttgattatatatttctttatcatcatatctgaatccctcattattatgaatctgtaaaatttgtttgatggaaaaggcggatgcccggctccatcctcctgctgcgggcttctgcttaagcacatcctggaagggctgggcgttacggccctacccggatccgatccgtaatgcgctgacacgcattccgtacaggctccatccgaacgggaaacactttatcatccggcctatccggattgaccgtatttctggcccggcccattttgtgcggtatccgcagccgcgctgggccgcagaagaactgcctttccctgttttaaacaggttcggcaggagcgaaggcatcccttctccttcctggagacatttggttatgtcatcatttttaatgattgctatacccacttagctacgtgttatcatacacggcgggagtcgaacccgcgacacatcatcctaaaaggctgcagattgccggcatacccttgaaccacaggccgggcaccggggagtcccaggaagtaaactccgcctcttaaggcaaactgccgatatttatgtaggacaggcctcccgtccctctgacgggcgcctgcttgtttttccccggccccggcatactgccgcggccttctatcctttcaccacgcctattgtcttaaggcgcttcacaggcaccaccagatcctgctggttatccatgacctcctcgatattcttataggcaaaccggctctcctccgccacatcggcctttccctttttacccagaatcacaccctgtttctgtaaatccagaatgacttcctcacaggaaaatgccgccatggcaccttttcttgaatactgccgcccggctccatgggatgaagagcagaagctctcctggtttccctttcccataaccacatagctgtaagaacccatggcccccggaataacggctaattctccgttctgagcgctgacagcgcccttcctgtggacccacacatccttcccatagtggttttcaaaggaagcgtaattgtggtggcagtttatgtcgtgggaaaactccagtgaaagttcggtatactttccaatccatttttccagaatggccttcacggctaacatcatcttttccctgttctctttggcaaaatccatggaaagctgcatccagttaaggtattgtttgccctctctggtatccaccggcaggaaggccagcctgtattcatcgggcacagcgctgaaccatttctggtttagctgtcttgccttatagtggaagtaatcgcagacagactttccgaagtgacggcttcccgagtgaatcattacagccagataaccgtcgtcatcctcctggagctcaatgaaatgattcccgcctcccagcgtaccaatttggtaatatcccgcctccagctgtcctaagagctccccatcctcctcataccggtccatttcctccaaagcaccgtccatggtatagctgggcatcatggtcttatggtgtgcaaatcccaccggcacgttgcgcatgatatcacctatgacagcctggaggagggagccgttgcccgtgataacctccctgatatcagccaccttaatgttggtctcggtataagccataccacagccgatgtccacacccactgcattgggaatcaccacgccgtctgctgcaataacacctccaatgggcattcccattccggcgtgtgtatccggcatcagactgacccacttatgaaggaaaggcagctgtgaaagatgatatgcctgttccagacagcttccttccaaatcctctcgttccttcagccatacccttacaggaaccttcatcttttctttttcatacatcacaaacatatatctcacatcctttcttcttcactctgtacgccgtcaatggatgattgggatgaatcccgccctgccggcgccgtggtaatctgtcttaccgttcatatatttgcgtatgtatcttaactacatgcttataatactcaattttaacatggttatcatttaaaaaaagttgcgaacttccattatttactataatatctatactaacgtttaaattgaacgtatgctgtaagaacaggtgtgtcagcttgacaaaatagaacattacattaaaatgatagataaaacagtcggaaatccacggacaggaggggacatatatggctgaattccaggaactaatcaagaattttgaccgcatccgggactatatgcgccagttttacgtatatgggttcaaggtaagaaatgatttcagcgaaaagagcgccagaacctacgacaatgagcgccggcgtattgagagctggctctcccggtatacaaagtccgattacacctccaagggaaagcatgtctacatcaatgtggacagcaagaccattccccagaatcccctgtacgctgcctggaagtccaaaagctttacagacaacgacctgatgctccatttcttcatcctggaccttttatgggactgtccggagggcatgtcatccaacgcagtgaccgaccttatatcccacaactacggggtggttttcgacacccagaccgtgcgactgaagctgaaggaatacgaaaccctcggtatactggtatcccataaggacggcaagaccctgtcctacgcgcttgctcctctcatgcccatggaaacagcaccgcagtgtgtaaattccggttacatggaaccggatgggactgaggaaggggaacagaacctgtggcagtgcctcatgacagccgtgaaatacttccaggaagccgccccctttggctgcataggcagcaccatcctggaccgtcaggatgaatgcaatgacctgttccagttcaagcaccattttatcgtacatacactggaggacggcatactggccgacatactgaccgctgtccgtgagaaacgcatgattcggtttgagaacaaaagcagccgcagcggacaggtttccaccctgtcaggagtgcccctgaagatatttgtcagcacccagaccgggcgcaggtatctgtgcctgtatctgccggagcgccgccgcttcagcaactcccgcctggactccattacccgggtgacccttctggagccatgtgcattttatgaggaagtactccgtgatttggaaaagaataaggagaaatgctggggcgtgtcctttggaagcggtacaagccgtatggaggaggtctgcatcaagctctatatagacgaggaaaaggaaccctacatcctgaaccgtctttaccgtgaaggaaggggcggggaaattatgaagatacgtgagaaccagtttctctacacaggtacatttttcgataccaatgaaatgctgtcctgggtcaaaacctttacaggccgtatcatggacatacagggcacaaatattttttctatagccaaggtaacccgggattgggagaagatgtatgagatgtactgcgggaatgaggagtaggatgccatggaattatttcacaaaatatacagctgttattacaatgtggtccgccacatactggatgaagcaggtcacagccccataaccaggcaggatatggaggatatatgccgcgcttacggtttccaggaaagcgccctgtccatcatccccaaactgacggacagcacatgggcccttctggaagaacaggacaaacatacctttacgtcccgtctgggccatgctgttcctgcgctccctctcacgaacctccagaaagcatggctgaaatccctgatacaggacccccgtttccaactgtttttcacagacaggcagttagaacttctggccggggaatgggacggtctgccctccctttaccatgaggacgacttttactactatgaccgctacagggacggggattcctatgattccccctcctacaggaagcattttcaggctatacttaaagcaattcgggaggaacgcgttcttctggttgcctatgagggaaaacacggccgtgtccactcctttgagaccgcgccttaccagcttcagtattcctccaaggatgacaaattccggctctgctgtctccagctccaccggaatacgttcagccgcagcaccatacttaatctggcacgcataaaggactgccacgtaacctcaaagtcatgcccaccagaccttgaatcccgctgttttgaacccatccaaaaggcctcggaaccagtggttcttaaaatcagcggggaacgcaactccctggaacggtgcatgctgcattttgccaactatgaaaagcatacggaatatgacgcggaaatgaaatgctggatctgttccatccactatgatttggcagatgagacagaacttctcatagatattctgtcctttggccctgtggtccgggtacttggcccttcgtcctttgtacggcagatccgcaaacgggtaaaaaggcagcatgagctgttttacagcgagattacatagggtacgccgggtgactgcagaaaccacagcagcgcttcctgccccagctccccctgccccagcacctcctgccccagcgccccctgcccagcacaggacaggactgcgctccgcacaaaaatacgctccgcataaaaacaggaaaaaaacaggataaatgaaaaagatgctgtatggctgtccggatatactataatacatccggacagccagccatacagcatctttatttatctatagttccttattttcctctaatctgagaatcagattcttaacaagctcttccttactcttaaattccgtcctgacgccagtaatataccggaaagcctcctcccattcgctcatggaataggatgacatgcttaccgtgcgcacggcatatataatatcctctatataaaacggactgtggaggtccgaaaggtactgacagccggagagatcctgcaatctggccaacagccccccctgggatttatctggcatcatataaaactcctattcttctttctgcatgtatatttccaatttctcctgtgcaatctatacattgcaattatatatgacatttgtcgtaaaatcaaggaaatgcaacctatttcttgcatattccggaggaagccatggatcaaaaattaaagcaggatttaaggatagggccaaacatccgaaaataccgcatgcagtcacatctcacccaggatcaggtcactgcaaagatgcagctgatggggattaatatttcacgcagcatatattcccagatagaaagcggcacatataatatacgaatctccgagctggcagccatgaaggaaatatttaacatcaattatgaatctttttttgatggtatcatgctgaaccacagggataaacaataacggttctatactgaatgttggggtgtgctgaaaagcacacttccaacattcttttcgttgtaataaaatacat

SEQ ID NO: 3207 - DNA, 6398 bp, Unknown
  gut microbiota DNA sequence
gggggggggggtgaaaacctccctgtttagcatgcaggagaggtgtgattttggcagacaaaggaggaacaaaaggctgggttgacatacatgcccatatattgccgggtgtagatgacggggcctctgattgggaggaaaccggggaaatgctttgcaaggcgcataaacagggaattacccatatcatagccacgccccattatgtatcaggacaggacacaaaaagactgagggaaatgatgaaaagactgaaagagacggcattttccatatcggaaaatatgatggtaagtctgggacaggaagtacagtactttgaggaactgccgtccttcctggaacagggaaaggtgctgactcttgccggcagcaggtatgtgctggtggagttcctgccgggagacggatatatgcggctgttcagggcggtccgccggctggttcagtcatcctacctgccagtcatcgcccatgcggagcggtatgactgccttaaggagaagggcaggacaaaagaactggccaggtgcggcgcatatctgcagatgaatgccgggagccttggaggaggactttttgacagacgggcagcctggtgcagaaaggagatattgaggggaaacattcattttatagctacggatatgcatggggtagtgatacgtccgcctgagctggaggaggctgtcaggtggatgacgaggcaggataggaacggacaggacgccgggggaatggccaagcggcttctccggcaaaaccaggagcatatactgagggactctgttttgtaaattgtctgcctggaaatataaataaaggaaatgtgagaacgatggaaaagcggtacagagaagatgacatggagatagacctcctggaattgttgtttgaatttaagaaaagggcatgggtaatcattctggctgcagtgttgggatgcctgggtgcgggagcttacagccgactgatattgactcctgtttatacatctacagccatggtatatgtcctttccaaagagactaccctgacgtcgctggcagatttacagataggaagccagctgaccaaggattacagcgtcatgattaccagcaggccggtgttggagcaggtcataaaaaatcaggggctgaatatgacatacggacagttaaaagccaggatacgcatatcgaatccagcggataccagaatactgaacatgactgtatcagatacagatccggtgagggccaaggccattgcagacgaggtggccaatgcttcctctgattacataggggatatcatggaaatggtaccgcccaaaatcattgaacaaggagtggtgccggcagccccggcatctcccagcattaagaaaaacgcggccctgggcgggttggcatgtattgcagctgcctgcggcgtcataacccttaaggtgattatgaacgacacaatccgctctgaggaggatgtgggaaaatacctgggcatgagcgttctggcatctgtcccggatgacgatggtatggccaaagaacagcagcggaaccggagcaagagaaagctggaacgtaaaaaacgcaagacagagaaaaacagaaggggggaataggagtggacgaaatcttacatctgaaaaataccggcagaaaggattatttttacgaggaagccatcaagaccctgcgcaccaatatccagttttgcggaagcggccttaagacaatcatgtttaccagctccatgcctgacgagggaaaaagcgagacggcgtttgccctggcatcctcctttggaaacataggcaagaaggtactgctggtggatgcggacatccgcaagtccgtcatggtcaaacggtatgaaatcaaggggaatcccaacggcctgtcccaatatctcagcggacagaaaagcctggaggagatatgctatgaaacagacatggagaacctggatatggttttatccggtcccttttcccccaatccggctgaactgctggaggatgaactgtttaagacaatgattgagagcgtgaaggaaatctatgactacatcatcatagatacgcctccaatggcgaatgtcatagacggagccatcattgccagccaatgcgacggggcggtcattgtcattgaaagcggggcaatcagctaccgtctggtccagaaagtgagaagccagctggaaaaaagcggttgccgcattctgggagccgtgctgaaccgggtgggcggcggatatgaacacagctactatgagaaatattacggcaggcgcggcggcaagtattatggaaaatatggcaggcactacggcaggtatgaggagggaaaagcgccgcctgtcaatgaagtaagcggggcgcggataaagaatgacacaacagcgcaatcacaggatacatagcggtcatagaaccaataccggtcgtatcacccatgaggaccgtaaaagcggcaggtcttatacccgcaggagacggatgcggacggcagtggccctggttttcattctgaccgcactgttcctttatagaaccggtcagttgtatctggaaagaaaggcattgtcccgtgaagcgcagcagtggcaccgcgtgcaggcagggaacaccccggcagaaccggacgggggagtggaatatcaggggaagagctaccggcgcaatacatatataaaggccatcctgtgcatgggcatagacaggccgggaagtctggaggagaccaggacggcagggtttggcggacaggcggacggcatattcctggtggcccaggatacggccagggaccggataaaggtgcttgtaattcccagggataccatgacggaaatcacattgacggatttaagcgggaacgaactgggcagctcaatccagcatcttacattggcatatgcatatggcgatggaagggaaaagagctgcaggtacatgactgaggcggtgagccgtctgctgggggggatgtccatagacggatacatggcagtgagcatgtccgtcctgcctttggccaatgataaggtgggaggcgtcaccgttaccatagaagagccgggactgaaacaggcagatcctgtttttgtccagggacagaccgttaccctgcggggagaacaggcagaaaaatatgtgcgctacagggatacgggcagggctcaaagcgccctggtacgaatggaacgccagaaaacatatatcaagggattcctggatgcagccaggaacaagtcaaggctggacgacagccttattccggacctgatgaaagaaatagaaccgtacatggtaacggacatgacaaaagaccggtatctggatatggcccttgattttttaggagggaaccaggattttacagatgcagatatggtgaccctgccgggaacagctgtggagaccgttatttacgacgaatatcatccgaatcaggaggaaatcatggaaatcgtgctggattggttctacaggccccgtgaatgaggacaggagttaaaaggggcaggagatggaataacgaaaaactggtcatgaagcaatttcctttagatggaaaagaaaggtggaaattatgaaaaaaagaaaagcaatcataactctggcaatggcccttaccgtgtctcaggccacatgtatactcgcagccaacagcccggggacaggcccggtcattgtgggaggcggaagcgacggaagcagccatgacatcggggaaaaggtggatcaaataaagggtggagcatcggcaggttccacggttaccagttccggacagggaaacaatgcagtgggaatagcggtgggacagaccgcaggggaacatgcggtggagaccaacagcagaggtcaggcagtgataggtgatactgccctggaatttgtacagggcgccaacgcagcagtggcaggtctgcctgagcctgtggtcaacacaatcaacagcataaacagcgggaagcccttaagcgaagcagtgcccggactggacctggcaggttataacgccctggttggaacccatgcaattatgacaaaggatgcagccaccaacacagagaagacagggcaggtggaggttcctctctatgtgccaaacctgctggacggcctgggtgacgtggaagttctgttttacaacaacatgacaggaacatggcagctcatcaaacccaccagggtggatgcagggtccaagatgctgtggtttaatgcgccgggttccggtacgctgtcggttgtatataaaaagtaggggacggatgaacgtccggttaagatacagcgaaagcgctgataacagggaagagtgtgaatgtgaaaaacgcagaaaccgtaaaaaacagggatagaatcatattggataaataccttccccgcagtaagcgggtgaggatgtgcctgctctgggcctatgacatggcggccgtatggatctgcgcctgcctggctctggggcttaggtttgatttggattttaacagcataccagcatcgtatgtacatgccttatggaaatacgggctgctgcagatggcggtggtcacccttttattttatggcggccgcctgtacgccatcatgtggggatctgccggaacccgggagatgctggaggtggttctgatctgcatcattgccgctctggcccagcccgcaggtatattgatatccgggcagcggatgcccagaagctattatcttctgtggtttatcctgatgacaggggcagccatatgcggccgtatcagctttcaggtacttcagaggactgtgaacagaatgaaccgcgcctgggaaaaagacaccacgcctcaggtaatggtggtaggcgcaggccaggcagggaccctcattatccgggaaatgaaggccagccagaaaatccatggattcccggcgtgtatcgtggatgacgacagggacaagcagggacggttcatcgacggcgtggtggtagccggtacaagggacgacatacccgagcttgtgaggaaaaagggtattgacgccatatatgtggcgctgccctcagcgccggtggatgatattaaagacattctgggcatatgccagaaaacaggatgtcaggttaagtatctgcccggtgtctatcagctgatgaatggcgaggtaaatatatccaggcttaaagaggtggagatagaggacctgttgggaagggaacccgtacaggtcaatctgaacgaaatcatgggctgtgtaagggataaggtggtccttgtcacgggagggggaggttccataggaagcgagctgtgcaggcagctggcaggccatggggtcaggcagctcatcatatttgacatgtatgaaaacaatgcctatgaaatccagcaggagttaaaacgtaatgttccggatctgaatctggtggtgctaatcggatccgtccgcaacaccaaccgcttagattacctgtttcgcacatacaggccggatattgtataccacgcagcggcccacaagcatgtgcccctgatggaggacagccccaacgaagccatcaagaacaatgtgctgggcacctataagaccgccagggcagccatgcagtacggcaccgggcgtttcatcctgatatccacggataaggcggtgaatcccgccaacatcatgggggccagcaagcgcctctgcgagatggtcatacagatgtgcaaccaaaagagcggcactgagtttgtggcggtccgctttggaaatgtgctgggcagcaatggaagcgtgattcccctgtttaagaaacagatagaaaacggggggcctgtaaccgtgacccacagggatatcatacggtatttcatgaccataccagaggcggtaagcctggtgctgcaggccggcgcctatgccatgggaggggaaatatttgtgctgaacatgggaaaaccggtgcgaatcctggacatggccgagaatctgatccggctgtccggttatgaaccctacagggatatcgacatccaatttacagggctgaggccgggagaaaagctttacgaggagcttctcatggatgaagagggacttcagaggaccggaaatgaaaggatatttattgggaagcccattgaaatggattaccatcggtttgataggggactggggaagctggatgaagccgcatggctggaaaaggataatatacgggagctggttcatgagctggtgccggagtaccattatagggcagaagaggatgcgtgtggggcaatgacagaccaggacgaggtttttgcacaggctgccgccggaatggagcccgggtacggagaaggaaccgggccggagtccgcatatgatacaaaggccggagcgggatctccggtaaagagcaggatggcgcttcataatgcaatggcag

SEQ ID NO: 3208 - DNA, 4785 bp, Unknown
  gut microbiota DNA sequence
ttctttccaaacaactaaaaaagccgccacatgatatgacggctatcccaaaaacatactatcacaaatcccgaatcatcttcatcaaccgtatcccatccttcaccccttcctcatacagatacagctgacacatcccatttccatccagcatgtcatcgatacaatcctctatggcatccctctgctccttggtaatttccttcatccaatggtccattcgttcgttcagcttgtggtctgctttcttttcttcctgtgtcttatctgcctgccatcgggttaccagcgtttctaccctggctgctatgacttcttcacactgttccctcgtagttttcttcatggacactcctccttccgccaacaccatatcgaatatcccggcggaagtccatatccacatgtcataaagattctgctccaaatacgtcagaaccacctacagggtgcacctaaaattgtgccaatttacttgtatttgcgtagtctccagccaaaaccgaccacctgccaggtgaccaaggctcgaaacaggtgcaccttcgtggaagcggaaaaacgcccgcattgcgggcgattgtggccgggaggggcgcccttgggtgcacctccctttaacctgcacacaaatcgaacggggcatacggtttgatttatggttgagaatgtgaaatatcgatatcggttttctttatacaaaagtagaatttttttatattgggccaaatttgccggattttttattgtatgcccatctatcccattgctctccttaaaagccagcacagtggcttacgatgcgttacaagggctaattcaagttgctttagctaagttgattttttacttttccctaatctctaaaacacccttatatcaagcccacaacaaaaagtaatttattgcggttctatactgaatgttggggtgtgttaaaaagtacacggtaaatcactagtaccgtgctagttacctggttccatgagataataactccagaaaactacaagtttttaaggagttagtgccatggataaaattacactcaggtccgtgaagagcactgggccagaatcttaaatgaatgtatgaacagcgggatgtcgaaaaccgcctggtgtcgggcaaacgggatttctgtgaagcagtttttttactggcagcgcatcctgcgcagggaagcctatgaagcatctcagaatccaccattacctgcagttgcagagacagaaccgttgtctgctgttcagagaacggtatctttcgccgaaatcaaactccctgctgtgccaccagactcgtcacccgttttccatccggatctggtgatccggaaagggaaccttgttctggaaatctcaaattcagcctcatcagaattgatctcccgggtaggagggattcttcatgctgaataacgcatccggcttccggaaggtttacattgctgccggttatacagatctgcggcgcgggatcgatgggttggcatccattgtgaaattcaacttccagctggagccctatgaaaaggatatcctcttcctgttttgcggaagacgcagtgaccgcatcaaggggctcatatgggaaggagacagattccttctcctttacaaaaggctggagcttggcagtttcagctggccccgtacaaaagaagaagcactggagatcacactggaacaataccaggcactgatgcagggcttggagatcgtgtccagacatccaatccaggaagtgcagcccagtgatcttctgtaaaaagttgtgcaaaacggagaaaataaaaaatctttttgtatctactactgcagacacggcggaagttatccacggccgggtctcatcccattcattcaatcaagagtacttcacagctataagctgctgtgtggataagtactctgaaaaaccgaaaaaactattagtttttccggtttttcagagtgtttatcctttggtaagaatgacgaaccttcttttttatcccgttcgctttttcttttggtttgcggtacaatagttccagtaaaacaaaggagcgccgaacatgcagaagatctacttaccggaagaactaaacagtttcagcagggaaacactcgtggcagtgctcctgtccatgcaggaccagcttacccaactgaatacaaacatggaacgtctgattgagcagatcgcgtctgcaaacaatcatcgttatgggcgctcttgcgaaaagctggacgttatcgccggacagttggagctggagatcatctttaatgaagcggaagccttaaccgaaacgctttatgttgtcgaacctgctgaagaagatgtgattcaggtcacgcgccggaagaaaaaaggaaaacgcgaggcgaatctcaaggagcttcctgtggaagtgatctctcatacccttccggaagaaaagctgcaggagatttttggctccgttggctggaagcagctcccagatgaagtctataaaagagtccgggttcagccggcagtctatacggtcgaagaacataccgtttccatgtgttgcaggccgatgagactctggtcagggtatcgaaggatgggcgcccggcaaacagcaagagttacatgtgggtttaccggacgggaaagggatatggggatacacccattatcctgtatgaataccagaagacccggaaagcagaccatccgcgggaattcctgaaaggattcacaggcaccgttgtctgtggcggatactccgcctaccggaagctggaccgggaaagtgagaccatcgttttcgcagggtgctgaacccatgcgagaaggtattttgccgatgccctgaaggcattgccgaaacaagatcatcaggcagccaaagatacggtcgcttacaaggcgaccaagcggattggcgccatataccatctggacacccaactcgctgatgaaaccggatgaccggaaaaagcaacggcaaatcaatctcaaacctctggtggaggctttctttgcgtgggcaaaagaaatccagacttccggtcgcctgaccaagggtaaaactctggaagggagcaactactgcatcaatcaggaagaggcattaaaagtattcctggatgatggcgaagtcccgcttgataataacgcaactgaagggtcactgcgtagcttctgcctgcacaaacatgcatggaagctgatcgacagtatcgatggtgcacaatccagcgcgatcatctacagtatcacggaaacagcaaaggcgaataatctaaatcccttccgctatctggaatatatcctgaccgtgatgaaggagcatcaggaggatacggattatcgttttatggaagaactgcttccctggtctgagcagctgccggaaatctgtaagagcaaaacaaaaacaacaaatgtgtaaactgaccgccggaaacggcggtcataaaatgagctggtactcatggtctaccatatacggtttttttgccgggtaccggctatgaatcgcttacacccccttcctgtccatatgctagggtttttttttgggggggggggagcctctgataatagccagatactaaaccgtccaaaaggaagcaatactgggaccagctctgcactgggagcaagtttgtgttgagatgaccgcactgtgagtaaggcgttaaaaagcatatgccgttatgtgtaaaatataggcaaaatatccgccgaaagaaattgtgtattaccgattattttggtagacagccctcatacatgatgctatacttaccatatacctgtccacaattgcggatgtgcattgaccatttttttgtagcctctaaggtagagctttcaatagcgatatatcgcttgggaacccactactctgacggttcagcttgtggtaagtggcatctggctctctattgcgttggtggtatggatgaccttcttgattgctgtggaaaacttgaagatcgaggaaatagcatcccagttttgcatccagttttgcatccagattttcattgaattgagatattttttacacttttttagtcacccatattggcgtttcctctcattattttatgcccatgtcaatagcatgtcatatttcatgataatgtaactatagtatgctgttatggagttttcaacttggtgagtctattctattatctcaaatcatatagaaggaaatccatacattatatgaagcatttactattgtttagcttcacctttgcacgattattccaaaatcattttattcttattctggtataatagtgttcattgtctgtatgatgaatatatgcattattatgtagttgaacttttagcgaggctatattatctaatcttgtagacatataaacttcatcatcaggaattattttctttgcttcatcaattgctaatgctaagccactagaagcaaaccccattcttctaaaattacggtgaatttgatatccaatatgaccagaaccattccttaggctatcatttaaaaaatgtctcaatctaaataaccctactatagttttttcatcccataaaaaataatttgtttcaggtacataaccacttggaaggtctattccatttgaatagttaattagtttaggaagtgaaacttccataaactcctctttagaaatattatgaagattgtttataaatccattttcattcaagggtaaatcctttaaatacaaatactctagttcgctatcgtaggtattgagtttttttaggtataacatattattttctccatgattactataaata

SEQ ID NO: 3209 - DNA, 8348 bp, Unknown
  gut microbiota DNA sequence
ggagacggatttacaaactgtgtcattcctaccatcggtaccttgatgggaggtcttggttttgcaggtatttcttatggaaaatacttaaagaaggcaatgcctcttattcttgttcagattacactggcattctttacactcatgtttttacagagcataggctggaccggactttaagtattgaagatacaaaggcagcaagaaggagaatcacatgacaatacatgaattagtagcttcactagaacctgaaattaatgcagtccgccagcaaatccacgaaaatcccgagctgggccttaaagaatataatacaagcgctctcatagaaaaagaactgcgtgaaaaaactcatgttgacagaatcgagcacatcggcgaaaccggacttctggtggaaataaagggaacgaaaccgggcaccgctcactgcatcgcacttcgcggagacatggacgccctccccataaaagaagacgagagccacgaactacggagcaggacagacggcataatgcatgcctgcggacatgatgtacacacatccatcctgttgggagcagtgagagttctggagcattacaggaatcagattgccggatccattctgttcttttttcagccgtcagaggaaacgctgcagggcggaaaactgtttgctgaaagccccaaaatagacttccataccattgacggtgtggctgccctgcatgtaacacctgacttatgtgccggaaaaatcggggtacgctatggcgcaattcttggaagttcagacgaactcaccattaccgtaaaaggaaagggcggtcatggggcccatcctgacacagttatcgaccccatcctgttagctgcccagatcgtacaggcactgcagatgctggtttcccgtgaacttgcggcagacgaatccggtgttgtctccctctgctccatccagggcggaaatgcatttaacatcatacctgattccgttgtattaaagggtaccatccgtgccctggacccaaaagtccgggagcatatactaaaaagaatcccggaaatatgcaagggtatagccgctgccggacgcggtgatgcagaggtgaacatcaaactggggcctcctccgctggtcagcgacagccaatgggtcgatcgggtaaaacgctgcggtagcaaacttctaggtcatgagaatgtaatcgaactggctcatccaagtatgggcgccgaggattttgcatttgtaatggagaaggcacctggggttttcgttaggtttggttcgcgaagcgaaggcggtccttatggcgggctccacagcccccacttttactgtgaccggaaagctctcaccacaggtatcctgacacttgctggtattgctttggatttctttgatgtggattttgaataataaaaaaggagataagcaatggtccaattacacggctcatgggtagcaatgcctaccccatttacagaggatgacagaattgattttaagggctttgaaaccctgattgaccgtcaaataaagtatggaacttcacaaatttttattcttggttcagcaggagaggtaaccctgcttacattggaagagaaaaaagccattgtacatgaagtgattaagattgtaaacggaagaattcctgtatttttcagcgcagcgtccatgaccacgcaggcaagcgtagattttgccaggtattgtgaacaggagggggctgacggggtcatttttacggttccgccctatgttttgattaaccagacagccgcttttattcatatggatacctgcatgagctccgtaagcataccctgcggtatctataacaatccttccagactcggcgttcagattatgccggaaacaattaaaaagctgtccgacgcacatccgaattttgtagtggataaggaagcccttccaaatgtggagcagctggttcaggtacagcgcctctgccagggcaaagttaagattatgtgctgcgatttcccgaaatattcgattgtacttccaaccctggctgtaggcggaaccggaacagccaatatcggcggtaacattattccggaggaagcggcattgtattcccgcccctggacggatatgaacatcattgaggaatgcagagagaattattttaaatggtttcctcttcttcaggcgctgtacacgttctctaatccggttgtgattaaagcggctttaaatattctcggccttccgggaggacatctgagaaaaccttaccaggattatgccggaaccaaattaaaggatcttgaaaatttgatgggtgaaatgggtgtcattgacaaatatggagtaaagaattaaaaaccggaggttcaacatggcagagaaactaattgttataggagggaccgctgccggcctgagcgcggcatccagagcccgcaaagaaaaacctgacatggagattcaagtctttgaaaaatccggatttgtcagctatggagcctgcggtcttccctattttgtaggaggactcattcatgatatcaatgacttggtggcaatcaatgcggaatcgttaaaaaacatgcggaatatatccgcctggatacaccatgaggtgcttctcattgacccggaaaaaaaggaggtctctgtaaaaaatctggatacagaccaggtcagcatacattcttatgataaactggtgattgccacaggcgcagtaccagtggtgcctcctattcccggaattcactcggatggggtatattatctgaggaacatggaagatggcatccgcctgaaagctgccgcaagagaacatgggcgggtctgcatcatcggcggcggagctatcggacttgaggccgccgaggagctaagaaacgccgggctttcagtatccgtttatgagcagtttccaaggctccttccatttttagacaacgccttttcccaggccctggaggatacgcttataaagcacggcataaacgtacacacaggcacacagatagccgaaatcctttctgaaaacggaaaagccagcggaatccgaaccgcttttggagagatcgaaccatccgatataatccttgtatcagctggggtaaaaccggccggtgcactggcagagcaagccggacttgcgctggggctaaagggcggaattatcgtagatgacgagatgcgtacaagtcacaaggatatctgggcctgcggagactgcgtgcagatgaagaacaggattacaggaaaaccagcttacgtccccctgggcacaaccgccaacaagcaggggcgcattgcaggcggtaacgtggcaggcggacatgatacatttaagggaatattgggttccatggtcacaaaagtgtttgagctctttatcgccgcgaccggcctgtctaaggagcaggcagccggagagggctatgatgccatatcggtcagcattacgaaggcagaccgcgcttcctactatcctgggggccgcgataatcacatctgcctgatcgttgataaaaaaacaggccgccttctgggcgcccagggcatcggaagcgaaagtatcgccggaagaattaatgtgttggcaactgcaattacttgcggtatgacagtggaagagataaatgagttagacttggtttacgctcctcctgcagcccctgtttatgatcccatcctcatcgcagcaaaccaggcaatgaaaaaaatcacagaataaatagtaatggttcaggacggcactccttatccggttttttggttcagggagatatgccgtcctgcacggttataataagaaaattattttttgcgttcacgcaggctctggaagaagtccgacatcagcttggaacactcctgctcaagcaccccctcggtcacctccgcctgatgattaaagcccggcacatggagcatgtccagcacagaccccgcacagccggccttggggttcatgcagcccactgcaatccggggtatgcgcgcctgcacaatcgcccctgcgcacatggggcatggctccagcgttacatacatggtgcagtcctccaaacgccagtctcctatttttttgcatgcctttttaatggaaataatttcggcatgggacagcacacttttatccgcattacgccggttatatcccctggcaataatcttatccccgcggacaatcacgcatccgatgggcacgtctccgatggcggccgccttttgggcctgtcgaagcgcctccctcataaatccctcatccttctgtctctgcctcaatcgctgctcttctgccgcaagagctgcaagtcgctgcttctccattctcttttcataatttctgcgccgtgtttcctgcccctttaaacgggctgcttctgtttcctgttcctttaaacgggctgcttctatttctgctgcttctctgttgcggttttcccggtttggcattaggggttcctggcttgtttctacggttttctgatttaattctattcttttctgatttgacgccatattttcctgttttaatgccatatttttctctcctatatcagatggcccttttgccatgaattgattcctctttttttaaagctttatgtatgttatacttttttattatatagaataaaccaaaatttgaaaagggacaggttaagaggccatgaaaatatgcggactgcaaaagactacgctgctggactttccgggcagagtggccgcaactatatttacaggaggatgtaatttccggtgtccattctgccataacagcgggcttctgggttcagacgcagaagaatatgaatgccaggaggatattctggcattcctggaaaaacgcaaacgggtactggaaggtgtttgtatcaccggaggagaacccaccctgcagccggacctggaggagttcatacggaaggtgcggagcctgggactggcagtgaagctggataccaatggttacatgcctggaatattaaaagatttgtgcaccaaagggcttttggattgtgtggcaatggacattaaagccgggcggaatcactatgaagaagcagccggagtttccggcctttccatggaacggatagatgagagcatcgaatttctgctgtcaggcagcatcccctatgaattccggacaaccgttgtccgcggtattcacacctctgatgatttcagacagattggaccgtggattaaggggtgtccggattactacctgcagtgcttcacggagtccggggaagtacttgttcccggactctattcagacttttcaaaagatgaaatgatggcattcgctgatttggtgcgcccctatgtggggcaggtttccctgaggggaattgattactagagcgtgctttgtcctgaggatgcagggagggtcatacctccggcggattccttatggcagacagctggaatgaattttcaaacgcgtcctaagcaaataaacggattcccgcaaagtttagtacaatgttagatctaatgtatccttgattttcaccccttccggcgcggtctgactgcaccggtaggggtgacttttttaatcctggttttccagccgcacatctgtataccaatatccaaagcggccgtcctgtgacggctgttttcttgccagcacgaaatgcgggaagccgaacatggatgccatgtatttttcattgctgtaataattgccgggaaccccaagtatgtaccgggtgcgcccctttgtttcatcgccgatgcgggctaatatcagataacggtaattgtagtatccgtgcatcagaaagctgttattgccataattccagttctcccttggaagcagtccgatatcctggggtttaattgtcagaatctcacacccatttgcactgtcaaaggcctgtatcttgggataccgcttacggaagccctcccacagcctgcccgggaagtcagattgctgttcttcctgctccagccgttctaaatcctgaggatttcccagtatcagagtttcttcgcctgcatcaaccacaggcactctttcctccgcctgcccagctgcttcgctgttatcacctgcctcaggtccggccggccgcatctgtctgccctggttttgtatctggcttccgggacgctggttgggtaacggctgacggtttgacatcggctgctggtttggcattggctgctggtttggcattggccgctggtttggcattggccgatggtttggcattggctgctggtttggcattggctgctggtttggcattggctgctggtttgatgtcggccgcgggtttgacatcggctgctgacccggcattggccgctggtttggcattggctgctgacccggcattggccgctggtttgacatcggctgctggtttgatgtcggccgctgacccggcatcggctgctggtttggcatcggctgctgatttaacatcggctgctggtttgatatcggctgctggtttggcattggctgttggtttgatatcggctgctggttttgtatcgcctgctgacccggcactggctgccgatttgtaactggatgttggcccagcgaactctgccccggcgtttgttgacgtgacggcatagtctggttgcttggcatcagctggcggagcatccttgactgttgattcgacattggctgctgatacggttcttgctgctgacctggaattggctgctgtcctggcattggctgctgtcctggcattggctgctgtcctggcattggctgctgtcctggcattggctgctgattcaacggacactggtccatcatctgttcctggtccgattgacccccggaagaacccgtacgcactgtcccagcaggcatatgcctgcggggcattccaggcctggtcataatgtttggtctgggaaccgtcctgttttccggcatattatctggctgcaggggaatacgggtatcaggaaccataccttcctgtctgggaggtcccatgttcaacggatcatgagcggtttgaagctcacggggcacgctttcattttcctcataaagctgttttctgatagatgtaacattcttttcatcccagccgtgcttagaattcggctgttcaccaaaatcccctttgccgctccaggctctatggtctgtttcctgctctctgcccatgtttggcgtaatcataccatccatctgttccatatctctttttggtgtgattcctgccaggccgctattttgaaaacctgccttatgttcttcagccgcttttcccaattctgccgttatctctgactctgccgtattctctgactggctctctaattgggaatccgggatacctcctgattcctgcgcttcctctatttcatttgacatttcatccggcatcccatctgtcagggattccggctccaactccatactgtctttatcatccggcaacagctctggttccagcgccaaatcgtccctgtcatcctgattctcctgcttttgggacatttcgaccgtatctgcctctattgactccggtaaaatctcttccgctccgactactttttccgcagcctgatccaatgcctctgtcatctgattggcctcattctccgtctgatatacttcttctgacgtttgggccaatacctctgtctcctgcacaacctccgcaccctccggtgtctccgcgttcttcatagccccacgaccagcactcatctgacgcgcctctgccggagaactgctgagcacagggccgtctccgccttctgctgccttttcaccggaccgcagctcctgattcagttcttccacttttctatgtatctgcgcttctgcatctcctactttactggaggtcacatccgccagctccacttccgctgcatgggccaccgcatcctcccagatggtcgtatatgcccgccatgtatccccctgttcatgaatcgtcaggccatagcactggtccatgctgcagcccgaatcagcggcattttccacatttaccacggcgcggaactcaccgcctccgctgcggataaatatactgcccagaaaaatttcttttcccggggccagcagataaacccccaggtcgctgcttccaacgtaaaccttttttacatttacgctgagcttgcattgcccattccgggattccagcttggcaaacccaatattctttccttttacctcgccttcataggcgtagatataagatatcaatctccgataattggtcatactttcactcctcgcacccataatctgcagctgccctgaacacggcctatctgcttttataaatattttatgcatttaccccttgaaagtatgttaggaaaatgttatcct

SEQ ID NO: 3210 - DNA, 22314 bp, Unknown
  gut microbiota DNA sequence
aggcataggatgcagatgatatataatcgtatttcgcacataccaagagcatatcacgatttggtaatgttatagttgctggtgtacgaatatacataagacttactttattatctaattcctctaaattgctattttgaataaaggagctgtccttgaaacagcagaaagagaggaaaaattatgaagagagccatgcttagccagccgatggctggaaaaacagatgatgaaatcaaagaaacgagagaaaaggccattaagacattagaaaataaaggatatgaaattgtgaacactctttttacggacgagtggtacagcaaagaaaaaatggccgaaagaggagttgtacagattcccctatgcttcttggcgaaatcgcttgaaaatatgagcctttgtcatgcggcctatttctgcaaaggatgggaaaatgcaagaggctgccggattgaacatgaggcagctaaggcatatggacttgatattatctacgaggattaggctgattgctatttaaaaataataagaaagggggaaatccccatgaataagaatgtgatagttttaaaagatgctacagaaataactattgttaacgatgctgacatttacaacatgcagattattgttgacaatctgtcagaacttgggacattatgggacaagctcacacccgataatctgtcaacagtggcaatcaaagattccgatggggttgtggtaggaaactacaacaatatggtcctgtgcagtccggctttccaggcggttgataagaccgaaactggaaaaattcaagcaacatttggaatccgtggtaaaacggaattggaactgttaaaggagcaggtagcagccatgagtgaaactttaagtgtacatgatggcgcgattggagatatgggagccgtcataagtgccgtagcggagactacagaaggagggacagtataatgggacgttactatggtctgaaaatcaggaataacgaaatgacactggagaaagtccccaggctttggaaaacaatgactgaaaaatggctggaacagaatccagcggattaatggaggaatcttgtgccaacggaagtcatagttgcattaattgggctgctgggaagtgctgcgggcacgtttaccggaatcatggtgtcagccaaattaacggcatatcgcttaagcgaactggaaaaaaaggtagaaaagcataacacagtcattgaacggacttacaaactcgaagaagcgcaggctgttatgcaggaacaaatcaaggtggccaatcatagaattggagacttagaaaaagaaagagaggaatgatgatgaagagcatagactggacaagaaaactgacaagccggaaattttgggcggccgtagttggttttgtaagtccgattatggtggcagcaggggcgggagacaatgaaatcacccaggtgaccgctatcatcatggggggagccacactgatagcatacataataggagaagggttgacggatgcggcagccgcaggaaaggaaccggagacagaggagcgggtggcgaccaaatagccggaggtggtccgaaatctaatatgtaacaagtcaacaggaggggaggcagagggcttccccttttatgcataaggaggaaattatgattgataatgcatacgcaagaggacagaaactgttatgtggcgattatagccagtatacacctactggaaagtcttatttcaccaaaaaaggcagatggttttctgtacctagaaggggagatatcgtctatttctattatacatctctgggccgtgttgggcatgtgggtgctgccgcggtagtcgaaaccgattaccagaaccggacatttgagtttgtcacgtttgagggaaacacatcatcgggaaacgcaggggaccgtaatggaggatgcgtcgcccggcatacctataaagcatcctttgatgcagtgggaggaacacaaaaaatcaatggattcgggcgccccatgtacaatatggatacctgtacggtggatgaatttatcaacgtactggagggagaactgggatacatcgaaaaggaaagcaataaaaacctggatagtaagactggaaatccaggagataaaaactatacaaagtacggaaagtggtatggttatacgcctgcgtactggtgtcagcagtttatatcatggtgcgcatacgaagcctgccgccagcacatgaagaaaacacagaccgggtgggagaaacagccagacggaagctggaaatacttgcggtatggcgcatacatcaaggatgaatgggagcttatcaacaccgtggctggggctcaatggtttgtatttgatggtgccgggacaatgataacgggatggttcgggtcagatgaacagggctggtactacatgaacccggatgacggggccatgctggcggcccaatggtttgaagtcaagggaaaacattattatgcaacaaagacaggggaaatagcaaagaatgtgtatgtgaaatcaacggctccaggagtgtattgctgggtaaacgattcaggagaatgggtaaaagagtgggataccaccatgccggacctgcaaacatatggcctggcagaatagggggaagaaatgacagtaggggaattaatagaaacaatcatccgactgagaggacgccaatacggtgaggatatcatgatgggatggctcaatgagatagagggccaggtgattgaagagatagtgaaccgggcagagggatacaatgtgacatttaaaccgttgtcttatgacctggacgcggaaaaggagctgaccataccaacgcgcttccaagacgtgtatatccattacatgctttctaaaattgattatcacaatcaggaaacagaacggtataacaatgatgtggttatgtacaacagcgcatatgatgcgtatgcggcatggttccggcgtgagaaccgaccaaagcgcggagcatcattttcaagattttaggaggttctatgggacgattgccattcctgactatggccccaaaagaaaacagccgtcagataggtaactttctggggctgaatacggggacggtcataaacgaaaatgaatttgccgacatgcagaacatgtcctccgatgattttccagccatctctacacggaagcccaggggaaaaatcatcaagaacctgacaacgcctcacggcctgttttataaaaacggcttggtgtatgtggacggtacagagctgtattacaaggataaaaagattgcagatgtgacaagcacggataaacagatagtgggattgggcgcgttcctggttatttttccggataagataatgtataacacctcgaccgaggaactgaccaacctggagacaaaatggtctcaaacctcgtcagctacatttgctcagacaacaactgggtcaaccatggtcaaaatcagttgcacaggtatagggaaatcattccatcaatttgatggagtagagataacgggatgcacaaatgatgcattcaataaaaccacggtcatacaggaaaaggcggacgattacctcgtaattattggtaacctatccgaatcatttagccaaccatccggcctcaccatcagccggaaggttcccgatatggattatatctgtgagaatggaaaccggatctggggctgttcaagtaaaaaccatgaaatatacgcaagtaagttgggagatccggcaaactggaatgcgttcgaagggataagcacggattcctacgcggcgaccgtgggcagtgatggagatttcaccggctgtctgtcccatcttggatacgtgctgttttttaaggaggacgctatacacaccatcatgggtgataagccaagtaattttcagattacaactgtcagcccggccagaggcattgcaaaaggctgtgaaagcacggcttgtgtggtggatgagacattaatatacgcggcccgtaactgcatatgtagctatgacggtgccaatccatccagcatatcagatgccataggggactacagagtatcccagggcgtggccgggcagtatgatggaaagtattacgcctccttggaacggaatggaaaatgggccatgtatgtgtttgacctggaaaaaaacttgtggcacaaggaggacggcttgcatgtacggtttatgtcgtatggagaaggtgaactgtactatatcgacatagacggaaatctttcaaccgtggccggaaaccgggaagagaaaataacgtggtacctcgaaagtggggacatgctggatggaagcgtagaattcaagtatttaaaacgaatcctgttcaacatgaaattggaaccagggacagaggtggatattctactgcaatatgatgaacagaaggattgggagaaagtatacacctatacggctgcttcatatcgtacctatgtcctcaacgtgattccacaccggtgccagaaataccggtatcgcctggagggcagaggggcggctacgttgattgctataggtaaatatgtaggttatgggagtgagaggcgtggcagtttttaaaccactggtgttggaccaggatgaaacagatatgagccaggtcatgagtaaactgtatcgcttcagtcgggatttaaaatatacgttgtcgaatctgaccctggaggacaatatggataattcattcctgaaggtcctggatagtcgaaagaataaaactagagaaataagcttcagcaaagacgccttgaccattgatttgctggactatgaaaccgggatgcatacaagcctggaacaaacccgtgaaaagatatcgctcctggtagattccggggacgtggtaaataccatgctgtcacggatggagctgtacggggagtatatcacccttaagacaggacaggtcatcatacaagctcaaaacatgaccctggataaagcgggaaatgcgtatttttcaggggatatcataggtggctcaatcaacatagatgggaaatttatcgtgtatccagatggaagctgttatgtagacggggcattcacaacagaaacattaaaccctccaaatggaatatatgcttatgaattggacgtatacaatgatgatgaccggataaatacggtcacgggaaacatagcgtgcgccgatgcctatatatcggaaacccttacatgcagaagagtacaccagacatcagacagacggtgtaagaaatggattgaacctatatctgaccaggaagcgacagaagcattaaaggcaatcgtgccaacgcgatacacgtttattgatagcggccgggctggtattggctgtattgcccagaatctatattgtaaaacagaggcaggacgccttccaatggttgtacgacatggaaaacacctggccctcccatacagcagctatggagccatctatacccgagcaatccagaaaaaccaagagaggataggagcaataaaacaagaaatcaaagaaagaaaggagcggatccgtgtcaagctttaacgtgccggcagtgggcggtcaaaatcctgatattaagaaggtatatagctatgttcagttgctgaaccgccaattgaaatataccctgggaaaccttacgccagaggacaacttcacgcaggaaacgcttttaaagtatcaggagacggatacaaccattgcacagcttgaggttactatggatggatttctgacccaattcaaggacctgaaaaatgacttggaaaccggaatccgagtgctgaatggtgagatttctatgaaggtaagcgcaggagaactgtgttcagagatatctgccactacggacactatcacattcaagagcggttatcttatcatagacagtaacaattttaagttatacaaggatggaaccgctcagttttctggaaccattaacggcggttccatcaacatcaataacaatttcattgtaagcaaaagtggcgccgttactaccaaggcaattacctattccgggcagataagcgttaatgggctgttgtactccaactatatgcgcattgcgggaaatgccaatgtggaaggttcccttacatgccgatatctaaatgcgacctatgatgtatcctgcgaggttctgacagaacggtcggaccggcgcttaaaagaaaatatagaggagatacccgaccagacagctcttgcgcttgtcctgggattcagaccagtcacatttacctataaggattcgggaaagagaggaatgggacagattgcccaggatttagacgaactccagaaaagactgggtacagacctgcccttggtggaccacggaggggaatatctatcaattccatacagcacaaatagtgttttgtatgccggggccatccgggcccaacagagagaattggatgaactggaaaaggaaataaaccgaatgaaggaggaaaatatatggtaaagattgcatttgaagaagaaaaaatcaatatggctctgatgctgttaaatcaactgcgggtggaaggcatacagcaggcgaactttcttttatccataaacaatatattgaccaacggagaaaaagtagaagaggaagaaaaagtagaaaaggaagaaaaagtagaaaaggaaggaggaaaataatatggcagtagcaagcattgtcgattatttgaaaagcaaaggacaggatagctcctataacaatcgaaaaaatctcgcaagccagtatggaattaccaactatgccggaacagccgcccagaacacaaacctgttgagggcattgcaaagcggaagtaaaggaagtgcagccagtccacaggcaaccaatcaggcaacaacaggaagcaatgtaaccataacgccagtaaacaatgcaagtgccgaaaacaaaaacagccagtacttgactggataccagtaccagaagtatacgccatcggacagagtaaacagctatgcagataagctggccgacctggaggacgataaaccgggggcctatgtgagcaagtacgacagtcagatagacagcattgtaaacagcatactgaaccggcagcaattcgaccccaacagcgtgtatgatacggatttatataaaaattacagggaacagtatatgcagcagggaaacaaggctatgcgtgacacgatcggtaacatatccggaatgacgggcggatatggatcgacctatgccacagcagccggccagcaggcatatgataactacatgagccagctgggagacaagaccatggatatctatgatagggtgtatcagcaataccttaacgaaggtcaggaactgtataaccagcttggaatggtcaataaccaggacagcattgactatagcaggtatagggatacggtcaacgattactacaacgaccttaattattatgccggccggtatgatagtacatatgcgcaggactttggagagtatcagtacaaccaggatgcccagcgctgggcagaggaatacgcatacaagaaaacacaggatgcattggcgcagcagaactggcagacacagtttgattaccagaaacagcaggatgcacttcaatatgcgctccaacagcagcagcttgcactgtcggcttccaaagccaggagcggaggcaggggagggtcacgcagcggaggaactaaaaagagttcaagtgcccagaaacaagcacaaactatacagaaacagtctaatttgggcggaagggcatactacatctatagcaccagacagaagttggaaaataatgcaagcgatgcagacgtaatgcaggaattgtatgacagaggagtgccggatgatgaaataaagaaaattatgaaggcggcgggtggagattacgaggcaggattgcaacaagcaatagatgattccaaagaagccagaaatggaaaaatgggagggtttaagtcagacttgttcaggggagttgcaaataatatgtttggcagataaaaggagaaaattatgtcaacaaggaaaaactatgataggtacaatatgactatatcatccttaaaggaagatggagaagaagagaaggtcagcgcagcggcaaggatttttgagagaagaagacaggcaattaatcaggagggagatgtttcggaagatactggaatgtcaccggtagagatatttcgaagaagacgggaacgtctgggggctgctacgcagaagataccaaaacagatggacggagagcgtagcgacaaagagcatatgcagcattcaacaagcacgatgcagagcaaaacgccgatattgtcctcttatttgtctggaaaccacgaaagcagaggaacatcctatgcagctatcatgcaggacgaaataaatagggatgcaattgaggaaagaacacgggaagcgactgccagaagaaaaaaggatgcacaggagagggaagcagcaaaaagaatactgaataaaataggatatcaggatggatatcagtttaagcgatacattgacctgcctaatgaaccagactttgcccaaaccgttgaaaaagccaaagcgaatgacccttcatggatggagcgcgcccaattttggaagaaaacatccaatccagtagaagatgcatacaggcaaatggaaaagatgtggggaaaagacggggcaacccaggaggacattcgggagaaaaccctaaaaagaactatgggagtaggctcggaaagcgataatatgctgcgcaagtatgcccttatgaccgatcgagagcgatatacatatgactatgtatttgaaaaggccgggaaggaggcggcagataagtacctggatagcctgcaagatacaatcaacctgagaagcgcgcaggataaatacaccagagacgaaacgaccgtaccagaccccatgaagattccatacaatattggaaaatcatttggaataggtgcggaaagcgctgtgaaaggaatcggacacctgccagatgcaatattgggcagacagccggactacaacatcacagaatccgaatattaccaggagctgctaaatagtcaggctggaggtgctgaaagattagcttacaaccttgcctccggcgttggaaacatggctccatctattgcaattgcagcggcaacgggaggcgcaggaagcgctggagccgcgggaactataggaaaaattggtggaaaactgtccgcttgggcggcaaagggggctgtgggaagcggcataatgtcagctcaaatggccggtcaaacctatcggcaggatatcatggaagggcgtccggttgagggggcccagatgaacgcggcccttactgccgccgatgaatatgtaaccaactggctattgggcggtatcgcggcctatggcggcggagccgtagggaaggtattaaagaacagtaaagtaggccaggcagctaaacagggcatatcaaatgctttagcaaaaaatccggcaatccgtagggcagtctttggggcggctaattatggtggtgatatgctgttagaaggaactcaggaggccgtgcaggaccttacggaatccgtcagaaagagcatgatatacggagacaatctggaccttgctggagaccttaaagaccctcagacatgggaagattttgcgttaggtgccttgaccgctggtatcctgaatgcgcctggggccatatcaaacaatcgggctataaatcagtatggaaagagcatcaacccagactatcgtgattatgtcaatggcttgtcagatattaagccggaaagctacgcagatccggcagattatcaggaagcatctaagctgaagcaaatggcagaggaatacgcggccaaacaggccaacaaggaatttgtttctaaccgcgagaaggcagagtatgcgatacggtttcagcagttcatggaaaacaccatgcgccataacgaggaaaaagcagccagggaaaacgctcagaatagccagaaggccacaggaacggaagcggatgaacaaacttacaccgaacccgaaacagccgaatacgagccgtataatgagccagaggaagcgccgaccaaagctcaaaaccagacggaaccaacacagaaaccggctgtgaatcaaacagtggccagccaggctgttccgaatcagacagaagcatatagaaagccatatgggaagaatggccaggaggcattacagaaaggatatgacggcagcattgagctgtctgcctacaataaagcttttgggcgtgcctacgatgcaggttactataacgtgagcatggatattgcagaacgctcggccattatgagcgtactaacgaatgaacagtttgtggatgcgtataaagccggcgcgcaggattacaacacggacaacaatatagacctgaaaaccggccggcccaaaaccgttccccagggaatcccaaggactggagggttgggaactgtatcggaaagcgcaactacaccgcagcgtaaagtggcagagcatataggcaagatgaccggtttaaaaattaatctggtggatggattgggacagaccaacgcggccggctcttatggaaatggagaaatcactatctccattaacagcaacgatttcaacggaacccttacccatgaactgacacaccatatcaagaagtattcaccaaagggatataggctgtatacagagatagccgtggaagccgttatgaaatcggaaaacacatccttggaaaacctcatggagagctatgaaaacaggtacgcagaggccggacaggagttgacacgggaggaaatcatggatgaggttgtggcggacgccacgcagaagttctttaatgacccaaagtttattgattctattgccaaaaaggacaaaacaattgcacagagaatcgtggatttcctgagtgatgtggttgattccatcaaacagttaatgaaaaacggaagcaccagggaagccgcaaagggactggaagaggacctgagatattatgaggatgccagagacgcctggatgcatgcactgtcagacgccagcgaaacatacaaagcagacaaacagggacaggcagaggggcagaaggaacagtacgccttggaaaaaccagaattggtgacaaatgcaagcattgaagagaattataaaaaagtaaagaacatggagccggttgcagagctgtctggaaaagaatttccaaggggagagaagaaactatcagaacaggtttgggatttttttgattccattggtggaaaggtacataatgatatcatcggagaaatcctgctggataagcgggcaattaaagatgatttggcgcatggtattactgacttgaaagcaatagcatttgcatcggtaccggatgtgttacgagaaggagaagtactggaccatcaggttaattggaaaggccgtggatatgattctgcgacagtgggagccaaagtaaagataggtggagaagaacattatgtgcttgcggtcgtaaaattgcgggacaagaaccgtctgtatctgcattcggtatatacaacaaaagtgggagaaaatgccgttctcgaccaggtatttccttccattgacgaaagtacttctggcggccattctctccctatctatagtatattcaataaactgatggatgtcaacggagaaaatcagccggagaaggtaaagcttcaattggaagatgcagacattgacccgaacgaagtaaaacgcttgcaagagcagaaccaggtgttaaaagaggctaatgaactgttgcaggaacaattcaaacttaccgcaagggaagatacacgacaggaagatattgcgaagatcgctaagagtttcctggataaatatcagagcagttataacgacagagtgttgagaaacaatctgacaaaactgtatgaatacatcaggagtacaggtcaggtggacagggacggattgacggaggcagctacagggattgccaggggaatcctgaaacaagcccggagccaatacccggaactggcagatatgtataaaggtgtcaggaaggaaataaagaataccaagatcaaattatccgatcaggacagggcagacttgggggaaatgggaggatatgaaagcttcaggaaaaagtacttcggaaaaatcacgctgagtaaagatggcatatcgattgacagcttgtaccaggaattaagcgaacagcacccagaactgttcccggctgatatcacccatccagccgaccagctgatggccgttgcccatgccattgaccagacccaggaatatgtccagaacccataccatgcggacatggacgagatgtcttatatcgtaggccaggagattatacagtcctatttcgagattcagaataagattcccacgtttgctgaccagaaggaagcccagttgaaccaggccaaagcggactatgcagccaaaatgaaaaagtgccagaatgatttcgataaaaaactgaatcaatataaagccgaactgaaggagcggtatacaaagggaatccgtgaagccaatattgatattgccaatgaacgccagatcctggcggggcagctgaagcgtgtagaggaacggatggagaacgcaatcggggacgaatggaaggaagccaagaaggaatataatgaactcatggaaagaggcagggacttaaaccgccaggaggcccaggttagatacgtcctgaaccctaaaaagtacgtggaaagcatgcagaaagtgcgagagaacaaacagaaaagctccaataagcagaaaatcatcaaagatacgatgacaatccagaactggcttttgaagccggacaataagaaacacgtaccggatgaagtaaaagggattgtactggaatttataaagagcattgactacagttcaaaatatctgaaccagaaaggggaaccaacccagcgtaccagggcatgggacgaattacagaagttttatgaagccgtaaaagatggcggtgaatgggaaggagataataaggaatccgtctattttgattgcgacccagatataattgaccggatgcaggagctaaagaagcgtgtgtatgacattgagcgattggatgacctaagcacccgtgaaatagattctttgcagaaggtggtaagctctatgaagaaaaccatcatggaaatgaatgacctgaaagcaaaccggatggcggaacaggtagaagaactggccggtaaggcgctgggagacctagggaaaatagcaggagaaagcggccgtcaggaatatggcggtacaacagggctggcggataagatgcttaactatgataatataaccccgtacacatttttctggagaatggggagcgccatggaatccatgtatagcacatttaggagtgcggcggataaaaaaacaaccatgttaaaagaagcagatgattatatagatggcgtgaagaaagacttgaaaataaccagaaaagaaattctggagtggtccggaccaggagcaaaaagacaaactttccaggtgaaagggggaaacattagtttaactcccgcgcaaatcatgtcactgtatgaggcaaataaaagaggacaggccagggggcatatatatggtgatggaataagaagtgctcccaaacttgcaaaggatacaagcgtgaaaggcgtattcaaaccctccaaaatcataaaaagctatacaccggtaaaggtgtcgccggtggacgtggataacatcacaagtacattgacgccgaagcagaagcaatttgccgatgcaatccaggaattcttatcaacacgggccgcagactggggaaatgaagcttccgtcctgatgtatggatataagaagtttgcagccagggactattttcctatcataacggatgcaaattatatccagagtaaagaaggggatctgaaaaatatgcagactactattcggaatctggggatgactaaaaatacaacaaagaatgctaataatgcagttgtcatggatgatattcttgatatcttttccaggcatatagaccaaatgagtacgtatagctcattccttgccccgctttctgatttcaacaagatatataactataagaatcgggaaaaatcggtcagcattaaacaggaaatagagagagccatgggaagcccagcccaggattatattcagacgctgattcatgatattaatggagattttcgaggagacagcaatctgtttgaaaagtttctgtcaaataaaaaggcgtcagcagtggcgggaagcatcagcgttgcaattcagcagccggcatcatatctgcgtgccatggcagagatagacctaaaataccttggaagtggagctttcacaatgacaagaaaaggccagtgggacttgatttgtaaatatgctccaattgcacagtggaaagactggggattctaccagatgaatacgagcaggtctatcaaggatatcatgtttgaaacagacagcacgatgaaccgtataacaaactggtcaatgggcctggcggaaagaggagaccgatttgcctggaatcgtatatggagggcatgcgaaaatgaggtaagtgataaacataaagaactgaagcgcgggacagatgaatactacaagaaagtaggagaacgattctctgaaatcatagacagaacacaggtagtagattctgtcctccataggtcacagattatgagaaggaaggacctgggattaaaaatggcaactgccttcatgggagaacccaccagcacctataatatgatttatagggcagcggtagggatacagcagcatcgggaaggggcaatagagaaagcaaccaaaacagccggagctattgtcgcaactctgatattaggagctgcactcaaatcggttgccacagcaccaagagacgatgacaaggataaaagtttagcagaaaaatatggtgatgccttctgggaaaacctgattgattcagcaaatcctattggtttagttccatttggaaaggatatcgtgtcaattgcacagggatattcagttgaaaggctggatgtccagggatttcaggatataaaatatgcaatagataagataatgaagctagcaaagggagataatacgctaacgccgcaatatacagccgtatatgcatctaagatgcttggaaacctttttggaacgccggccagcaatatcatgagagaagcagagacggccttaaatgtatatagtcagtatatcaacaaaggaatcgaggatgattatgtattggctcggcaaaagtatgagataaaaaacaaagcaaatctgggaatgtatgtggatatgatgattgaagcaaggagaaacggaaaaaaggagcttcaaaagaaaatcaagactgacctgaacgaggcgggaattgataatgaaaccatatctgacaaaatcaagtctaccataaaggcagaacttgtttcgaaggactatatagatcctaggattgaaaccgcagcacaggccaaaatgggtgccgatacagaaacatacaaagcggctgttggtgaactaatcgcagaaggatatgccggaaaactggtaacttccgtggttgactccagaattaatcagctcagtacaggggaagagatagactgggaggcggagacaaaaaccgatccggatgaactgtatggtgagatactgactggggaagaagatgaagaagagtggagcatttactcttccagagatatcctcggagcaattgagcaagtagacaatacagtgaaaagcctggacgcctttaaagcgatatcgaatgaaatcatagacagcaaaaccaaagccgggaaaacaaagtcagaggccataagtagcattaagtcatccatcacgcggtcctataaagaaaaatggatagcggcatatctggaggggaaccgtaaagaatatgaagcaatccaggcaaaattaaatgtactgagggttgacggaaaaaatatatacagcggaactgattattcaagctggagaaaagcggccaaagaaaaagagaaggaggagaacacaaagaaatagaatttgaaataatatggcagagagcgaaaaaggcagaccgttagcctgcctttttcaatgtttccccctttacttgctatctgcattgtagtatgataattaacaattgtacccatattagtaacaagggaggtttgttaatttgaaggaaagtattaaactggttgcgaacaataagaaggcataccatgattattttattgatgagaaatacgaggcgggcatcgagctctttggcacggaggtaaaatccattcgcatgggaaaatgcagcgttaaggaagcctttgtgaagattgacagaggtgaggtgtatgtgtgcggtatgcacatcagcccctatgagaagggaaatatattcaataaagatcctctgcgtgtcagaaggcttttgctgcataaatacgaaatcatgaagctgaacggcaagattgcggagaagggctataccctggtgcctctccaggtttattttaaaggcagtctggtgaaggtagaggtgggtctggcccgtggtaagaagctctacgacaagcgggcagacattgccaagaaggaccagagaagggaactggaaaaggaatttaaggtaaaaaatctgtattagggataggaacgagaggatattatgaggattggcagtaacaaggggagtgaagtggaagcatacacagatttcataaaggaggctgagggccttaagtccactctgcgcactgcctggactgctgagggacggcaggagagcactgcggagcactcctggcgcctggctctgtttgccggggtgatgtgcagggaatttccggaactggacagggagaaagtactgatgatgtgccttgttcacgacctgggggaacggtacagcggagacatatcggcagcattgcggccggatgccggtgataaactgaaccaggaaagggaagatgtacagcggatatgcggttttttgccaaaaggaaaggaaggggaggtgtccgggctgtgggaggaatacagtcagggcattaccccggaagccagatttgtaaaagccctggataaggcggaaaccattatccagcacagccagggaagaaatcctgccgggtttgactatggatttaatctggaatacggaaaggaatattttgagcaggatgaacggctggaagccctgcgcagcctgattgatgcagaaacaaggacgcgcatggaaataaaataatgcgcaagaaacggtgaagaatagaacaacaaaaaagcaagcagtttcatctgcttgcttttttcatgacctgaccgggaatcgaacccgggtttacgccgtgagagggcgtcgtcttagccgcttgaccatcaggccttatctgtgcatctcagcgacagcttatatataatatcatataaaattcagtttgtccagtacttttaataaaaaaacagaaaaaatattttcccgatatttgcaaaaatatggaaccaataaaacagcaaagtaaaatgaccagtcggggaactggtcattttaggagaaggtatttcgtttcttatggggtgtaacaaaaactatataatgtattgggggggtttacgttaattataatagcatacgctatccaaaaagtgtgcacaaagtttgcagaatgaaaaaaactattttatgcattcttacaacggtcttgtgaaaatgaaaaaaaataattccttacaggtctatgaacacagcactatgacccggttaggagctgtctgtggcggtatgctctttgtggcagccgcataatataccagcaggaaatgatttgccgggaaacagaaatatggctggccgtttaaggttgacaaaactgtagactgatacaggttcagcttcagcgattgatcagaggcagtgagggtttcatcaaaccaggaaaggtttacatcctcctccggcctgactacggcgattaaatcagcctggtattgaggcgggtagatgagggggaccggcagggtgttgtcataaaatgcagccacacgcatacctggcatcaggcgcatggtgtccaccacaaaggtgtcatcggatagaatcatgttgacgggctgtccctcaacactgagggttataacctgggtacaacaatccccttcctgtgtggaaatgttggtaatgaccccaactacgggagtcagattttcatatttcataaaaaaatatccttttttaattatcatatgccaggatagtaaaaagaatccagaaagttgaataaaaaggaggaggccggaaggatttcatccctccggccgagtattatgaaaaaaagtttaattagcattagctctttacataaattagtatatccataaaatgtgaggagaattttatgattctgtaacggatttatgaacagaatgtgagaagtttgtgaatagacaggccgggctgagcatcatgctgattagggcctgattacggccgttatagctgttatgctattgttaattttcctccattgtcttgcaataagacagaattgtgatagactggattcagaccatacataaaaaaaggaggtacaacatgaaattttatatttgtaatcactgcggcaatataattgcctatgtgaagagcagcggtgtcccggttgtctgttgtggggaaaagatgcaggaactggttccaaacaccacagatgcagcagttgaaaagcatgtgcctgtcattcagatagatgggtctaaggtcactgtcacagtaggctcagccgagcaccccatgattccggaacactatatccagtggattgctctggctaccagacagggaaatcagagaaaagagctgcagccgggacagaagccgcaggcagagtttatgctctgtgaaggagatgaggcagaggctgtatacgcatattgcaacctgcatggtttgtggaaggcagaaccttaatctgactctgccgggaacctgccggaacttctatccaaaaggtgtgcagagctgtctggcgcagcataatacgaacggacataaccgggaataaacgaacataaccggacgtaaacagacataaccgggcgtaaacagacatagccgggcatagacaaacatagacaaacagcattttggccgatacggcacgaaatgctgtttgttttatatacgcgtattgccagcctgttctttgctattctttgggagtttcatacagaatgacgatatccccatcaacaaaccctgcaccgattccctgatacgcctttaacctgccggagtatgttccatttgccagataagcacgtattgtatgtaccgtatcctccagcacctgctgccagccggtattttgtacccagtggagagtgctgtcacgggaagtaaatacttcatcacaggcccagtccgggtcatacgcgtcgaagctgcgggttccggtgaactccatggaccagcagctgtctccatcatcatagagattaaagttgacggcaatgatttcctccggcagggggccggccattatacggtcaagccacggtatgaatgattgcataaaaatgccgccttttatacggtcttgcggtccattcagcaggagatgcagaatttcctgttggctgctcaaactatcataatcccccatcagcaaattgggataatgatatacaacaccacggcattggtttttctccagtgcgtctatcagggagtccatgccatattccttagcaaaatctgcaaatacctgaatcctggttttttgcaagatggcagcaccgcaggggaactgaggacattcccagcatccctcccatctgttttttatgcagcagttaaacggtttgcaggtttctctgcccgggcagccgccgctgcggcagccaggacaaagaacattttcgctgcacacacagcaggcaagcccgcagtatgcaatgcccttttctctttccatgaatacacctcacctgtttatctgaaacttatttttactatgtgcaacttttatgaaagctctcccgtctaattgtatgaacccgtatggaacttaaaataattaagacgaaaaggagatttaccatgaaaaaacatttagttgtcattaccatctgtacactggctcttgcaaacgcagttcccgcaatgcctgtgtatgctgcatccaaaaaacccgcggctgcttattccgcaaagcagagacgggagggacagaaaaaaatcaaggacgcggcttccaggataaaatccgcatttaagaaacaagacctgaatgcattggcggatttatgcagctttcctcttatcatatcatatgcatccggcgaattgactgaacttaaaagcaagtcagagctgctggcgctggggaccggtcccgttttcacagagggaatgaagtctgccatcgcatccacagatgtttcaaagttaaaggaagtggggaatgcaggagtacagatgggcggcgatgcaggtctgagcctgtttaaatttggaggaaaatggaagatcaacaacatatatagtgattacaacagccaggctggcagtgattcaggggccctcaaaattggaaacctggaagaagcagccactacagtccagaaatgcttttcgtacagagatattgaaactctttccaggatttgcagttatccggtgaatgtaatttacgaggatggaacatcagcggaatatagtgatgccgccagcttcatttccaaatgcggcggcaggctgtttacggaccgtctctgtaattcggttactgccacggacgcatccgggctgcaggcagttggaaatgccggagcgcagctgggaggggattccggcctgtccatgtatcagtttggaggagcctggaaggttaataatatttatcagtaacgtatttttcattgtctgtatcagtaataagggttaggaaatccagtgtattcctggaaaatagcggaataatgccttggcagttatggcttcctccggaacaaaggggtctgaccagtcccgggcatccctggaatgattcctgttgtcacccagcatgagatagcagccttccggaacctggaaatgatagttctctgagtccatgggttccggaagatatggctcatccaggggagtgtccgactgattgatgtatatttggttatcacggatatccacggtttcccctggaagtcctatgattcgctttaccagccgggtcttgtccttgcccggctccgctttgtggtcaaagagtacgatatcccccctctgaggctgtgctccgaaggcgtatgaaagcctggagccgatgatccggtcacctgtcataatggtattctccatggaaccggaaggaatgtagctgttggcgatgacaaaggtattgaggacaaaggcaatggcagcagcggccaacagaattttgacccactccagaacctcctttttaaagccggagtttccggtatgttcgctttttgctgatgtgttcatggaagtctcctttataataaatcatatttgaatcggataaatgttatttaccagtttagcattaacgtcttataaagtctttagtatttgccaatacgtaagaataattaatagtttatttattaaaaaaatcttcctgtaatgttattctatgaataagaatgaagcaaagggagtggaatatgaaacggattgtacatactgtaagcattatactggctgttctgttagccgcggccggcggctactatgggggaagaaggagcgtccaaccaatggttggaaccacattttatgccgtcatcgaagagataagggaaaaccgccttctggttcagggattggagataaatgatatcaatggacgcgggacctttgaactggcagtgggagataaaacagagcttatatggagaggcgttcccataacggtgaaggatttgagggtagggaataccgtatcagtcacttatatcggagaagttttggagatatctccggctcaggtcagtgatgtgctccggattcagctgctggatgatgaaacgccttattagagtatgcccggtggacaatgtaaaatacaaagtaaaatggccagtcggggaactggccattttaggagaaggtatttcgttttttatggggtgtagcaaaaactatataatgtattgggggggttacgtctattatagtatcacctgttgtcgaaaaagtgtgcacaaactttgttggagttgaaagcttattttgtgtactttttt

SEQ ID NO: 3211 - DNA, 5161 bp, Unknown
  gut microbiota DNA sequence
gcaaaattataataaaatgttattttttcaaattttcccttgcatttttcacaacatgctttacaatataattgatgttttgtttgtacatacatatgtatctaacttgaaaggattttaaattatgaccatgttcaccaaagaaataaataaagatgtgcccatccccctttattaccagctgaaaaatatcatcaaaacagatattgagaacggcactttaaagaccggggatactattcccactgaaatggaaatcatgagccactacaacataagccgctttacggtgcgccaggccatctccgagctggtaaatgaaggttacctgctgcggaaaaccagcaaaggcacctttgtcacagagcctaataaaaaaacaagcttcatcaagtcctttgaaccattccaccagcaaatccaggagctgggcaagaccccgcatacggaactgttggacatgtccgtcatgaaaccggatgatcggatcagggaacttctgcgtcttggtaccaatgacaaggttatctccctgttcagacggcgttttgcggatgcaacgcctgtggtgacaatccagaactatcttccctacaacctctgtcattttgtgctgagccatgactttaaggatgtttcattgtacaatctcttcatgtcacggccggaaacctgcattgacaatacccgaaccattgtttccgccgaaacagctactcccgaggatgttaagctgctggaggtaaagcccggcagtcccatgctttgctttaataatatttccaccaccagcgacggtaccataattgactatgcctatgcccattaccgtggggatatgaacaagtttgaaatcaacgaaagccccaaataacccatctgcagcattcttctgcccttttaccatctaaaaacagcgggaccggattacacttgatccggtcccgctgctgcggttcacctgttaacttttcccaaacacagaagcagtcttaatatccagtttcctgcaccactccttaagcacttcctccctgcagcaggatgcggaaaaatcctccagctcaaaatccaggggtatgtcggtcttaatggtggccagctccttagacagcctggctgcggcttccccgcacagttccccttcctcccctgtcttggtcaaagatttgtagggggaacggctgattcccaggcagttcttccagaagtcctgcagctccttaagctgcttcttatcctgctccgcctcatgtatcacctcataaatatgttccacggtgccgtattctcccagcaaaagcggtgctgcgctggcaacgccgcggactcccgggatattgtccgaggtatcgccctggattcccttcaggtccgtaatctgcctgggccacactccttcctcggaatacaccgtctcagccgtaaactcaaaggtcttttccggcaggttcaccgatgccttatccaggccgtaaagcccgtaatacttgtcgcagagctcctccgccttttcctgcctggcctggaccatccaggcccttacattatactcatcgctcacaagctgaaggtaatcatggtccttggtcatcaccaccatgggcacctgctccctgaatttataaaccaggcttcccgcatagtcatccgcctcataccggtcgctgtagagcaccttaaaacctgcttcctccagaatccgctccatcagcacgaactgctgcttaagtggctccggtgtcctgcttctggtccccttataatcaggatacagctccctgcgaaaggtatcccttgtcttgtcaaacacaaatgccacataggccggctgctgctttttcagcagggaaaccacggccttcagcacccccatgatgccgttggtataggtcccgtccgatgcgtggaggattttcccgtaatgcttttccttttcctcgtccgtcttggcgaacatgatttccctgggtaacactgcatagtaacaggttgacagcagggatgagccgtcaacaatcacgaattttctttctgacattctgattccatctctttcttacgtattctgtcattgtgcgggccattatgcttacctgcggtgatgcctgtcccagattccggcaaacagcagggcggctacaatgaataccagcactatcaagcgttccatctgtcccatatggctcctccttccggagacatgactgtaacgggaagtcacagtttcctcaaaactgtatcatacaccagttttgtcctggcgtcaaagagaacccacagaatctgttccagttcacccggatactctgccgcaaattctctggcagttcctatggcggtttctgctgccagccccaccgggaagtggtatatgccggtggagacagagggaaatgcaatccgcttcactccattttccagggccagcaaaagggaattcctgtagcaggaggcaagcttctcctgctccccgcatgtgccgccgttccacacaggacccacggtgtggataatataccggcattccaggttgtaggcctttgtaatcttggcctgtcctgtcttacagccgcccaacagcctgcattcatgcagcagttcctttcccgcggccctgtggatagccccatccacccctcctcctccaaggagggatgagttggccgcgttgacgattgcatccattccggttatcttcgttatatcacctaatacagtacctatgactgtgttgttttcatttttcatagctggcctcctctgatttctttcctttgattataccatataacccctcagtcccgacagcagtaattcaccgattttccccgctccgctgtcagccgcaaaggtatggaccagactggccttatccctgccaaggatattttccagctctgcaaaggaaagcaggcctttgaggtacagctttacgatttccattggtccgcttccgatttccgccaccagctctaaatgtgtcatgattcaccttctttctgcctttttcaaccttccattaaaaatgccggcctaataatatatgcaggctttttccagaatattcctgttggcagccatatcattccattgaaatcatgaaaatctttcgctttccctatggtaaaaattaatcattccattaaaaaaagtcagctttttgtaagaaacattacgcttcattacatttcactgacttccgttgcaattcatcctgaactatggtatattcacatcaggtcagaaatgacgctagcccggcagcttccacagccccatgttgtggaagcaccgggctccccccaaaaagattatctatcatcattcttcgtatttccagatttgcacctcacctgaatatccctcaaatgtacgtttaataatatcctccactatattccagtcgcctcctgcgctgccgcatcctatcttatagggaaatgccactgtctcgtttttgcccctggcttccaaaaagctccggatttctcccatcgctttttccaatgcgtcataatcggtatagaccatcttttttctgccgtaatcatcctgtccgtacagattgccaatcagaaaccagcgtccgtccttttccaccggctgggcagacacccgtcccagcagcttggatgtgtccccgttttccttttcaatccactgcttcgttatccgcttataagttttctccacttctggaaacagcttctttacctgtcctgcaataccatagccgaatgcgccctggcagttcacctgatgacacagaatatctgcctttgaatcaaatatgctgccattgtaatattgaatcataatttcctcctctatctctttcatgatgctgtccgcccgttatatcatatcccggtgctcggtccggcccagcagataatccacggaacagccgaaatagtccgccagttttaccagtgagaccgcgttcggcacgctccttccgtttttccagtcgctgatgtttcccatggatacatccagatccctggatacctggctggtactgcccttccgcctgatttccgcaaacagattcttcaagtcaatcctttcctgtaccacatttcattcccccaattccagtataaaagttgtgtcggatctatcataaatgctgagaggaaaattgtaaataaaaatatgcacaaaagtccttcaataatttgtaagtatttcttcaaactccgtccatgaatatcatgtataatagttacaattcgggtattgcccggaatacaaaggaggattattatggatacaaacaagaaaatattgataggagccattggcgctgctgttgtcatcggcggcattgccattggcctcctgctcagcaagacgccggaaaaggcagacctgtccaccatacatacagaggcagctacggaagctcccaaggaaacgcttcccgccgccacacaggctccagagacagaggagaccacagaaggccaggaagacgctgcttccagtgtttccgcttccatcgagacctatacatccggaaaggtatctatccagtatcctgcggtggaccagatggatgacgcctcaaagaaggacaagattaatgaactgttaaagaccaatgccctgtccttcataaaagccaatgacatcgacgagtccaacgataccctggatatcaagtgcaaggttatttctgtggaccgcaaacgtctcaccgccacttacaccggcactctgtccgcaaaaggagccgcccacccggtcaatctgttttattccaacacagtcaatctgcttcaggcccagaacctgggactggatgattttaccgacgcctataccatggccggatatgtgctcagcgacgatgtaaagttttccggcatttcttctgatgtagaggcccaggtcctgagctaccgctcttccatggatttggattccctgaccgctgtctttaacagcgcggacttcccactgtcatcagagacacagtggcccgaatccttcagctatgaaaaacagggaaccatctacttttcactgcctgttccccatgccctgggcgactatgtgctggttgcatttgaccccaccaccaaatagtccttcaaccggggttgatatcataagatatttgatatataattatcagtaattctaatagata

SEQ ID NO: 3212 - DNA, 18523 bp, Unknown
  gut microbiota DNA sequence
cagcaaaatttatggataacgtaatggtatttgaccaccctttgattcagcacaagatttctattctgcgcaataaagctacaggaaccaatgagttccgtgccctcattgaggaaattgccatgctgatgggctatgaagccctccgcgaccttcctctggaggatgtggaggtggaaactcccatcgagacatgcatgacccccatgattgccggacgcaaactggccgtggttccgattctccgtgccggacttggcatggtaaacggcatcctggctctggttcccagcgcaaaggtaggtcatatcggtttatacagggacgaggtgactcacgaacctcatgaatattactgcaagcttccaaaccccattgaagagcgtaccatcatcgtcacagatcccatgctggccactggcggttccggtgtctcagccgttgactttatcaaggaacacggcgggaaaaagattaaattcatggctatcatagctgctccggaaggccttaagcgtctccatgaagcccatcccgatgtacagatttacgtgggacatctggaccgctgcctgaatgaaaacgcctatatctgccccggactgggagatgccggagatcgtatcttcggaacaaaataacaggaattattacaggcaaatacaaattcagggatatacaaaccaaagataaaacaggaagccggacttgcgatgtgcagtgtccggcttcctgtttttataaactctctgactgttccgtgtttctgttcgttctgtactgacagcttattttactaccttaagcccgccctttcccttctcaggtgcctcgggcgcttcctgctctgtttccacttccctggcctcttttacaacgatgttgtcctggcccttgtagatggagtcagagggaacacagccgcgtacgctggacagcgggtatacattagaattacgtccaatgaccgttccgggattgagcacgctgttgcagccaatctctgcgtgatcgcccaggatggcgccgaatttcttgcgtcctgtctccacatcaccatcctcagcatgaacctttacaagacccttgtcagccttcacattggaggtcactgcgccggctcccatatgtgccttgtagcccaggatggaatcgcccacatagttgaaatggggcacctgcgcctcgtcaaagatgatggagttcttgatttcacaggaattgccgatgacaacgtgctgtccaaggataacgcctcctcttaaaaaggctccgttgcgtatctgtacctttggtccgatgatcataggtccgcccatggcagtggtgggagccatctgtgctgtcttgtgaatccagatattctttccaatcttcttgtattcgttctccggaaggctggcgcccagactttcgatgaacccattgatgtcacccagaacttcccatggatactcatggccctcaaacagcttttcagcgattgtatggcttgtgtctaaaagttctttgattttcatctgttccagtttcataaattaattctccttttttgttttatagaatgcggctgccgcgtcaaaataacctctcatattgtactggttattcatgcggatgacattgactgtcctgccggcaacaaaacgattcagcttttccatatactcatctgaagttatggaaccctccgcaacataggtgagccccttttcccagctggctgtcagctccggattcagaagctggcggatagactggtccaccacgtcatagaccatttcccctaaaagggacggcgtaataacctgggttttcttgttcaggttcagatacttgatgttaaacagtttcttaagtatctcagccctggtagcgctggtgcctatgccgctgcccttaatctgagcccgcagctcctcgtcctctatgagctggcctgcattttccatggccagaatcatggaaccggaggtatagcgcttgggaggtgatgtctcgccttcctttatattcagctccaccaaagtaagtatatcattttttttcaattctgcaagcatctggagcaatactgtcctgtcaacttttggagaaatggcatttgggacaccttcctttgcctcgtccctggactcatcccttgtctcatcctttgtctcatccctggcctcgtcaaaggattcctccaccccatttttctttgccaggttcacatccgccaccttgagatatcccggttcggacagaaccttaaaattggcaaaaaaatgttccttcaggcgctccagctccaggctgtatttctgataaaccgccggaggataaaatatgctcaaaaaccgtctgcatatgacctgatacaccttttcagacaatggcggcagtcccctcaggtttccaagtccctgtccggtgggtacaatggcatagtggtccgttatctgcttgtcattgacatagcgtgtcttggcaatccccttataggatcccatattcagcacctcatccgcaaaccctgccataggcccgtaattcttaaggccgcctatgttcttttgaatctccttggacactgccgtggacagaaccctggcatcggttctggggtaggtgaccatctttttctcatacagctcctgcaccaccttaagcgtctcatccggactgattttaaacatcttggaacagtcgttctgaagctccgccaggttgtaaagaaggggcggattcttggtctcctttttcttctccttggcgagcaccgtggccgtgagaggcggctctgccgtcaataaggcggccagctcctctgcctgctgcctgtccttaaagccgttgtccttatacaggcagggggttccgaaatagcgggaaccttccactgccttccactccgcctcaaagggaaccggctggccgtccttacccggcgcctcaaaggatccaatcaccctgtaaaagggggttttgacaaaaccgcgtatctcccgctctctgcgcaccaccattcccatgacacaggtcatgaccctgcccacggacagaaccgtaaacttggttcccagataatttgacagggcaggtccgtacttaagggtcagcaccctggagaaattaattcccataaggtagtcctccttggcccttaaataggcggaggcggacaggttgtcatactctgtctcatccttggcctcgcggattcccctcaatatctcttcctctgtctgggaatcaatccacacccgtttctgcttcttatcctttaccccggccatctgggccaccaggcggtatatatactctccctcccgtcccgagtccgtacacacatagatggtatcaatatcgggccggttcaaaagacccttgacgatttcaaactgcttggatacattggttataacttcatacttgaattcctttggaaggaatggcagtgtctgaaggctccagcgcttgaacttcatgtcgtaggcttccggataactcatagtcaccagatggcccacgcaccacgtcaccactgcctgatcagactctatatacccgtcgccccgccgtccccgtatcttaagcgcttcggcaaactgctgggccacactgggcttttctgctatgtataatgattttgacatccaatccctcatttactttcttcatacgcgctgccccggatttctccggcagatttccatggcggcagggcgcatattataatagtataccattaaattgcctttgccgcaatcaaaaaaaccatgaagcgccagcgatggcagaaccctcatggttttcctgcataaactactataacgacattccggaggtgacttccatgcctggaagctggcagtatcagccttatctcaccacatatgattcatttatcttttacaatgcaatcggggaacatcccgattacttctaccggcccatagccgtggcgaaacaggtggtaaacgggaccaactaccggttcatgaccatagccgaaccggagcagtcagatctgacgccccattttgccatcgtggaaatctatcagccccttgaaggcagggcctatgcaactaaaatcacgcctgtttaaccaaaaattgatagacggtcctggttctgtactcgtcccctgctttcagcaagggggacgggaactggggcttgtggaccgcatccggaaaatactgggtctcaaaacagaaggcgtggcggtaatcatagcgggcattgccctttcccggcatctcatcctgcaggaaattagctgtataaaactggattccgggcaggtccgtataacattccagcacccggccgctggccgggtccatggcctttgcagccagggccagttctccttcttctttatccagcacccagttgtggtcatatccctttccgaataccagggcctcaaaatcagcgcctatatcccttccaatggccttcatctctgtaaagtccatgggcgttccagccacaggagcaatctctcccgttggaatggaaacctcgtccgccggtgtataccgggacgcgttaagccacacctcctgcttcatcacgtcgccgctgtcatgtcctgccaggttaaaatagctgtggttggtgaaattggcaaccgtatccttatcgcagaccatatgataatccagcacaagactgtcctcatctgtcagggtatagctcaccgtgatcctggcattgcccggatatccctgatcgccgtccgggctctccagataaaagtccagcctgctgcctgcctctgtctctgaggcggcgcagtcccagaccctgtcgtggtacaggtccggtccgctgtgaaggttgttggggccgttgttggcctccagcttataatccttaccgtctatggtgataacagctccgccaatccggttggcattgcggccgatgggcgcgccgaagtgggcaggattcctgcggtagctgtccaaatcatcgtatcccagcaccacatccgccatgctgccgtccttatcaggcaccaccatggaaacccacacgcctcccagagtgatgaacgaagcagataccccattcttattggtcagcgtatacttgtaaacctctgtaccgtcgggcattttcccgaatgaatttttctcgattgccatgtttttctccgctccttctccatgcagtactaaatatatccccttgccgtcaaaagctctgcgcagagtacggctccgcctgccgcgcctcttaccgtgttgtgggacaaaccgatgaatttataatcatacacagcgtcctccctcagacggcccacggaaattcccattcccctctcaaagtccacatccgctgtcacctggggacggttatcctcctcaagatactggatgaactgcgccggggcgctgggaagcttaagctcctggggaactcccttaaactccctgagtttctcaatcagctgctcctttgtcacctttttcctgaacttcacaaacacggcagccgtgtggccgttcagtaccggcacccttacgcactgacaggtaatgacaggactttgtgccttcactataaccccgtcctcaatggttccccacaggcgaaggggttcctgctcgctcttttcttcctcgccgccgatatagggaatgatgttgccttccatctccggccagtccttaaatgtctttcccgcgcctgagatagcctgatatgtagtggccaccacctcgtacggctcaaattccttccatgctgtcagcaccggcgcatagctctggatggagcagttgggctttaccgcaataaatcccctctctgtcccaagtctcttcttctggaagggaattacgtcaaaatgctctgggttgatctccggcactaccatgggaacatccggcgtccagcggtgggcgctgttgttggataccacaggcgtctccgtcttggcatatgcctcctcgatggcctttatctcatcctttgtcatgtccacggcgctgaatacaaaatcaactcccgccgcaaccttttccacctcatttacattcatcacaaccagctttttaacagcctccggcatgggggtagtcatcttccagcggtctcccactgcttcctcatacgtcctgccggcagagcgggggctggctgccactgtcactacctggaaccacggatggttctccaaaagggcgatgaaacgctgccccaccatacctgttgcgcctaatattccaaccttcagcttcttttccataaatcattctcctcattatcctgattttcccgccctccggaactgtcacggaacctgtcgcattaaatccatgacagtcacattgaatcgtagcctcattgaatccacggtacggcgaatctttccctatcctataccaaacaacggaaaaaatcaagatttattcgctagaaaaatacatttgtgcgccccacaaggacattctatcttttttgtatgcaacactgccattgggtcaggaaaccagtgacaatgccacctccatcatctgtgtaaagctggtctccctttccatggctgaggtggcttccccggtgaccatggaatccgagatggtcagaacggccagggcattgacgccggccgccgcagcgttggcatagagggctgccgcctccatctccacggccaggactcccatgtcagcccaggtcattcctccctgcacctgtttgggcggggcatagaacatgtctgagctgagcacattgcccacatggaaggacagtccccgctccctggcagcggccacggcccgctccaacaggctgtagctgcacaccggcgaataatcgcccggcagccccaacaggcgcacaaaattgctggtggtacaggctcccatggcaaacaccatgtctctcacatggacgtcaggcgtcagggccccggccgtgcccacccgtatcaggttcttacagccgtaaaagtgaatcagctcataggaatagataccgatggagggacaccccattccggtgcccatgacagataccggcctgcccatataggttcccgtgtagccaagcatgtttctggtcccgttaaactgcttcacgtcctccagaaaatgctccgcaatatactttgccctcagggggtctcccggaagcaggattgtctctgcgatttctcctttttcagccccgatatggggtgtgggtgtgttggataatgacatggcatatacctccttttctacagccgcactttgctgcctttcccgtccctcttggccagtttcagacggtttaaatggacttccttacccttgtaatccacaatgggattctcaccaatcagatacagcttctccagctcctcattcttggtcagccggatgcctctgacacctctggatgcctttttaagcatggatatctcctccagggcaaaccgcaggaacacgcctcctgttgtctggatcaccacctcggtctcgccctccaccggtatcacggccgccagttcatccccctcctggagcttggtggctgccaccacccggttgttggtctcaaattcctccgcaggcacctgctttaccatggccattttagtggcgaatacaaatatcctgcccttcatgtcctctgcgctggtcaggtaaacaatggtatccttggcaccgtcgaatttactcagattctcaatgggcgttcccttatccctcagcttgccggccggcacatccatggcctttatctggtaaaggctgccgctggcagcaaagagacagattttatccgtattcaggcatttcaccacgtggacctgctcggtgtccacggtttcctggttccggtcataggtggacttatccaacagcttacagtatccgaaccggtccatcacaaagaccatctcctggacagccacagcgctctcgtcgtacaccgcctcaggtccgtcctcaatcagggtgcgcctgggagtggcaaactcagccttgatggcagccaggtcctccttgataacacggttcatctgggccctgcttcccaggattttcttatactccccaatcttccttaaggtctccctgtgctccttttccagagccaggatttccagtccgattaacttataaagacgcatttccagaatagcggatgcctggcgctccgtaaaggcaagcttctttgcatcctcctcaaaccccggaaccttgaaatggatgttggtcacatcgcctgtggtcagacatgccttggcatcctttaagtttttggagcccctcaggatggctatgatcaggtcaatacagtcgcaggccgcaataagtccttcctgtacttcctttttatccatttccttctggagtaaaacattgtatttgcgctccgtgttctcatactggaagttgaggaaatttctcaggatccccttcaggttcagcgtctcaggacggccgtccgcaatggccagcatattgaccccgaaggtatcctccagctttgtctttttatagaggatattttttatcttgtcaatgtccgcatccttgcgcagctccagcacgatacggattccctctttgttggactggttagagatatccaccacgtccgtcagcttcttgctctccaccagatcggccacatccaccagaaacttattgattccggcgccaatcatggtatagggaatctctgaaataatcagcttatccttgtccgccttgcgctttccaagctccacctcgaacttgcccctgagcttgattttacccatgccggtctcgtaaatttggggcagctcactcttattggcaatgactcctccggtgggaaaatccggccccggcataaactccatcaactcctgagtggtcacctccggattatcaatgtacgcctggaccgcgtctatcacctcgcccaggttgtggggcggaatgcttgtgctcatgcccacggcaatgccctccgccccgttgattaacaggttggggaccctgacgggaagcacctccggttccttttccgtctcgtcgtagttgggcacaaaattcacggttttatccagatctttaaggtagacctcctccgcaaacttctccagacgcgcctccgtgtaacgcatggcggctgccccgtccccttctatggagccgaagttgccgtgtccgtccaccagggccatgcccttcttgaaattctggctcatgacaaccagtgtctcatatatggagctgtcgccgtggggatggtacttacccatggtatcgcccacgatacgcgccgatttcctgtggggcttatcgtggtccagatggagctccctcatatcatagagaacccggcgctgtaccggttttaagccgtccctggcatcagggatggcccttgcagtgatgacgctcatggaatagttcatgtagcttctctgcatttcctcactgtattcagtccgtaatatcttttcagccatgttctaattgtctcctgtctatgcgtcaatctccgcctcgtccgcatgctcataaatgaactggcggcggggtcccacctcggtgcccatgagcatctcggttatctccgtagccatcctggcatcctctatctccacccgcttaaggacccggcgctccgggtccagcgtggtctcccacagctgctccgcgtccatttcacccagacctttgtagcgctgcagcgtaaagtcgccggtatgggttttcctgtaacgctccagctccttttcatcgtacagatactgttcctccccccgcttgggaatcaccttaaacaagggcggcatggcaatatacacatgaccgtcataaatcagttccggcataaagcggtaaaggaaggtgagaagcagggtgtcgatatggctgccgtccacatcggcatcggtcatcaggatgattttgtcatagcgcagcttggtgatgtcaaagtcattgccgtatccttccgaaaaaccgcagccgaaggtattgatcatggtcttgatttccgcattggccagaaccttatccatggacgccttctcaacattgaggatttttcccctgatgggcaggatggcctggtactggcggttcctggcagtcttggcagagccgccggcggaatctccctctacaatgaatatctcacaccgggaggcatcccggctctcgcagtttgccagcttgccgttgctgtcaaaggaaaatttggacttggtcagcatgttggtcttggctttttcctcagcccggcgaatcttggctgatttttccgcacagccaatgactccctttaacacctccacgttgcggtcaaaataaagctgcagctcgtcccctgtcaccgtgaacacggccttggtggcgtcggcgctggccagcttagtcttggtctgtccctcaaagatggggtcaggatgctttaccgcgatgacggccgtcatgccattccttgtatcggctcctgtaaagttggtgtccttatcctttaaaatgccgatttccctggcatagctgttaatcagcgccgtgaatttggtcttgaagccggccagatgggtgccgccctcctgggtaaagatgttgttgcagaagccaagtatgttctcctcaaatgtgtccacgaactggatggcggcctccacctccaccttgtccacggttcccttgaaatagatggggtcgtgtaccggcgttttgccggagttcagctcccgcacataggcaacaatgccctccggctcatggaaggccaccttctctccctctccgggccgcttgttttcataataaagggtcaggttgggatttaagtatgctgtttcgtgcaggcggcttttaagccactccgccttgaaacgggttttctcaaatatatcgccgtcaggcaggaaattgatgcaggtaccggtctccctcgtctttcctatcacagggagaagtccgttctccagcttgatgacaggacgtcccttttcatattcatcgtgatagatgcagccgtccctgtaaaccttaaggtccatatgggccgacagggcattaactacggaggaacccacaccgtgaagtcctccgctggtcttataagcgtcgttatcgaatttaccgcctgcatgaagggtggacagtacgattctggccgctgatatgccctttttgtgaagccccaccggaataccgcggccgttatcacggaccgtgcaggaaccgtcggcttccaatgtcacccacacactgctgcagaatccggccaggtgctcatccaccgcgttatcaatgatttcataaatcagatggtttaaccccttggagcccacgcctcctatatacataccaggacgcttacggaccgcctccaatccttccagcaccgtaatactgtccgcgttatattgttcctttgccattctattcctccatattgctatgtacagatgcgtacatatgtttcgtcttatagtattaaaccatatttagattgttttggcaagttccggccatgagaaattcccgtatgcatacggattcccttcagtattcggaaggtccgggaaaaaatccggactcaattcatagaaatacacagaaatcattacggatttttacaaaaatatgaaaatacacttgaattttccaaaatacatgatataatatcagtgttgtgcagatgtagttcatcggtagaacaccagcttcccaagctggggaggcgggttcgattcccgtcatctgcttttaaggccctgtgtgtgcagggcttttttgctgtcctgaatacgttttttatcttctgctttttctttccgcaagacaataacaggccgcccggtccgctgtggccgggcagcctgttattgttataatccatcttttcattttttgctttttctattcttatccttcatgaaatccggctttctacagcaccttatccagaaagctcctggtccgttcctccctgggatttccaaacacttcatccggggtcccttcctctacaatgtagccgtcatccataaacaccacccggtccgccacttccctggcaaatcccatctcatgggtaaccaccaccatggtcatgccgtcggctgccagctgtttcatgacctccagcacctcgcctaccatctcaggatccagggcggatgtgggctcgtcaaacagcataatgtccggattcatggcaagggaacgcgcgatggccaccctctgcttctgtccgccggagagctgtcccggataggcctccgccttgtccgccagccccacccgggccagcagttcaagggccttcctgccggcttcctcttttcccataagctttaattccgtgggagccagtgtaatgttctccttcaccgtcagatgagggaacaggttaaaatgctggaacaccattccgatgttttcccgcactttgttgatattggtgttagggtcggatatgggatggccgtccaccaccacatggccggatgtaatcttctccaggcggttcagacaccgcagaaacgtacttttgccggaaccggaggggcctatcatgcatacaacttccccctctcttatctcgatgctgatatccttgaggacttccagctttccgaaattctttttcaggttatggactgaaatcttattttccataggacactctcctctccacatacttggcaatcctggacagaatcgtgcagactaccagataaaacagggccacgcagatccagatgggcataaccatggaagcggaattggccgcaataatcttgccgttctgggtcagctccctgggtccgatgacagacacaagggatgtatccttcagggagatgataaactggttgatgatggagggcagcatggtcctgaatgcctggggcagaattaccttgcgcatggccttgccgtaggaaagtcccaggctctggctgcttccatctgtcccttgtcaacagcctcaattcctccgcggatgatttccgccatataagcgcctgcattaaggctcagggccacgcagcccgccgtaaaggcgccgcctatattgctccactggaaaccatatggcttcaggacgcttcccacaccgtacatcataatcatgacctgtaccagcaggggtgttccgcggataatgtcaatatagacatcggcaatgagttttagtaccttaaaatccgagaccttgaacaggccgaaaataacgcccagaaccgtggcgcagagcagagatatcacggtcatctgcagggtgattcccagagccttaaaaaatgatgggtaatactgtgttatgatgtttacaatctgcatactatcatccttttctgattattcgttgacgtgcatcattccagggatatccttccatgcccatggaatgttatagccaaatttaaagcacttaagcataaccggtaaaaaaccgtataattgctttaaattcatccataacctgccggcattgaggcgccggccctgcataaggcaggaaccggcgccgggcagcactgcccggaggttctccggcagtcctattttgcaatgtatgtattcaatatctcatcgtatctgccgcttgccttgatgttctccagtcccttgttgaacatctccaccagttccggatttgcgccctttaaggtcgcgaaaccataggaggaacctttctccataggtgtgggaagggtgaggcccagtcccctggaaatttcataaccgataacagggtaatcctcaaagcaggcaactgcctctcctgctataacggcctgatacatgtcagatgagctctcgtactgtattacctcaaaaccatactgctctgcaatggactctgcaaaggtacatccctcggtaccaatcttggcagccaccttctggtcctttaactggtcataggaggtgatatcggaatcagacaggacagccatgcctacgccggaatcatagtagggctctgagaaatcatatttctgcaccctctcatcggtgatggacatgcctgcaatcacgccgtcgcactcaccggcctccagggcagttacagctgcggagaatcccaccggaaccacctcatattcaaagccctggtcctgggcaattgcctgtaagatatccaggtcaatgcctaccatctctcccttttcattctcaaactcaaaaggggcaaaggtggtatctgtgttgatgatgtacttcttgcctgaggccgccgcgctggtttcctcttctgctgctgattcagctgccgtggtatccgcgtttgctgcagtctctgctgctgttgtgccggcggctgtggtctctgcgggcttggagccgcatcctgccactgtcaatgccatgatggcagccatggataacgccataaatttcttcataattacttcctcctctattgatcgaaataaaataagggtgactttaataaacctgtctcccttgacctgtgatgcgcctgcatcatcctgattactatatcacaaagatatgtcaaagtcaacttgttgtaatagttacaattaaataactgtaccatttgtgcagaaacaggaccgcaccgtacttctgcccaatgcggccccggttattccagaccttacctgccttatcttccgaccatttcccgctatctcacaggaaaacgctccacaattgcccctgtatgataggcctccaaaagcatttccaggtctttaatctttgtcttaagctgtttgcccacatccgtgtctcccaccagcttccggctggacacacgttttacaatggtgctctccgagtgtatgtcgctctccttctcaattgcggcctccgtggactcaaaaggctcatgggccgccagaatcaatccgtaggaattataaatcagggtatatcccgcgattccagtctctttctggtaagccctggaaaagccgccgtcaatgaccagcacctttccgccgcattttacaggattctccccgttcttggacttgaccggcacatggccgttgacaatatgtccctcctggggcggcaggccgaactcctccaggatgcggcccactgtatcctcatcctccagcatggagtaatagggattcttttcttccctgtgggtctccttgtccgccagaaaatagcgctcaaaggtagccatcttatcctttccgaacaagggcgaatcctgatggagccagatataccagcatatatccctgccttttgcccgctctgccgggtccactgccatgaacgcctttctcacataaccgtccagacactcatagaggcttttgcccttgtagttctgcccgtatatatccaccgctttaaagctgccgtccctgtttaaggggatgcagccgtgatacagcaggtttccgttgtataccttgtaaaggcttccctttgccagcaggaagcgcatatgctgctgaagcttttcacagttctgaaatgcggccgcaaggcgttccatgatggcgttctcctccgccgtaagcctgtaagggtcagccggatccatggtgggaaaatggttgtccagcatttcctgctcaccgccttccagcagtatggttcccttgtctaaatctatgcggtgcagcaggttccggtcttccaggcagaactccggatgttcctttatgatttggccctccaccttgaactggataatggatatggccttgtgcatcctgatattcagttccgtctcactggggctgcatgcattcgcccctttgagctggaagcaggcacagggatcgctcccataggtgtccagagcaaaggttgctaacggcagcagattaataccgtagccatcctccaggatatccagattaccgtatctggcacagatgcggattacatttgcaatacatcccttctgtccggcagccgcccccatccacagcacatcgtggtttccccactggatgtccagggaatggtaagtcatcagcttgtccataatcatgtggggccccggacctctgtcataaatatctcccagtatatgtaaatggtccacaataaggcgctgtatcagttcacagagagccacgataaactccccagctcttcccacccggataatggtctgtatgatggcgttgtaataggactctttgtctctcacatccaccttttccgtaatcagttcctcaatcacataggcaaactcctggggcagagcctttcgcaccttggacctggtgtatttgctggcagcccgcttgctcacctcgatcaggcggtacagggtaatcttgtaccagtcctcccggttctttacatgctccagtatctgggccatcttctccctgggataataaatcagggtggccagggtctgcttgtcctggctgctcagggtgttgccgaacacatcgttgaccttgcgccgcacggccccggatccgtttcgcagcacatgggaaaacgcctcgtactcgccgtggatatccgtgaggaaatgttcggtccccttgggcaggttaaggattgcctccagattaatcacctctgcggaagcggctgctatggttggatataattccgcaagccgttccagataccttgtctgcaaatcactcattgctttcctccctcaatacttatatgttttttactcctccctctctctgtcaacataatgcttgttttcttcgtcaatataatccaggctcaggtaatcctctgtcctggcggataaatctttctttctcagcgcgctgctcacataggtggcggtcagcctgtaaataactgcaaacaacggcaccgcgataatcattcccacgaatccgaacaggccgccgaacagcaggatggaaaacagcacccagaagctgggaagccccgtggaatcccccaggattttaggccccaggatgttgccgtcaaactgctggagcaccaggatgaagataaggaaatacaggcatttcatagggctcaccagcagtatgagaaatgcgctgggcacggctccgataaaagggccgaaaaaggggatcacgttggtcactccgataatcacgctcaccagaagcacatagggcatctttaaaaactgcatggcaaaaaagcacatgatgccaataatcagggaatccaaaagctttccggttataaaacctccaaatacagagtgggcaaaacgcacctcgctcaccagccggttggcatccttaagctttaacaggctgtagacgatcttcttgctctgggcggacaaggtatccttgatgttgagaaaatagaccatgacaatgacgccaatcagtatgttcttgacaacggtgaccacacttaagaggcccgtggaaagctcaccgatgattttagacatattgggcaccaggtccgtggtcagccagttctggaactccgtggcagcctgctcataaaagggcataatggtctgttctatggtgggattgtcctcaaacatcttcataagccagaggctcaggttattgatgttctctcccagactctcctggaggccgatgatactggtgtaaatctggggaatcaccatccagaacaatccgcagacaatggcaatgagtaacagcaggctcaccagcgtcccggccgcctttgccaggctgtctgccgtgtgtccgtccttgatgcaacgtttcagtttttctgctgtatagaccctggtcttgttatagatgggcagcatcaggtaggccagcacagccccgtagataatgggcatcagtatggatacgatttttcccacggcccttgatacaatctcaaaccgggacagaaaaaatccaaaggcaacactgcaggccaccacggccagcgcagtggtgccccagtatatataatttttaaatcttgggtttttcatacatctttactcctatgtcttaagtattccgtcatttcggcaagtcattcacccatatatcatatcataagctgaaactaacagcaattaggttttatattacagtgtgtgtcccgtgaagattttcacgaaatcttaacagagaggacaaagcaggatttttgtggtatgatattcctatctttgaaaagaggtgttgagacatgtcttatatcataaaaatggccctggacatcaaagccggttttgagcccccggcgcccatgacatcccccttagaagcctactgcgccgtcggcaccattgccagggccatgaaattaggaatgccggagagaaaggatacgctttttgagatgcgtgaccagctggatggggatatggggggcaatgagcctgaggacagccggatagccaggatacacgccatcctgaaagacttcatacgaaatgaggataccacggaccagatgatggaatatgtggcatatggatatgaaaatgaaaggtgacagaacaggccacaaagtgccggggtaatggagcttaaaagaatgcaccggccggaaagacgaataatcgagtaggaggcggtgattaaccgccgtcctctcacaccaccgtgcgtaccgttcggtacacggcggtt

SEQ ID NO: 3213 - DNA, 1548 bp, Unknown
  gut microbiota DNA sequence
cattggcaattccgttatcttcgatattggttgtctggtaagtgcagtgaggcaggatcaggggatccgagtcgcccattgcgatgctgtttccggcgaactgcagcataagaagatcgttcgtgctgtcaccgaatgcataggtgtctttgaccggaaccccaagacggtctgccagaaaccggattccggttgctttgctgagatttttctgagtcagttcccaggccttgtcttcatgtatgaaacacagaaaatgttcatctgcaaatttgcggaaagtttccatatcagaatcagcagacggaaaagccagaaacttgtcaaatgtaaaatggttgtatgtttcgggcgggtagagagccagatcttctactataacttctgctttcagcttctgaacagtttcaggaacagcacatgaactgctgtcatataaaatcttatccgggcgttcaaaaaacgcaggaattctgcattcccgcagtaattctgttgttttacggcaaagcggatttggaatagaactggaaaacaaaagctcttcattcatataaatctggctaccgcatccgcatacatagccgtcgaatcccatttctttaatgatttccggaatcattgtataggtacgtccggaattgatgaaaaggagatgaccattatagcgggcttcttttaaagcctgtttcgcactgtccggaactgtccatgggtaaggggttaacagggttttgtcaatgtcaaaaaataagagtttacgattattctccatcagatgtctcctctgtctcagtatctgtattgtcataaaattcgtcatcagaaggattttcatttcctgtatgtacgcggattccgttcagttcaacttcgccttccattgggatcacaaggcacttgcgtccgtcaattatgcgtgtttccacaagatcggcacgttcaggatctacgtggactacaacatccggggttttgatctcgaatctttttgtattggtgatgttggaagcaaccagagaggatttttccccggctgtgatctcgtattgttcatcaaatgactgtagtttttcatcttctacgccgcattcttcaaagaggcgttttacctcagatttggtcagaactacaggttccggctcatccttctgtgattcgatcaggtcgtttaatttctcgtgaatgcttaatacagtgtcatatctgcagtcgtcgcccagagtatcttcaaccagtgcgttaaaggaatcacgctgtcctcctgcagaaagaggtgctgtacatccaagcagttcatcgataaaaatatcccgaagctcgtttgcatttttactataataaaggacaccatggatgtcagtgctgcggtcgttaaactgcgggaaaaggaaagcaacatccggaagttccacgatccagtcgcggatacggtcctggatgctgttggtttcggcattgtagcaaagacctgccttagagagttttacaggacagatacagcacatgatgtgctcataaatctcatcagatgcatcaaacatttct

SEQ ID NO: 3214 - DNA, 4704 bp, Unknown
  gut microbiota DNA sequence
cggtcgagggcttatccagaaggttaagggaaaaaggtttgtaaacaatcggaattcaatatgtggttttgaaggtatgtattacctgcataattaatgcaggtttttcatataatatcttcaaaaggtacttgatgaattttttattatcatgtataataggaaatcggagagcatcagcctattcctcgatagctcagtcggtagagcacgcggctgttaaccgcgctgtcgtaggttcaagtcctactcggggagttttttaatttatatatgcaaggccccatggtcaagcggttaagacatcgccctttcacggcggtaacaggggtccgaatccccttggggtcatttataagttaatatggcgacgtagccaagcggtaaggcacgggtctgcaacacccttatcaccggtccgattccggtcgtcgcctctcagaaagaatcacgtatatgtggttctttttattttagttaaaaacaaaaagcagggagaggcaataccatgaggacaaggaagatgaaaaggtggctgtcaattttactggcaggcctggcggcagtgattcttattgcagcggcaggaggggcattcctgttccggcatgagttaaagacgttgcactcgcttaaaaaggtggatgacaatgtgctgtataccatgaagtatgatggggattatggatttgatgaatttctggagacaggggccagcagtgacagtgagctggtggaatttgtgacgaatcgtctgttaaagggaattccgctggaattttctattcctgacttaggctgctctaccttcagcgcacagacagaggacggggcccgcatattcggccggaattttgatctgacgtattcgccggccatgttcgtggtaacagagccagccaacggttatcgttccatgtcaacagtcaacctggcatttctggggtttggagaggacaagctgccggatacattgaaacgcaaaattataacgctggcagcgccctatgcccctttggacggtgtgaatgaaaaggggctggcggtggctgttctgcgcattggcgatgagcctacaaaccaggatacgggaaagacagatattaccaccaccacggctatacgtcttatgctggataaggccgccaatgtggatgaggccctggaactactggcacaatacgacatgcactcgtcggccgggagctgctaccacttccagctggcagatgcacagggcaacagtgcggtggcagagtatattgataatgaatttgaagttatcggaaaaaaaggagattaccaggctgcaacgaatttcctgctgtcagagaagaaatttaattttggaaatggacaggaccgttatgagatattggaacaggcattgggagaatgtgccggcattgttagggatgagcaggaggctatggacctgttggaagctgcgtctaaggactggcatgtgtctgagacaacaggacgtcttaatgccacacagtggtccattgtatataattgcacggaccttacagccagtgtggttaccgggaggcagtatgacaagcctgcccatgaattcagtcttaaatagcaatctattcatttgcggagagcagtctcttgactgtctttccgctgttgttttttggaaggttttcatggaatataatatctctgggaatttcccaggattccagataatcattcagctccctttttataatacggcgcagggaaactgcgtcctggccggaaggattgggcactgtgaggacaacatgggcctgcagggcattgttttgaagaataacagcggcttcctgtatctgagtcagggagttcagggcattttctatttttacagctgagacttttcttccgtgaatattatatacattgtctttacggccattaaaatacagataacctttatggtctgtatagcccatatcgccaacgctgtaaggtcccgtgattcctatggcggaatagggagtatccacatagatttcgccgttacggagggttacatccacgccgggaaagggtttgccgatacaggcaggattatcattcatttcctggtctgtcagccaggtgacatagctcagttcactggccccataatagaggaaacagcagctgttgggataggctgcttttaaaaggactatatccccgtggccaaggctctgggaaccggccaggatggtcttgatatcagggctgggatgggagatatattttgccaggagccggagcttggaggggatgagatagagggcgtccgcatggtgaagctctatttccctgcaccagacaaaaggatttacatgggaagcagtgatgatggatgcccctagtgacagaagagacagatacagattcagattgccggtgaatgccaggctgccatgagcaaagagccgtgtttgggcagtcattccaaagattgcattttgggtaggaaagaaggaggcccagctatccagggtacggaaccatagtttgggctgacccgttgaaccgctggtaagcactcccatacaggctccggcagggattccctctgttataagggattcaggaacatatttcatgtccgcaggcacaatgacaggaatatgggatgtaccgcttaacgccagaaactgtaccagctggccgtgcacagacgctgccctgatccatgctgcggaaggcacagacggttccggggtcagggaacggatacggcaggcttccctggtaagcatgccgtatgtataaaaccggccgttttcgaccagggctgtcctgtggggaggaattgactgaatcagagagagataatccgtagaatgtttcatgggaggactccttttgacgtatgacatttggggagatgatactgattaccgttccaaaagaatggcgcttccgattccgcctgcggcagccgcgcagcagatgccccggcagctttttgacagctccatggatctcataagatggagaaggataatagcgccggaagccccatagggatgtccataggccagggcgccgcccaacggattgtaacgggatgccttatccggatacgcccggttgatgagaacatcaatggcagcaaacgcctcgttgcactcaatggctcctatgtcatccattgagagtccgctgcgttctaaaagccccctgacagcaggaagcacggaggcagggctcataagagggtcagctccaaccgtacaggcattagaaaagcggaaacaggaggagagtttgtgctttttcagatactgttctgagcagagaagaaggaatgcagccccgtcattcatggtacaggcattagcagcgttgagataccggccatccttcaggacgcagggcagccggtccagcagacgctgattcaggcgggggcggattccctcgtcatgggcaagaccatatacagggacaataatgccgtcaagaaggccttcctgggctgttctgtacgcccgcctgtggctttccagcacccaggcatccatttcttctggggttatatgataatggcatatagtcttttccgcaccctgcagcatcacgtcctcacgatgcgggccgggaataaatttggcagtgctgtatgtcagggaaagctccgtcctgtgggcattgcaaatgccggcaggattaccggaaagagtatcatcatgggcggcagcagcgtatggatggttagggttatagcagcgcatgggctgggtggaactgctttcaaaacctccggcaattaccagatcagccagaccgctctgtatcctggcggcggctgttatgacggcctccagggaggaagcgcactgaaggtccactgtaaaggaaggaatggattctgaaagtcctgcttccagcgccataaggcgggtaatgttgcctcctcctcccacacagttgccgcagatcaccatatcaatctttgacggctgataccggttggtcagttcctttaacacagccgcccccagatgctcggcggggacatgccggtatgcgctgtttctgacgccgatatagctgcggagtccgcccagtatgaataccttgtccatataggtccccctaacgtgcccgctgggcgtttgacagacttatctgcaccggctttgcaatcagggcggcagcaaagcatttaaaaatgtcaaggggaataaacgggattacggcggctgtaaaggtagctgcccagtccattccggttatgaatttcatatacgcacttcccaccagatagattaccggcattcccaccagaatggtcaccaggcaataccgcttaaagctgtaatatgttccctttaaccatgacatgaggatgacagctggaatccatgacatgatatagcctcctgttgggccaaacagttttccgggaccgcccatggcgccggagaatacaggcagaccagtcagtccaagaagaatatacacgaccatggtaaatgctgcctgcctgggagtgagaagcagtgcaataaggttgacaaccagggtctgggctgtaaggctggccggtgtgaatggaagggggatgacaatataagcggaaacgcatatcaatgcagtcagcagtgccatttttgtgagttccatggtgttgaatttctggttcatgattacctccgtttttgagtttggtctgatgtgtgaatggtcatggtaaaa

SEQ ID NO: 3215 - DNA, 11359 bp, Unknown
  gut microbiota DNA sequence
cggtgttgaatttctggttcatgattacctccgtttttgagtttggactgatgtgtgaatggtcatggtaaaacaggtagcgctgcccatggttcctgttactatattgtttttttgttccagacggacagaaccgcctgtatggacaggacgcaggaaccgtatggacagagtttctgcaggtctgtgggagccgtacatttcctccagccggctgagaatccacaggccgggaatgactgcatttggcccatggtgaatcgggttggaatccccggaatcagccaggaagcgatcaagacatttctgggggaaggtcatagtcatctgacccggcatacatccagatgccatacatccagatgccatacacccagaagtggcaggggaagcagcccggctggcaggaaaagtagaggctttggccccccaggaatccctgagaaccttaatgtccaccagacagatttcaagagactggcagggccggcggcaggcatcatatgatgtagtttccaacaggacatatccccgagcagccttttggggtatggattcgcatgatacaggttccgaatggctgtggatacaataccgggcctttccaatcacccacccgtcaaaatccttttgtccccattggcaggcagcttgtatgagctttatcatattggatacctctctgaaatctgtcattatattttacttattatagagagtcagcggctgattgtcaacataaaatagaattttggttaacaattaaaaagtatcattggcaggcacctgctggaaggtattcattgccacatgttcgctaatggcatgaggctgcaattagcgcggtggaaacagagacagaattgacaatactgggaatcaatgacatagaaagcccctttccatatcctttccgatatggtaagataggtaagtaaattgagattgtataatgacaggatgaaaagatgaattacattgtttttgatttggaatggaaccaaagtcccaatgggaaggaagattcggtggagcatcttccctttgaaatcatagaaatcggagcagtgaagctgaacgggaattttgaacagacaggaacgttccacaagctgatccggcccaaggtttataaaaagatgcattttaagatatcggaagtaacacacatggatatggcggagctgcgtcaggagggagaaccctttgatgtagttatgaaccgtttccttgcctggtgcggggaagaggagtactgcttctgcacctggggctccatggatttgaccgagcttcagaggaatatggcttatcataaacttccaaacccatttcccaggccccttctatatctggatatccagaagctttactgccttcagtacggggacggaaaaaacaaggtatcccttgatatggcggtacagattcagggaatggaggaggagaggccttttcacagggcgctggacgatgcctattataccggccgcatcctttcggttctggacatggagacgtttggaacctatgtgtcggtggattattacggacttcccaggaataaggctgaggaataccggctgcattttccggaatactccaagtatgtgtccagagaatttgactccagggaagatatccttaaagataaggatataacagatatgaaatgcgtgaaatgcagcaggatgctgcgcaagaagatcaggtggtttccctatggacagagattttatttctgtctggccgtatgtcctgagcatggatatgtgaaagggaaaataagggtaaaaaagtcagaggatgaccgcctttatgctgtgaagacagcaaaaatggcggatgcccaggatgtggagcttctggcccaaaagaaggaggacggccggaaaaagcgcagtgccaaggcccaccataaggctgcctccaaatccctgaaggggaaaagcaaacagaaccagccggataaggtgtcatagaaagaaacggagcaaatacctggctgcacttacaatctcccggtccctcaagtttgagagaccgggagatttttgtctgattatgccagatgtttcacgctggagcgttccaccagctttcccgtaatctgggtcttcatgggcatgaaccggggatcctctatgagctgcatcagctggatgacggactgcttacccattatctttctctgtacatgaatggtggtcagggtgggagagcttatggaggaatagggaatatcgtcaaagccaatcagggatacgtcattgggaattttgtatcccttttccttcagagccttcatggcgcccagggcaatggtgtcgttttccgcaaaaaaacaggagggaagcaccgggttctgatccagtattctgaaaaaatcgtcatgggcacccagcatggtgggttttacacgaaactcatttttagagtcaaactgaaaattcaattcttttacatatctgagaaaggctatgtgccgttcattaaagttttctgccccggtggtactgcccaggtagcccaattcggtatgtccgcattctttgcagtactggagggcgatgtggacattttcggcattgttcatgcatacactgctacagtaatggttggggacggtgttgtccaccaccacaaaggggatgggaatggaatcaagggctgaaaattcatcccgcattacctcggttgcaatgaggaacatcccgcagtatttgctgtaatcaatggaatcaagggctgactttaaaccggttttgaccacggtcatggtcatacccagctgctccgcgcggagctgttcctcgatggaatcaataatcatggagatgaatccctgattttcctccaccagcataccgcttttatagtattttaccaggagcacgttcttgccgcttttgggcttacgggcaggaggcatgtactggcaggcttttaccgcatccaacaccttctttcgtgtatcctcactgactcccttttttccgtttaacacaatggaaatggttgcgggtgaaacgccaatctgcttggccagctctctgacggtcatatgaaatctctctttccggattgcagacgttaaattaaacataattgaacaatccatgtgttttactaatcatactataatttgaattataacacagggttgaaactgggtcaattcaatatataaaattgaatgtttactaaacaaaaataaatacaaaaacggctaaaatagggtcgtttattgatttgaacaattaaaatgcacaataaaaacaataatttatggaaaattataacaaaaacaccaaagacatattgacattgaagaaaaatcgttgtactatttagttaacacaaagaacgaggcacacatattgtttagtaaacaatatcaataacaaaaaggaggaaagagtaaatgagaaaaatgaaaaaagttgtcagcgtaattgcagcggctgctatggcagcatccttgctggcaggctgcggaggctcgggaggttcatccaccacggcagcagagactaaggcggcagaaaccaccgcagcagcggcggagaccacggcagcagaggcagcggcagataccacagcggcgccggctgcagcagagaatccggtggcaggtaagaaggtggcctatatcatgcttctgccttccgcaactattttccagatgtggaaagattcctgtgcatctctttgcgatgccctggatgtaaagtttgatttcttcttctgtgacggtgacttcaacaagtggcaggataccatccgtacctgcgcatccgcaggatatgacggactgctggtcagccacggcaatcaggacggttcctatgtatttcttaaggaaatcacagagcagtatccggatatgaagattgttacctttgacacacagttctactccgacggagagtatcagaagcttccgggcgttacccagatgttccagcaggataagtccctggttaccgttcttttggaccagatgattgaaaagtatggagaaggtgtccgtctgattaaggtttggagaggtcctaactacaacagcccatttgaccgccgcgaggttggctggcaggagtatgaggcagccggtaagatcgtgactgtaggcgaggtacagcctcttcaggattctgttgactcggcaaacacagtgactgctgcatatctgcagggcgtgaacagagcggatgtggacggcgtcattgcatactatgacttatacggccagggcgtttacaacgcaattgctgagaatgacaactttaacggcaagaacggcgacgcgcttcccatggcatctgttgatattgacccggttgacgtgaccaacatgcagacccgtcctgacatctggaccgcagcaggaacaaccgactggaccatgaacggcgagattggtatgcgtatcctgatgctggagctggcagaccagtatgataagatttttgaccctgcaaccggcgagagcggcgtggatgtagttgaagttcccggcactgcaatcaaggcggatgcgcttaagtcagattccaccgttgagaatctgggcaatattgccggcgagacttacggaaatctggattatctgtctgctgcagactggatgccaaaggatttgattcacaaataagcggccagtaaaaaacgaggtttttttagaacacaaaaccacaggcaatcgtttttttgggaagcgcgggttttggcctgcgtttcccttttttaaaaagattgtatcgctgaaaagagggactccatggataggattaaattagagacgaaacatgtttccattgaatttccgggcgtcaaagcacttgatgacattaattttgaggtgaccaccggtgaaatccgggcagtcgtgggcgccaacggagcggggaaatcaactttgatgaaggtgctggcaggggcaaactccacttataccggagaagtgctgctgaatggaaaaaaggtggaggtaaggacaccggtggatgccaagaaacttggaatccagattgtgtatcaggaagtggatatggcgctgtatcccaccttatcagttgcggagaacattgtacaaaacgatatggtcatgggaaagagcggctatattgtaaactggaaaaaagcatacaagcaggggcgcgaggccctggaccggctgcatatcggccgcgaccaggtggatgaacacgaactggttcagaacctgtccctggcccagaaacagatggtgcttatagcaaaggccatccggtcggaatgtaatttcctgattcttgacgagccgaccgcgccattaagcaataccgagacagaggaactgttccggattgttaagcatttgcatgaaacggaaaatattgcgattctttttatttcccaccggttaaatgaaatcctggaggtctgcgagaattatacggtgatgcgaaacggcaaaatgattgacaccacaccggttacaggggagactaccactaaggaaatcgtggagaagatgctggggcgcaagttcgaagagaacttcccaaaggaagcctgccagattggagatgtgctgtttcagacagaacacttatccggcgcaggcggcaaggtaaaggacgtgtccatacaggtgaaaaagggcgaagtggtaggaatcgccggactggtgggagccggaaaatccgagctttgcaagaccatcttcggtgcatataaaaagacaggcgggaaagtccttctgaagaacagggagttaaagatagcaaatccctccggggcagtaaagaacaggatggctctggtaccggaggaacggagaaaggaaggcgttctggtaaatgagaatgtaagctttaatttatcggcggcctgtctttcacggttctgcacaggaccttttatccgcaggcggaaagtggacgacaatgcgaagcggtttgtaaaggaccttgggatttccacgccgagcgtgaggcagcaggtcaagaatctttccggcggcaaccagcaaaaggtagccgtgggaaaatggcttgcggcggactgcgatgtatacatatttgacgaacccacaaagggagtggatgtgggtgcaaagcaggacattttccatttgatcaatgaaattgcgaaacagggaaactgtgttatctatgcttcctgtgaaaactcggagctgctgtctttgacagaccgcatgtatgtcatgtacaacggtacggtcatggcagagctggaaaccgctaataccacggaggacgaaatcatgtactactcggttggcgggaaagacaataagaacgggaaataatagacaggagggatacggtagcgatgaaaagtcgtacaaatattaagaggtttttagtggattgggctgcggtcctggcattgatggtttgctttgttgcatttacagcctataagggcaattcctttatgtcaacaagcaatatggtgaatattctcagggcaatggccattaatacggtgtttggtatagcggccaccatcaccatggcgccggatggttttgacatgtcggccggaacactggccagctgttccgcgtatgtgtttgtgtctgcatatctctggctgggacagtcattaggaatgtcaattcttatctgtattctggctactctggttatgtaccagctgaccatgttcctgattcttgtgtgcaagattccggatatgcttgccacctgcgccctgatgtttgtccatcagggaatcggacagtggtatataggcggaggcgctgtctccaccggcatgaagacttcctggggagcggctcctgcacgtaccgcgctttcagaatcattttcagccatcggacgcgctccgtggatcattattatcatgctgggctgtgtgcttgtggcctatcttttccttaactttaccaagcatggccggtatctctacgctatgggcggcaataaggaagctgcaaagctgtctggtattgatgtaaagaaataccgctatctggccggtatgattacagcagtgttcatcgccatcggcggtattctggtggcatccaggggaagctcggcccaggttatgtgctgcgataactatttgatgccgtcactggcagctgttttcgtgggacgtaccgtgggcggcgctgagaagcccaatgcactgggaaccatgataggcgccatgctggtttccacactggagaacggacttaccatctgcgcggttccgttctatgttctgccggcagtaaagggtgctgtcctggcacttgcgcttattgcagcttatgcgtctaaaaaagaagattaatcaggaggttactacatatgtcaagatttgatcattattttcagatgaacgtgggggatgtcattgagtatacactggagaagacaacagaaattccctgggaccgcgattccatggaggcagtggttcctccttcccatggcaacctgaactatgtataccgtgtatgggacggcaagggccattccatctacatcaaacaggccggatccgaggccaggatatccaaggatataaaaccatccagggacagaaaccgcctggagtccgaaatccttatgctggaggaccagtatgcgccgggaatggtgcctcatgtgtatttctttgacaccgttatgtgcgcctgcggtatggaggactgctctgattatgctgtcatgcgtgacgccatgttaaagcatgagaccttccccgggtttgctgaggacgtatccacctttatggtcaacaccctgcttttgagcagcgatgtggtcatggaccacaaggagaagaaggagctggtgaaaaaattcatctcgccggacctgtgtgatatcacggaaaaacttgtgctcatggaaccttatatggatttgtataacaggaacaatgtatatgcgcctaaccgggattttgtgaagaaggagctctatgaggacgaggcgctccacctggaggtgagcaagcttaaatttcgttttatgacagacgcccaggcccttctgcacggcgatctccacacgggctccatctttatacgccaggattcaacaaagatatttgactgtgaattcggaacctatgcgcctatgggttatgatgtgggaaatgtggtggctaaccttatattcgcatatgacaacggcctttccacggacgacggaccgttctgcgactggtgtcttaagaccattgaagagacagtggacctctttatagagaagtttggcaggaaatatgacgaggcagtgacagagccaatggctaaggtaaagggttttaaggagtggtattttgacggaatccttaaggataccgccggttatgcaggtacagagctgcaccgcaggaccgtgggcatggccaatgtggtggatgtgaccaccatccaggatgaaaagaaacgtctccttgcggagcgcatcaatatactggcaggcaaggaatatatcatgaaccagggagccttccggaccggcgccgattacgttgcggcggtgttaagggcaaaggaagcagcccaaaagaccctttaggcacggttgggatataaaaagggattatacaggtttagtagagaaggaggcataaaaaccatgacggtagaggaattttttgaccaggtaatcacggtcagaatgagagaggacagaagctcgctggacatcatagaccagacgcttcttccgggtactattaagcgcattcatctgaatacgaaagaggaaatatgggaggcaatcaagaagctgagagtgcgcggcgctcctgcaatcggcgctgcggctgcctatggaattgccctgctggcatcgggcattgccgaggaccagtatgacgcgttctacagccggtttaaggaattaaaggattatctggcttcgtccaggccaacggctgtcaatctgttctgggcgttaaaccgtatggaggcggctgtgattgccaacaaggaaaggggcgtggctgcaatcaaggagctgctctttgaggaggcggataggattcgcgaggaggatatccaaatcagccgcggtatcggggagattggctttggactgctgaaagagcttaaaaaggaggggaaggagatcggtattctgacccactgcaatgcaggaacgctggccacggccaagtacgggacagctacagcgcccatgtatattgccctggaaaagggatgggcgggaacagatatgcatgtttactgtgatgagacaaggccgcttctccagggcgcccgcctcacctccttcgagctgtacaatgccggcatcaccaccaccctgcagtgcgacaacatggcgtccatactgatgaaatcaggaaaaattgacattatctttgtgggctgcgaccgggtggccagaaacggcgatgccgccaataagataggaaccagcggtgtggccattctggcaaagcactatggaatcccattctatgtgtgcgcgccgacctctaccattgatatggatacactgacaggcgatcagattcccattgagatgcgaagcccggatgaggtgaccgagatgtggtataaggagcgcatggctccggaaggaatcaatgtatacaatcctgcctttgacgtgaccgaccactccctgattacgggcatcattacggagaaggggatgtgccgcgcgccatatgacaaggcgtttgaagccttgggaatagggaggtaagcatatgctgagtggagtacctgcaagcatttcgcctgagctgctgaaggttctgcatgagatggggcacggggataccctggttatcggggatgccaattttccggctgcatccattgcggcagagaagaatcatattaatatccggtgcgacgggcaccgggccacagacatgctggacgccatcctgcagctgatgcctttggacggctttgtggagaaacccgttaccatcatggataaaatggaaatgcaccgtgaccttaagtgccctgtttgggacgagtttacggatattgtggcaaaacatgacgaacgcggcgcggatgcagtgggctttttggaccggttcgcgttctatgacgcggcaaaggatgcctatgcggtggtatccacctcagagacggcattttatgcctgcattatgatacagaaaggatgcctgtaacggcagagcggagggattttacatgcttgatatattaaaggagcaggtggttgcagttgcaaaggaggcggagcgcctgggcatgtgcaggcacaaatcaggcaatttcagcatctatgacccggagacgggatatgtggtgataacgcccagcggtgtggccagggatgtgctggggccggaacacgtctgcgtcatggaccttagcggtaaggtgattgagagggcggcagaggtcaagccctccagcgaggccatgatgcacctgtatatttataaggaaagaaaggatatccgggcaatcgtgcatacacacgcccgctattccactgcgttttccatcatgaataagcctattatgcccattgtttatgagtgcgcctacctgggcaagacgggaacagttcccgtggcgccttatggacgggccggaaccgtggacctggctgagaaggtggcggaagtgatgaaggagtatgactgctgtctcatggagagccacggcgccattgcagcggataaggacatggacgcggcattcttaaaggcccagtacgtggaggaaatcgcggagatgtattatatcactctggccgccggaaacggggcagaaccacatgccctgccggtggaggaactgcagaagtgggcttatccaaaagaaatcattctttaggaggatttaggaggttctatgaagaaaataataaatgccccggaagcatatacggatgatatgctgcgcgggatctacgctgcccatccggatatggtgaaatatgtggaggatgacctccgctgctactgtacggcaaaaaagaaacagggaaaggtggcaatcattaccggcgggggcaccgggcatctgccgctgttccttggatatgtgggtgagaacctgctggacggctgcggggtcggcggtgtgttccagtcgccttcttcggaacagatttacaatgtggccaaggaagtggaggccggggcaggagtcctgttcctctatgggaattatacaggggacattatgaactttgatatggcggctgagatgctggatatggatgatatcaggactgccagcatcgtgggagcggatgatgtgctctccaataaagacgcccaggttcgccggggagtggccggaatcttcttcatgtataaatgcgcaggggccatggctgcccgg

SEQ ID NO: 3216 - DNA, 1559 bp, Unknown
  gut microbiota DNA sequence
ggccagcatcgtgggagcggatgatgtgctttccaataaggacgcccaggttcgccggggagtggccggaatcttcttcatgtataaatgcgcaggggccatggctgcccggatgggaacgctggaggaagtattggacgcggcaaaaaaggcaaaggaaaataccagaaccgttggatttgccctgacgccctgcgtcatcccggaaatcggccattccaactttaccctggcagaggacgagatggcctttggcatgggaatccacggtgagcccggagtgtggaacggcccggttaagacagcgaatgacctggcagaggaatccgtgggggagatactgggagatatgcccctgaatccgggtgaggaggtctgcctgctgattaatggcctgggagcaaccagccaggaggagctgtatattctgtcgggaagcgtgcaccgtattctggaagaaaagggaattaaggtgtaccgcacctttgtgggagaatatgccaccagtatggagatggccggagcttccatatccatctgccgcatggcagaccaggagatgaagcagtggattgacatgcctgtccatacgccgttttacacccaggtgtaaccggtaatacttatctggttggttaaggaggaaatagaatggaacggattacatgccatgaacttccggatctctttcagggtgcggcggatatcttcggggagaaaaaggaagagctctgcgagatggatgccagaatgggagacggagacctggggctgaccatgcagaaagggtttggggctttgccccagctgatacgggataatgaggcggaaggagatattggaaaaacgctcatgaaggcgggtatgaaaatggctgctctggttccgtccaccatgggaaccctgatgtccagcggaatcatggaaggcggaaaggccattggcaaaaaaggagagatggggcccggggagcttgcggattttctggccggttttgccagagggattgcgcaccgcggaaaatgccagttgggagaccgtaccatcctggatgctgtggacgccggggcaaggaaggcccaggaggcctgtgcagaaggcgctgacatgggggccatgctccgccgggcggcagagggcgcaaaggaaggcgtgaaagcaaccgaagatatgcttccgaagtatggaaaggcggctgtgttttctgccaaagccaagggcgtaccggaccagggcgctgtggcgggacagtattttctggaaggattggggagatattttctataaaaaggatctttttataaaaagaggaccgctctgtccgggcggtcctctttttgctggtctttttattttattcctcgcgcatccggtagccaaccccgatttccgtaaatatgtactggggttcagcgggattttcctccagcttccttctgatatgggccatgtttacccgcagaatctggttgtcactatccgcaaacggaccccatattttggaaataatactctcataggtcatgaccttgccggcattctgggccagcagggaaacc

SEQ ID NO: 3217 - DNA, 5086 bp, Unknown
  gut microbiota DNA sequence
tctacctcatttcccaccgcctccctgtattgatagacgcgttcagacgcattgcttattttagcggcaaagctttcaagaggcatgatttccctgcggtccgaatccacaaagggcgtcagatgccctactgctgtaaatccgcgggctttggcattcctgcatccccggatcagttcttctccggtggagccgaatacatgataatagaccctggctttatgccgtacttttccccccaacagctcatagcaagggacaccgtaatatttgccctttatgtcccacagggcaatatcaattgctgacagcgctcccatgatggcagctcccctaaagtggtaacaccggtacatatactgccagtggtgctctatcaaaagaggattctgtcctatcagataccgtttgaaggtctccaccactgcctctgaggcttctaagaaggcccatgccccggattcgcccacacccgatatgccctcatccgtatccacccgtacaaacatatattgatcaatcaaccgcgtgcttacatctgttatcttcatccttactcctcctatccttttacggaaccgctggtaagacctcccaccagatacttctgggcaaacagcgcaaacaaaaaggaaggtatgcatacaatcatggaggctgccagcacatccccctgcagcatgctgtctctggaactaaagtccgcgattaccactggcaatgttttctttgactcatcaattaacagcgtgttggccagcaggaagttattccagatgccgataaacgtcatgatgccgctggccgcaagccctggcaatgccacaggaaggaatatatgccagagtgtctggatttttgccagaccatctatctccgctgcttcaatcaggtctgacgggatggtttcaaaataggactgcatggtccatatacagataggcagttcaaatgcaatgtaacacagaatcagccctttgtatgtgttaatcaatcccatcttggacatcatcagataaataggtatgataattaagatctgcggaaacatatatacaaataataccattttgctgaatgtctctttcatccggtactcatatgccttatagctgaatgcggccaggcatgcaactgccagtgtaagaatggtggaaaccaccgtaataaaaatactgttccacaggaaacgggcaattccaaattccgtaaataccttcttcacaaaatacagggaatatgtttgaggaaggatggaaggcggaagcttggttacggtctgaggactttgcagtgccgaaaccaccagccagtatacgggaaatataattggtattacaactgccactgccagaatatgtattccaatcagtttcagaatcttgctgttttttctgttcacatgtccacccccattagccatacagcttatcctgccgctttttcagtatgaaataaattgctgcaaatattattagaatcacaaatagaatcatggttatggcagagccctctcccattctgtaactgctgaacgctctcctgtatgcataaataggagttgtctgcgtggcctcagccggtccgcctcctgtcatgacccatggcaaatcatagaaattaaatgtccatatgaatctcaggattcctgataccatgacaacaggcatcaaaagcggcaatgtgatcttacaaaaccggttccagccatttgccccgtcaatctgtcccgcttcatataagtcagaaggaatcccctgaaggcccgcaaggaacatggttataagcattggcacgccgcgccagacattggccagtataaggataaacatggctgtgtgttcattggcgatccacgctacgggttcttttaacacatgcagatctattaatatataattcatgatcccgtaaatgtcatgaaacatccacctgaatatcatggcaaccgctaccgtgggcaccagccacggcattatcaccagtcctctgaacagccccttaaaacgcaggtccggatgattcaaaaggatggcaatggccagccctaatacaacctgcggtataagtgagccaaaggtaaagataagcgaccgtcccactgcctgccagaatgaggcatcttgtaatatctttatatagtttgctatcccgacaaagttcatgaccggttttctaacgctgtagcctgtaaaactcattacaagagcatagagcatcggatataccacaattccaaatataatcagaatagccggcatataaagcaaggttccctgagtactcgtcctgtttttctttttcctgttaccagacatccggtatccacccccttttagacagagtggatattctgctgtgtctgctcagaatatccactcccaaaatgattataacagtttctccagttcgcccacaatataatccactgcctggtccgcactatacccatctgaaagcatcttaatcaggccattgcccagaatacactgggattcaaactcgccggcgcccgggaacggtccattgaccatgcctaaaccattggatgttgacagaatatcaagcgccatatccggtaccatttctttcagattgtcaggaagattttcctgatatttggtgttctggaagagatcttccttggctgggaacatggcatatggatagctgagataaaagtcaaccatgttatcacctgtaaacatatatctcacaaaatcctttgccagtcctgtattgccgtcggaagaaatactcaatccaacccatccctgtccggaacctgtcttttttcttccgggtattttaaaataagatacatcatccatgtcatcaggggcaacggactgcagtgtatagtaaatttcaggtgtgtcgattcggctcatcacagtaccgcctgccaccatttccctgacatttgtctgtgtataacccacggttccctccggcgcgcagtccttcactaatttgtagaggtagtcataggtttccaccatggcggcccggctttcatcgtccaggtcaatataccactcaccattttcatccacatttaaaaggtccacatcattggcctgcaggaaactccaaatcgttttccaggcgtggaggtctcccaaaggcagggcaaaaccatatctgtccttggatgggtctgtcacggccttacacatatcgtaatactcttcccaggttgtgggcagagtctcgataccggcctctttcagccagctgtccctgtaataagccacataaggagtgatataaagaggaacagaatataatccatcctcatacgcaccttgaactgataaggatgtacttaaaaacgcatcctttccccctatttcctccacaaggtcagatagctccagcaggcctcccgtaccagccaaggactggggataccccgttcctgtcaccataatatccggtgcgtttcctgccataatagctgatacaattttgtccatggccccgctccatggcatgactgtaatgttaatctgtgttcccggattctgttccatataagaatctgccagcttctgcagttcatcggccctctcctgctgtgtcagcatggaccacatctcaatggttcctgtcgcttcctctgcagattctgcctgggcggaatctgcattctccgcgttgttttctgatacctttacctcttgtgcatcctttgtaccggagtcagcgctctgtccgcatcctgccgcagccatcatgacggctgctcccataataacccccagtatccgtttccctttctttgtcatttttgtacctcccatcattttttattatttatcatcagaagaatacgtacagtatggacgtattctctcatattcaatctccacccctaaccccggcgcctggggaaccatgatctgccccaattcgttcagcctgataggttccggaaacatatcttttagcagtgcgtttgtattattgtcgtaatattccgcaatcaggccgttgggaacagaagctaccagatgtgcgtgtatctcctggtctccgtgaggtgccagcagcacatgggacgacatagctaaatcagctaccttcttccactctgtaatgccgcccagcacctgggcatctgcattcagcacctgggctgcatttgcctctattaactgtttaaatccccatctggtatactcattctccccaatggcaatgggtatgtccagttttctttgaagctcagcacagccctcgatatcatcgggtgataaaggctcctcaaaccagtatatgttcctgcgctccagctcccttcccattttcagagcatctatccggttatatgcattattcgcatctaccagtaaatgtatatccggcccaaccgcatcccgtaccgcgtccacgcgttccaaatcttccttaatagatacgcctcctattttcatctttacggcctttgctccccgcttcaggttttccttcatttcgctctggagcatatcccatccttttccctcttcataataaccgcctgctatgtaagccggtatccggtcggcatatcctcccatcatctggcaaacgcttctgcccgccaccttaccttttatgtcccaaagggctatgtcgatgccgctgattgcccgagtagcaagcccctttcttccatatactttaggaagatacatccgttcccaaatccgctctacgttaaagggatcctggcctatgaccctgtcttttaaactcagcattgcctttatcaccatatcagagccatggacccatccaacaccgtttaccccctcatccgttactacctcgcatattacgatttcagttgcaggatatgtatatttgccgttccgaatcggatttttgtaggcagcggaatatgcgtgaatcctgatatctgtaattatcatttcggacctcccatttattatgcattttgtatgttttactattcttattcctttttctattaacactatatcactacgctgcactttatgtcaataacttttgtaaaatttatttacaaaattattttaaataacttttacagtcaaaaatggcaattgtccctgga

SEQ ID NO: 3218 - DNA, 53112 bp, Unknown
  gut microbiota DNA sequence
taccgtatataagatgattaaggataaaaaaattcatgccattaaattaggccggtgttggaaaattcccaaaaaagaatttctccaaatgttatatgagcacttctaattacatttttctaaatacgtttcagcagtaatcccttatctgtctgaacgaattaaaactactaatgctataaaactactagctaacttttcatatatctgcctggaaataaaaagctatcccagagataccagctgatgcttcaacctctcagacacgataacatggatattgactcataaataaaattatcaccttttcatgtcaattggagtcaaattggagtcaaaagggcgtcctgccctcgcagaacgccctcgtatacgtacttatttacttaaaaatacttcttgcttccccaaagattactcttcttcaaatccagatactcattataagccttttccagtatctgcttctcattggaaaacttcagcagatggtatgcctcgtagaacttataatacccggaatccagaaagtactcttcccgctgtggtttgctgtaatagctgtcggccatcatcagataccagtgtacgtccttttccaccacatcctggggtgtgttaaaggagtattggctcttgccgatatacttgataatggatgcactgacaccggtctcctccttcacttcacggagggccgtttctttatactcttcgccagcttctactgttcccttaggcaaaacccatccctcatacttgttcttgtaattcttataaaggacgaggattttccctcgaaatataaccacaccgccgcagctcgttgcttcaatcattgcaattcctcctggtgttggtgtgaacctgatctgcgtctgtaccggacgagtcctttacagggcccgcgttcgtcccgctaattaatgtatgcagcactgcatctgttgtcccggttacgcaatcataactggtcttagtatacaacttttggaaaggatatgcaaggcttatctgctatttcagggctggcaggtattgggagacagggtttggcaaacgccggacagccatgctgataccggtatcgggccaggctttaatccaggccgttcatccctttaaatactttctccgcggttatgggaagctcccgtattctcacgcccactgcattgtaaaccgcattggcaatggccggggacggggtgttgataaccacctcgccgatggatttagcgccgaatgggccggtgggctcgaagctgctctcaaactccacctgcaccctgcccacatccagacggctgggcaccttgtactgcataaaggaattctcatggacctttccgtcctttgagtagcttacatcctcatacagggccatgccgattccctggaccagaccgccctctgtctgaacccttgccaggttttcattgagaggtgttccgcagtccacagcggcagcaaatttgattaattccacctggcctgtctccagatccacctccacctcggcggctcctgccataaagggcggcggggatatgggcgaggaatgggactgggtcacctgaagggcgtcctcattggcgcactggaccctgttcgccaggtcctttatggtgatttccttcctggtgccgtccgcctcgcaggccagcttatatacccgctttccgtcaaactccagctcatccgctccggtttccaggtatttggctgccttgtggagaattttttccttcagggcttcacatgtctttaccactgctgttccggtcagataggcagtgctggaagcataggagccggaatcatagggagatatgtccgtatcagccccaaataccacgatatcgtccagctcgcatcccaggcactcggcagccacctgggccagcgtggtgtcgcagcctgttcccatgtcggcggcaccgattatcaggttgtaaaagccgtcgtcgtttatcttaatggtggcgcctgccacatccaccccggatatggaggaaccctgcatggccatggcaagtcccacaccgcgcacctttgaaccgcttacctggcgtctggggtattttccgtcccatcctatcatgtccttaaccctggccacacagcggtccagagcgcagctgtccgctgtctcaccgtaataggccggcatcacgtccccttctttgaccatattaagttccctgaatttcaccgggtccatgcccagctctgccgccagctcgctgaccgctgattccacggcaaagattccctgggttgccccgtatccgcggtatgccccggccgacatccggttggtgtagaccacgtcataactgaaccggaacgcctcaggcgtgtggtacagcggaatggatttatggccggacaggcccactgtggtgggtccatgttccccgtatgcccctgtatttgacaatgtatatacatccatggctttcagtataccgttgtcatcgcatcccagcttcacccgtacctccatctcatggcggggtgaggacgcaatctgagactcataacggctgtaaatgattttggctggctttcctgttttccaggtcacgatggcagggtacacctctgccacaaccgtctgttttgccccgaatccccctccgattctgggcttgatgacgcgaatcctggatttgggtatatccagggcatgggccaggattcttctggtatggaacggaatctgagtggatgccaccacatttaaccttccatacacatccagatgggtgtaggcccggaaggtttccatcatggcctgctggttggccttggtgtggtacacccgctctatcacatgggtacagcctgcaaatgcctgttccagatccccatgaccctcaatgcctgaggcgcagagattgcgtctgttgtcagctcccacatcgcagagactcttccagtcctcctccgggtgcactagtatctttgcgtccttggcatcgtgcatgtccagcacaggctccaggacttcatattttacacgtatgagacgcatggcatggtccaccacagcctcatccctgcctgccacgattgccaccgcgtctccggcaaaccgcagcctgcggtccagtatgagccggtcatagggactgggctccggataggtctgccccgccatggtaaaacggctctggggcacatccttccatgtgagaatgcactcaatacccggtatcttggcggcaacgccgcagtctatctccttaaccatggcatgggcgtaagggcttctgagcacctttaccaccaggcagtcctttaatgccaggtcgtccgtaaacaccggcttgcctgtcaccagggccctggcatccttcttgatgaagggagcgcctaccacacggtaatttcttccggcatatgcaccgcctgcgctgccgcatgtgccgcatgtgctgccgcatgtaccgcatatgctgccgcatgtaccatccgtaccggcgcatgtgccgcatgtactgtcagacgtcttattatctgtatatcccatccgctcacacctcctgtttcgattccagatatttcttaactgcccgcagctgggacatatatccgctgcagcggcacaggttgccggccagatactccttgatggcctcctcatccgggtttttaagctcccgctccatggccagcacattcatgatgaaaccggggctgcagaatccgcactgctccccgccttccgctgccagaaacatgccgaattcctctgcttccttctgaagtccttccagagtggtgacatggcgcccgtctgccctgacagccaggatggaacatgacagcacaggctttccgtccagccatacggtgcacaggccgcagttggctgtctcgcagccgcgtttcacgctgtagcagcccaggcttctcactaaatccagaagaaggtcatccggctcagcctctgcctgcacattttttccatttaaccgaaactctatattcatcctttgcttacgctccttcctgtcagtctctccataaggcgtcttgtatacacagcagccagctggcggcggtactgtccgcttgccctcgtattgctgccataggtaaaggaatcagccgcctccccggcaagctgcgccagactgtcatacccgtcgtccttgattttcacgacctgggcccgtcccggcctggctcccacagccacataccagtcattgccccaccgggatacacagcaggctatgaccgggaaatccgtttccgaattcctctgggtggtataggctgcttttcttccgtctttttttataatgatgcgcaccagaatatccctgtcatcccggcgcacaggccgtttggcaaattcctccagaggcactatgcctccgtgataaagctccacatatgtatccagggccatcaggcaggtcaggatgtcggaaaatccaaagcggctgtaaatactgcctcccactgtagccaggttgcgcatctgaacgcccacgatatggcgtgtacattccttaaaaacgcctccgaaatactggtcaagcccctggtctgtctccaactggcgcagggtgcacatggcgccaatcctgaattcttccttggtttcctcgattttatcaagtcccaggccggacaggtccacgatggtacgtttggtcacactggtcatcttaagccacaccatgcctcccacaaccaggctgctgcgcttctggcatagttcatacgcctcggacagactgtccacttttacataatcctctgctcggaacacgtagattctcctctcttgtcaaatgcgtgaatacacgccctaaaataaagcaaacagggagattatatcatgaaatctccctgttttctacatataccgttattctttaaaataataaatgcatgaacaatgcgctgattggtatggccacaatggtccgctcaaagaagcagacaatcagttccttcagagatacaggtatcttcgttgacatcatgaccacgatggtctcagaaaagaagataatctgcaccatggacacggtgactaccatgtacctggcccccacggccagggtgccgaccttatcggcaatcatcagcacgggtaaaaacatttccgcgattccaaccggaagggaaggcgcaatctcagccgcattgggaacctgtaacaggacaagcaagggttcaaataatttgccaatccagttaaataccggggtataggtggcgatgagcattgctatgattcccacggccgtcagaagtgatattacctttggcagcacataacagctgtctaaaaggctggaccggatttctttcagaagattgggcgcagtggccgctttcttgaccgccctggaggctcctgtcttaagcactgccctggcaggtacacgctccgccaaaatctcttcctttgtctgctgccgtccgtcttcaaacacagacgccttgcgggacagcgggggaattctggccataaagaagctgactataagagtcaccagcagcgcaataaaataaataggcagaaaatattccgaaaggtctgctgtctctatcaccttataggcaaatcccacgctgaccgcgctgaatcccgtggcgatgagagccgcttcctttttcgtataaatccccttctgatacagcttgctggtaatcagaacccccacagaggcagaactgacaaaggacgcaatggcattgacagcacttcttccgggaatcttaaacacaggccgcataagcggctccatcaggctaccgataaaatccacgattccgtaattcagtaaaaacggcatgaacacagcactgaccggaataatccaggccacgtccgtggcaatggagtatacggtttctcctatgtcgggactgacgatggcagccggtccctcaaaggagggaaaggtgtagtgcagcatcagaatcagggcgaatatactgcccagcaggtaaaacagcggatgcagcaccgaatcctcctgataatacctgtaaacagctgaatccttgtttttgcagaaatattttccgtatacgctggccaggccgtttcccatgatgataattcctcccatccagagtcccgcaagtcccaggccggctttgatattcttatatatgatgccgaaggtgacatccgtgcttccccttacagtgaccgggacaaaaaagatgatgactgcaatcagggtgaaaatgactgcctttactatcccgcttctccactgttccctggtaagcaccagtgcatctaataccgagttgtcatttaggttcccgttcacattattgtcattttccatgccttatcctccattgcagctgccgctattttgcctttttcttcactgccaggatggacagatattcaaatacaatgttggctgccagataagcggttatctcaccgtggtcatatgcgggcaatacctccaccaggtcaaatcccacaaaattcaggtcctttatttttcttaccagatccagggcttccagggaagtaaagcctcccacctccggggtgcctgttccgggcgcataagcgggatctacgaaatcaatgtcaaaggtcaggaagcagggcttatcccccacgcgctccaaaatcgtcttaatcagggtctctaagcccatctcccttaccttgtgggccggaatcagcttcattcccagctctgccgccatcttatgctcatccgggtcatacagggagccgcgcattcccacctgaatggaatgggacgcatctatcagattttcttccaaagccctgcggaacggcgtgccatggttatatttctggccaaatacctcatcacataaatcggaatgggaatcaaagtgcaccagggcaaccggaccgtactttttcgcaaccgcgcgaagctctgccaatgtgatggaatggtcgccgcccagtacgatgggacatgcattttccttaagaatattggcaaccccttcttcaattgcctgataggtgggatgtatgtagccaggagtcacattgaaatcgcctatgtccccgccctttaacccgtccataatgtttacctgcatgattacattgttaggcttcatcatggctgagatattcctgattgcattagggccaaagcgtgagccggaacggaaggagctggcggtgtcaaagggagcccctgcaatagcgaaatccagaccttctgccgagtccaccttctgcattctcataaatgttcccatattacaaaatcttggtgatgataaggcacttgccggttgtttaatatctgtcattatataaccctccatattatttaactgtattcaatttgattcgtgcgcacttttagttttattggacttattgtcggcaattttccgttaacaaaagcataccatctggaaggccttctgtgttatattaatacttgatatgttatatggaaaatcatataattaggtagggactatataaaagctgcatatatgacagaggggttatctatggatatcaaatattttgaatatgtaattgaaatcgtggaatgcggttccatcaacaaggcggcccagaacctgcagatgctgcagccgaaccttagcgtatgcatcaagaatctggagcaggaactgggatttcccatcttccgccggcagcacagcggtatacgcctcaccaatgaaggtgaactgtttcttaaatccgccaggaagattgccacggaactggaaactatccacaacattccgtccatgttcagccacaaggacaacctttccatttcctgcacctattcatttgacttcatgaaccattttcttaaattcaagaagaaaaaaccgcccacagcctgcgaggactcatttaaggaaaccggcctgatccagaccatccgcgatgtggtggaacagcggtaccggatgtccctgttttactgctttgacacggtcagcgatacctattacgcccttgccaaaaagcataatctgaggctgattcccattgcccgcaaccgtcccctgatccttctggcatcaaaaaagaaccccctttcacgtaagaaggagattccttttgacagtataaccgattataagttcatcatgtatgaaaattttaagtttgacgaatggctgaaaattctgaactttaaaaatgacaataatatcttatatgtgttcgaccggggcggcctcatcgacgccatccgccagagccggtatgtcactgtgatgatgaaacgctttaccgatacatacagcgaggactgcgtggagatttccattgtggacgctccctttggcatggacgcctactgcctgtatcacgcctcctacaccatgaattccagggagaagcagtttatccgggaattaaaggagctgtttgcggatcatcctgccgatcggcccatatagatattcaacggctcatatagatatcaaagagctgtctggctatgggggcggccgccttccccccgctgccgccttcctccaccagaaccgtcaccaccagccgcggggactcagccggcgcaaaaccggtgaaccaggcgtgggtttcctttcctgtctcaaactccgcagaccctgtcttggctgccaccgtataagcatccgtgcgcacagccgaccctgttccctctgtgacaaccgccctcataagctccgtaagtcctgccgcctcctttgcgctcataaggcttccgtacgcggcgggcatgaactttttgatggtttcatcccctgcgctgacaacagagtccagaaaatagggcttcatcagggtgccgccgttggctatggcagccgtaatcatggcattgtgaaggggagtaatctgggtcgtcccctgtccgatggaggtctgcagaatttcccaggttccggctccgggtttcatgttgtaggcgctctccttatagggaatcccgctcaggggaagcggtccgttaaagagaaggtccccggcggtgctgttccactttcccaggtccattgtaaggcccaggctggcaaatgcgccgttgcaggaattggcaaaggccagggtgaaatcctgatggccgtgagccgtactgtgatagcacttaatccggtattccccgttctcgtacacaccgccgcagtcaaactggtaattcttataatccgcgggatgttcccgcatatattccagcgcagtcactatcttaaaagtggagccgggtgggtaaagaccctgggtggccctgtttaaaagctggccctccttattatcctgggcggtcagggcttcccagtcccccagcaggctgttggggtcgtaaccgggcttggataccatggcaagtatcttgccggtatccggctccatggcaatgaccacgcccttcctggctcccagcgcggcataggcagcctgctggagttccgtatccagggtggtgtatacatcgtcccccggattcttattgccggtcagttcatttcccacctgctccatcagattcacatgggaggtcagcagatagaaattggccagggcctcgattcctgtcttgcctttggtggaatagcccaccgcatggtcaaagatatccccgaagggatacacccttgtctcgtttcccccgccgtccatctgggtctgggccagcaccgtgccgtccgatgccagaatcctgcccctcacgatgcggtccgaaaagctgtccagccttgcgttgtaggagttgttgattacatcctcgctctttacctggaggaaatatcccagataggctgccagccccaggaacagggccaccaccacataggtgatgcccagaatgctgcggttggattttgagttgggctttggattgggctttggcccggcatccgccttcttcatcacggcatcacctcctctccggtttcttcctcatcgttacgtttcagaatgtaaagcccctggataatgccaaacagcaggaaggttcccaggatggagcttcctccgtagctgacaaagggcagcgtcactcctgtggacggtatgaatttggtcaccccgccaaccgtcaggaatacctgcacaatatactccacccccaggccaaatgcaatcagcttgtagaacacggcctgcattctggctgcaatcatcatgaactggataaaacagcccaggcagataagaagtacgcagatggcaaaaatggctcccatctcctccgacaccgctgaaaagataaaatccttctccaccaccggtatctttcccggcattccctggcagagtcccatgccaaaccatccccctgtgccgatggcaaaaagggactgggtaatctggtatcccttgttctctatatcggcccacggattgctccaggccgccaccctgcggcgcacatggtcaaacagttggtaggctgccagggcggctcctgttcccagggcgcttcccgttatcagatacacccagcttcctgtggcaacaaacagcatcagcaggtaagtgacaaagaaaatcagggcgcttcccagatcctttgacagcaccagaaccagaacatgagcgccggccacggccgttgtcaggaaaatggttttgaaatccgtggactgatagaacatggacgccacaaaaaacacaaaggtcagcttcacaaattccgacggctggatggatactcctgctatggtaagggacaactgggcgccgaagctctcgtttccagcagcccataccaccagaagaatcaggagccctgcccccgcatatacccactgaagcttataaagctgccatacccgctccatgatatagggcaccagccaggccagggccgcggatatgaccacaatggcaaactggcgcagggccttgtccaggccctttgccatggacagccgggtaagcatgataaagcccacgcataacagcatacaggcgttgtttaccagcagtctggacacattccggtacaacaggcggtacaggtaaatataacacaggaaaaagaccacctgcgccccgtaaaatgccagaagcatggcctgcattccctcgtcctctgtcttcaggaacatgaccaggtatgccagaaaatgtatggcgaacatggcccggttctgtctggcacataccctgcgcttgcgttccatatccgggaaggaaaagaagcggaaattcgcataggtatagactgccatcagcagtatcatcaggtatttggatatttctacaatcagattggtcataagcctcactccactccgcgcttaaagtgtcccctggtaaagtctctgaagggggcttccacatccctgccatatacaaaggaaccgatgaatgcatccagtaccttttctgtctgctctgttccctctaccgtaaactgaaggcggaggcgatccggcatgagccggcccaccagcttttcgctgcccagcagggacaggggcgccggattgtaaatggtattatagcagaaggaacagtgattctttaccggaagtaaggcgcctgtcctgtccttcatcataagtgttccccgtttatgggtacatcctttcaccgtattggtaatgcactgggccgataccatcatgggcgcgtttccatagataataagctcgctggccatccccaggccgcggcaggccccaagaacaggctctatctcacggctgttcagctcccagggcatggtgagcagggatgtccccatagaggccagcacctctgcggaccggctgttccagccatataccgaggcgtccatgccaaagggaagggacgtcttttgattttcctgttccataagatccttcagccatacggcctcctccagcgctctgatcaacacgccgtcaaagcctgcctggcacagcaggtggcggttcgctcccaggtacctctgggcatgggaacggaatatctgcggaagggccagccagcactgttttcccctgtcgtggcagcggtctgcaatatccctccactggtccggattaaaaccgtccgcatccagatagaccaccgatatctcaccgcgggccagcacaggagaaagctgggctgtttcttccaggaaggcggtgaggacagactgggattgcggggccgcggttttggtgggaacaggccggaattgcgctcctatgcccccttcacctgtcagcaccctggtgccggtgagctttttctccagctcctgaaagccggtgcgacgcagctcattgagggcctggaccggaaggaataaatctccttctatttgggctgtaagtgtctcgaagctaaaggggctcccgcccgtcttattcagctgttttaataccttctcccgggtcatgggctgatgttcagcagcctggggcgcctggcccagaacctgaaccttttccccgcggctctccagcgtcaggcggctgggttctccctctgccagctccacatgcccccgcaccttctccttcagttcggccaccacataggtcttatccagatattcaaagagtttctggtttccctccctgaactccggtttttccttcagcgcaaccatgccccgtccattgtgccgggcatagtagccgtctgtgaacccgcctctgtcaaagagatccaggagcattttcctgtcctcgggctccacgaaatatccgtccctcccctgctccaaataccggtccacgtacttgcggtaaatgctcaccacacccgccgtatatctggggcttttcatcctgccctctatctttagggagtacacgcctgcctctatgatatccggcaggatgtccagggtgcataaatccttcaggctcagcacgtatctctcgctgcttttattgagaggggatggacctgtccggccggaggcggccggcttttggttccggttcttttttccggtctgttctatgattcgggacctggctcctgactggccggcctgctcaggcgcgcaatgtttgtctttctgccggcttaaatctccaggctcatacactgtatagggaagacggcagggctgggcgcagcgtcccctgtttccgcttctgccgccgataaggctgctcataaggcattgccctgaatagcagtagcaaagggctccgtgtacaaagctctctatctctatgtctgtctcatcatggatccgccgtatttcctccagcgacatttccctggcggtgactacccggctgcatcccatttccttcatcatcctggccccgtatacgctggtcactgtcatctgggtgctggaatgaagctccagccccggaaaatgccggcgcatgaaagccagggctcccagatcctggacgatgacaccgtccaatcccctgtcgcagtagggacgcatgtagttttccagctcctccagctcatcttccttgaacagggtattgactgtcatatacagacggcgtccgtgcagatgcacatagtcgatggcctccaaaagccccttttcatccgggttatccgcgtaggccctggctccgaaccggctgccccccatatagaccgcgtcagctcctgctgccactgctgccttcatactgtcaaatgaccctgccggtgccagtatctctacctgtctcttctccattttgtccaacctttcctgaactgtttccctgaaataaaagatgcctcacgtatccccatgagacatccccctcgtaatcttcttatcttcttccacctttgtgggaaccggcttttctggctgcctgcagtgcttttctggcaagctcctcgtccgtcattccccctgcgggcgccgccgcaatgggttccgcagcaggcggtgccgcggttgccgctgcctgagcggaagctgccgtcattcccctgcctgcttctgacgccgggtttaacacccgcagtgacggagccggctgcttctgtgcagtctggactgccggcgtgtccggctgctgcgcggatgcgtctgcttccggtgtctgcggcacggcctccggctgggatgattcccgggcaccggaaccggaaacatattccgtccgggaggcattcagtgtgatgcccgcctccacttccacggtttcttttatctcctccactgcctgcactacggcattattttccgtatcagcggatgggttatttctgagattctgaaggttttccctggcctcctttaattcgccttccagctgggcggtccggcggttcagacgatccatctccctctggcgctcctccaagtccttaagcactgcctccagcttcatctgtgtgctgaccagctcatgctttaagctgtaggtctccttctccatatcgttcttctgacgctccattccctcgccccattccacggctttgaaataatcgtctgctatatttaactccgtcatgaccatctggtaatccgcgctctgtttagtgaatcccggtaccttcctcatggcgctgtttttctcgtttacgtagctggcagctttctggagatagctttcatcctcgctgccgcccagtgtgtatacttttccgtctattaaaacttgggtgtaattttttgtatccattctgctcccctgctttcctgctttgctggtttgtggcctgatgatttgtgtggctggtttccgcgggcctgctgatgcgccggctggtacgcggtgcgtctgccggtttcttagtgcgcggctgattccatagggcgtctgcctggtccgctgtgcgcgttcgattccgctgcgctccatctcactcacgggcttcgccctatgaaaaaagacatgggcagatttccttatgtgccagcacaacggcaatctgcccatgccttttttcgcactgctcattgcctacgtggacattataccacacccccagccttcttaacaaggcggtttctgcatttctagccccaggtggcggtaggctgtctcggtggccatgcggccccttggggtgcggttgattagaccgttcataaggaggtatggttcgtatacctcctccagggttcctgagtcttctcccagtgcagctgccagagtatctaatcccacggggccgccggagaacttttctataatcatcagcaggatattcctgtcgttctggtccagtcccagcttgtctacatccatgatgtccagggcaaaatcagttacctcccgggtaataacgccgtcatatttgacctgggcaaaatccctgacccgctttaacagccggttggccagccttggggttcccctggaacgtctggccagctccatggctccccctgcttcgatttcaacgcccaggaccctggcggagtggaggataatgattttcagttcctccggcgtatagaattccaggcgctggatcacaccaaaccggtcccttaggggcgcggtgagaagtcctgccctggtggtggctcccaccaatgtgaaatggggcaggtccagacgtatggacctggcagtggaatcctttcccagcatgatgtcaatggcaaaatcctccatggccgggtacagcacctcctccacctgacggttcagacggtgtatctcgtccacaaaaagcacatccccctcctggaggttattcaaaatggccgccatctccccgggcttttcaatggccgggccgctggtgaccttcatattggttcccatctcattggcaatgatgccggccagcgtggttttgcccagacccggcgggccgtaaaacagtacatggtccaggggctcccccctggtcttggctgcttctatatagatgttcagggtggatttaatcttctcctgccccacataatccctgagacattggggtcggagcgtggtctctatgcgctcgtcttccgccgtcacttctgttgttataatcctgcgttccatttacacctctgcatatcccaatttgacgtttgccagaatccctacaggaaggacaaatgcttcagggacgccttcagcacatcctccgaagtcattccgtccgtaacctccacctgcttcactgccctggatgcctctgtgttggtgtagccaagagctaccagtgcctggaccgcctccttggccgcttccaccaggcctgccacggatgcgcctgtatccgcggcacccatgccggccccgccggccatgttccccagcacgtcgtccatggatatcttgtccttcaaatccagaatcaggcgctgcgccgtcttgttgccaatgcccggcgcttttgccagggccttcacatcctcgctgacaatggcaaggcgcaggtcgtcgggacggagcacggagagaattcccaatgctccctttggtccgatgccgtttactcccagcagctgcctgaacatgtccctgtcctggctgtgcaggaagccatagagcgtcatggcatcctcccttacctgaaaatatgtataaaccgtcacctctttccccattcccggaagctccgggagcagggagacaggtacgtggatggccaggcccacatggcctgcctccaccacgataacgtcttcctcaatggccatgagaggcccttttacgtaagaaatcatgtattcttcctgttctttctctctctaatgtcctgcccttcatcatatcatacccatgaattcaatgcaagtctgccgaacaaatattctgttttgggccaaactccgggcatcagacacttgcgttcccggattttttagtatacactaacccataggggatatccggaactgaccgcagctcatatccggttccctctaaaaaggagtgactacacatgataaccattaaacatcctgttgatttacctgacacatatcctctggaccgcatcggcccccttaaggacctgctttttttcgatatagaaaccactggcttttccggcgacacatcccagctgtatctgatcggctgcacataccacgacggctttggctggaagctcatacagtggtttgccgactcgcgcgaatccgaaagggagcttctgacagccttcttcaccttcatggagcgctttaagatactggtacattttaacggagacggctttgatatcccctatctcctaaaatgctgccgccggctggatctgccctataattttgaccgcataaaaagcgtggatatctacaaaaaaataaagccctaccgcaagctgctgggccttgagaacatgaagcagaaatccatagaacagttcctgggccttgcccgggaagacaaatacaatggagggcagctcatagaggtttaccgtgaatacctgatgacccatgaatccttcctgtacgacctgctgattctccacaatgaggacgacttaaagggcatgccctccatactgcccatcctgagctatgcggatatgatggaagcccctttttcactggaatcccagcagcttttcacctatgacgacatggcaggaaatgcctgcccctttctcagccttacctggaaaagccgctgcgccatcccggtgcccctggcatacgacagcgccccggtgagcctggagctgaaccgggatactcttgtatgcaatattgccctctaccagggagagctcaagtacttttattccaactataaggactattactacctgcccctggaagacacggccattcataaaagcgtaggcgaatacgtggacagggatgcgcgcacaaaagccacggccaggacctgctacacaaaaaagcaggggctcttcctcccccagttcggcgctctctggtccccggctctcatgcaggaatataaagcatccctcacctacgcggaatatgaaccggaaatgctgaccccggacagcatggctgacgcctatgccaggcagattctctcctatgtgagccaggcaaaggaactttaatatcctgcaccacacaaaaaagccctgtcaaaaagacaggactcatttaaacatcattaccgtattttcctattttctgggcaaagccgcccggtaggtttctcccaccgtattgccggaataggcagcgtacatatgggtggtggtggaatcggaatggcccagcatggcctggaccgcatggatatcggcgccgccccgaatcagatgggccgcaaaggaatggcgcagggtatgaggcgttatatcggcctggataccggccttttccccgtagtacttgataatcttccagaagccctggcggctcatggccttgccgctgcaattggtgaacagccactgggattccttacccttaagcagctgtgagcgtcccttttccagatacacgctcaaagcctgcttggccggcttcccaaaaggaaccatgcgctccttctgtccatccctgcaggtgatatagcccacctgcatgttaagatccgaaagctccagcccgattagctctgacacacgtattcccgtggcgtacaacagctccagcattgccttgtcccgtatttccttggatgttgtcatgcccggctggtccagcagagcgttgacctcattcacgctcagtatcacaggggcctttttctcaatcttgggcgctttcaggagctccgccgggtccttgcggattcgtccttctttgaacatgaaattgaaaaaagccttcatggatgccagctccctggatatggtggtcgtggccttcccctctttttccaaaaaaaggatatatgaattcagactggtcttagtcaccttttcaacttctgttattcctttatcctccagaaaagacttaagctgcatcaaatctctctggtaggaaatttccgtgttcctggaggtctttttcacatccctcaggtagctcacaaagctttttatatcggacgtcatatcgctattttcccctaacccgtttctcacaaaaagtagcccaaaatcgtatgctgactatcattatatctgcatttttccataaaatcaaacacatttttcccactttgggccccattttcaggtgattaacataaaacatacaacatgttggaagggggtatttttgcatgtcaatatgttgtaaagcaatggtaaaatatttttctcacataacccctgaaaaacatcagaatcccttttctttcagtgtttttaccagctccacataaaactccgtcacatcaaatcccttgtaatcctcacgctttaaatcaatcatatcaccgtgggatatacctctgtgcttacggttggcaatggtacctttaaactcgccccacatggcggactccggtgtcaccagcccgtcatttttcccatccacagcccggatgatcaggtaaggaaaccataaaaggggatcgctgaggaaatccctcataaccgatgcgtaactctggtaataaacccccggcgcatccgccacctcttcgttgaaacagatgctggctcttgtgctgaactggtgggtggccgtgtagaagtccgggtgtgagtcaccgaacctgctgaaccacaaatcaaatacacctgcaatggcgcggtacaggccttcgggcagcctgcacgcgtagtccacgaaccggcagccccggtgaggcgtattgatggtggtcagggacgctaccataggtgccgctcccagcctggatatggcatagcgggaatccaggccgcccttggagtgggcaatgatattcaccttttcacatcccgtctccctgcatatctcctgtatttttctgtaaatatcgcctgcattgtacgcaaccgttgcaaatgcctcctggttgccgtagtagatatccgccccataccgggccagctcccttggaatcctgccccaatagttaaaataccgcaggtccctgaaccccaccccgtgaaccagaagcagcggatacctggtgctgcatatctgcgactgggcgcgtacctggcgcacggattccttgtagcaggcaaaatcatattccccgtgtacaattctcatagcatagagcagaacccccaggttaagccccggaatccacatggctaagagcatcaggatgcggtatttgagccgcagccggacagaggtgaaaaatatgcgcaggattccgttccacaacaggatgaacagcatgattgcgctgtagatgccgtttatccacagaaccctctggtcatgtacggcccggtacgccttggggtacagccataaaaggacggctgcctgggcagcgaacccatacagggcgctgtagcacagactccggccgccttccatgatggtcacccgccatgaggcaaagaaatctttttttctgggcatgatattgtaagccatccagaccagccaggtacaggccagtcccacagccagaagccctgtccgcacagccgggctaacggctccctccggcggccaaatccctcctgcccatacacaggctgccaggggtatattcactgcatatggtatgtacaaagccaggaacagccgctttaagcagattcgtcccgtttttttcttcttcacgtacatctctccttttggattcctataataacagcagaagcgtacctgcggtcagaagaaccagacctgcaaaggatttgcggtccagcctctcccccaggaatattcgggaaaacagtatggtcaccagaatgcttaacttgtcaatgggtacaacgacactggcaggcccctcctgcagggccctgtaataacacagccaggaggcccctgtggcaaatcccgaaataacgaggaaacaccagctctggggcgcgattctacccagatgcttctgctttccctgaaggaataccaggagccaggccattgccagcaccacgcaggtacggatggctgttcccaggttggattccacttcctgtattccaatttttcccaaaatagctgtaaggctggcaaatgcagccgataaaagggcagccccaagccatcttctgcttcctgtcttttccactccttggttccgcttctgaatcatcatcagggtgcctgtcccaatcagggccatgcacagaattttcatacccccaagtccttcccccagtatcagggcggccagaaacatggtcagtatggtgctggatttatcaatgggggcaaccttgttcacatccccaagctgaagggccctgaaataaaacagccaggaagcccctgtggccacgccggacagtaccagaaacagacaggttttggcgcttatggttcctatggaaccagctgaaccggtaaggaacaccataatccacgaaaacacaagaaccactgcggtacggaccgcggtggccaaatccgagtccgtatccctgacgccgattttcgataagacggcagtcaggccggcgaacacagctgaaccgaacgcatacaacagccattccatatttgcttccccttttatcctttgtatcctgtgctcccctatggaaaaagcccccacaggaagggtgaaacgaaaacctccagaaacgcccctgcgccggtgataattaacagcagaagtcccggcaggatatggagctttttctgaatctggcctgaccagcctgacagcacgtaccacaccaggagatagaccagaccatggggcaggaccgtacataaaaatgcagcgattcccaacagtcccttgcggatggtcagcacagacagaaccactgccaggctcatccctgcgtaaaaggtcaggaacccaaacagcatctggctgcacacagtaactccggccagccacccgccgcaggtctccagggccctctgcctgaatacagttatatattcctttactcccctgtttccgcttccgaaggagcccgctgctcccaggatacacccctgcaccgtgggaccgccaaatgccagcgcggctgccgtaccgcaaaaaatccctgccgtaaaacagaacagcagccagtcctcataggtgagcgtccccagacgcagccttaaccacctcattcccatgcattatcctcctgtcccagtttacaggtaagaaacatatcagctgcagcttctcccccactactgtatgacagaaatacatggtttatgacttagcccttgaccatggtgtccttcttatcctcagaacggtattttctggcataggccataatggcggcaatggtcttgccgtccgtaatctttcctgtgtatatcatgtcctccagctctcccaggctgcatggaaccacattgatcacctcatcctcatccagattctgatgggagggaatcaggttgtgggccacgaatatgtcaatggcctcatcgcagaaggcaacggttgtggtaaggctcataaggtactccaggttctccggtgattccaccctgtatcctgtctcctcctccagctcccggaacgcgcactccaccttgggctcccccggcgcatccagcttgcctgccggaatctccagggtgtagcggtccagggcattgcggtactggcgcaccataaggatttttccatcgtcggcaacaggcaggacagccgccgcaccatcgtgatggatgaaatcccacctggcctcatggccgttagccaggaccttgtcctcgtatatcttaagaatgtttccctcatatttaagctggcggtccagccgtatcaccggtatctgcgtattcttttccttatcttccatgtctgttccttcctctctgttttggtttgatattattgtcctacttcatgctctgggtcttctcatagcaggcgtccgccgccttgatgagcgcatttctcagtccgtgctcctccagggctgatacgcccgcaatggtggtgccgcccggggaacacacctcgtcctttaactgccccggatgctttcctgtctccagaatcatttttgcgctgcccaggacagtctgggctgccatggcataggcagtctttctgggaaggccgtatttgacccctccgtcagccagggcctcaataaacatgtacacaaaagcaggcgaactgccgctgacacagccaactgcgtccataagccgttcttccaccatctccacccgtccgcaggaggaaaatatgtcccgtacggtttccttttcctcctctgtgcaggagccttccctgcaggaaatgccggtcatgccttctcccagcatggcaggcgtgttgggcatggctcttaccacccgcacattcccacccaggcgctctgtgatattggaaatcgtgacgccgggagccagggatatcaccacctgctccggcgttaccacatcccttatctccgaaaacaccgcgtcaaaatactggggctttaccgccagtatcagatacttcaccgcctttgcgcattccctgttggaaccggcatggggcacctttgtcctggctgtcactgcctccatcttatcctgatgggccgctgaaaatatcatatcctccggtctgtgcgtcttgagaagcccgtttaaaatggcatttcccatgtttcccattcctataaaaccaatctttaccatcctcatacctccttgtcatgaacattcaaaccgcagcaaagccccggcagactgccttctgcagtgcgccagggctcccgggcatacatgatgcctcttcattcatcagtcgatattcctcagtatatcacaaaaatcaaaggtagcaaagtaatcctcaggagtttctgccctgcgtatcatctccacagtgccgtcctcctttaacagaagctctgctgacttcagctttccgttataattatatcccatggcgaatccgtgggcgcccgcatcgtggataaacagaagatctccctttttaatttccggaagcatgcggtcaatggcaaacttatcgttgttctcgcacagggaacctaccacatcgtacatgcgggtacagggctcatcctcccggcccatgaccgtgatgtgatggtaagcgccgtacatggccggccgcatcaggttcacggcgcaggcgtccacgcccacatactccttataagtgtgcttctcatggatggcctttgtcaccagggcgccgtaaggccccatcatgaaacgtcccagctccgtgcacagagccacatcatccataccggcgggaaccagaatctcttcatagacccttcttacgccgtcaccaattgccaggatgtcattgggctcctggtccgggcggtaggggattccgatgccgccggacagattgatgaacgcgatatggacgcctgtctcctctttcagtttaacagccagctcaaacagaatctttgccagcatgggatagtattcattggtcaccgtattgctggccaggaacgcatgtatgccgaaatgttttgcgcccttttccttcagaatcttaaatgcctggccaatctgctctgcggtcatgccgtatttggaatcgccgggattgtccatgatgtcattgctgattttaaacagaccgcccgggttaaaacggcagctgatggtctccggaatatgtcccagggtttcctccagacactggatatgagtgatatcatccaggttgatgatggctcccagcttttccgcataggcaaattcctcaggaggcgtatcgttggaggaaaacatgatgtcagaaccggaaaaaccgcatgccctggacatcataagctctgtcatggatgagcagtccgtgccgcatcccatgtctttcagtatatttaacaggaaaggattgggcgtggccttgaccgcaaaatattccttatatcccctgttccaggaaaatgcctgcttaagcctggcggcattctccctgattcccttttcatcgtaaagataaaagggcgtagggtatgtcctctcaatctcccttaattgttccagtgttacaaatggcttcttatccattatctatgtgtctcctttccctttttgcgcaaaaagcctgtcaggaagtacaatatgttcaattgtactcccgggcagacttccttgtccagtgttttttagttatgctctactcgatattaataactctcataatattggtctgggtggctgcctcatggcgtcttgcgtaggttacgactccggctgtgatgacggccagctcgccttcctccacaagacctctgttcttaagctcctccaccgagttctcaatcagttcgtccgtggactctgcgcggcgggaccataccggtaccacgccccactgaagctgcatctggcggaccgtagccatgctgggggacatgccgatgattctggcgccaggtctccatttagagagcatctgggtggtaaagcctgtaatactgggagcgatgatgacatccgcatccaggtcatgggcggttgatacagaggcaaaacacactgcattggaaacattcttcatgttctgctccgtcaccttcctctggcggtaccctgcatagtccagatgcatctctgtctccagtgcaatggaaaccatcatcttaagggcgtccacaggatacttgcccatggctgtctcaccggaaagcatcaccgcgtccgtgccgtcatacactgcattggcaacgtccgtcacctcggccctggtcggccttgggttgcggatcatggaatccagcatctgggtggctgtgataacaattttacaagcctcgttgcacttgcgtataattttcttctggatgtggggaaccttctctgccggtatctccacgcccatgtcgcctctggctaccatgatgccgtccgctgcctcgatgatggcgtccagattctcaatgccctccgcgttctcaatctttgcaataaccttcatactggaaccctgctcatccagcatggccttgatttccttaatacagtcagctgtacgtacaaaggatgccgcgatgaagtcaaagccctgcctgattccaaaacggatatcctctttgtccttatccgtcagggccggaagcttaatctttacattgggcacattgacgcccttcttctctcccagctctcctccgttgatgacctcacagacaatgtctgtatccttcacctggcgcacttccagctcaatcagtccgtcgtcaatgagaatccggttgcccgcggcaacatcctcattcagtccgctgtaattgatatagccgatggtatcgtcacctaccagctccctggtggtcagggtataggtctggccttccttcaaagtcacctttttgccgtccttaagctgtcctgtacggatctccggtcccttggtatccaagagcgctgcgaccggaatatccagctccttgcgcacttcctttaacagctccaggcgtccctgatgctcgttgtagtccccgtgtgaaaagttaaaacgggccacatccataccattcctggcaagctccatcataatgtttttgtcgctggtattggggcccatggtacagataatcttggtttttttcatgtttcttcctccataaaattgtgagagttaattgaaagttaatagtgtaacggcagattcagacatgaaagacggaatcatgatttgggggaatccgattttttcacgtgctggtgtgtatataaatgatccatgcagtactcatagctgccttcacattttgaacaatagcggaactccatgcccggactttcctcgtcggtcctgccgcagaccgcgcacttgtggtgagtgcggtttacgggccgcatggtctttaccttgaaatcctgcttgcgctttacttcctttgggctgtatttcttaaagtcctttgtcatcaggaagaaaatgatgaagttggcaagggacaggaaaatggcgattcgctggggtaagctgccgtatacgaacccgaacaccaggaaaaaggcatcaaacagcgccagccatttggccttgatggcaagtataaagtaaatataaaagtattcctccgggaacatcaccgcgtaagccaggaatatggacatactcaggtaagaggtgttaaggtgcatatcccatccccagataaagtatacaataaactcggcaagtatgatgccgatggctcccataaaaaagaacacgttaaagcggaacgctccccacaccgcctccagggaccggcccagtgaatagtacatgagcgccgcaaaaataatccagaaggggctcagtgtgggcgggtacagcaaaaatgtcaccagcctccagacctgtccgtgaaggatggcctccgcgtccagactcaggtaccgggtaaagaacatggggtccatgtacatcatgacaaaacccataacatacataatgataatgtaatacatcaggttgtgaatggcatatctgccaaaccggcgctcaagcttattaaaaaatctcatcctatcatccttttcatttgcctgtgtggctttatttaaaacaggtctttcttattaaatatatacgcaacaaacagtgacagcagaagggtcaggcccagtactatggcaaatccgtagggactgtccgcaaaaggcatgccatgagagtttacgttcatgccgtagaaactggcaatcatggttggtatggacagaacaatggtaacggtagccagaaacttcatgacaatattcaggttgttggagataaccgatgcaaacgcatccatggtgccgctcaggatgccgctgtatatattggccatctcaatggcctgcttgttctccacgattacatcctccagcaggtccgtgtcctccgggtacttctttatcttctcaatgcgcagcagcttttccagtaccacctcgttggaacgaagggaggtggtaaagtataccagcgacttctccagctccaaaagctcaatcagctcctcgttcttctgggactggtggagcttgcgctcaatgacttcactctttttatcaatgattcggaggtattgcaggaactgggtggcatttttatagagaatctgcaggataaacctggttttcatgaaggtgtggaaatccctcacccttccgtccataaaggaagtgagcacaggtgtttcctccaggcagaccgtaatcagcacatccttggtggtgatgatagccagagggatggtgacaaaccagtccttgccgttgcgctcctctatggaaggaatgtccaccagaatcagggtgtattcatcctccacctctatacgggaccgctcttcctcatccagaggcgcccgcaaatggtccgggtcaatctgataggtatctgcgatgtcaatgatttctgaggctgtagggtttgttaacgcaatccagcagccaggctgcatctcttccttttcgtgcatagcaccgtcttcggtcttaaaaatccgtatcatgcgaactctcccccattctgaaattatacgttctcattatagtgactgcccccgcttttgtcaaatgaaatagccttccattttatattataccgaatatttttcagggagaatacataaattttacctgaacagtaaaaagggaaccttagaaacatgcacaattttcgccatttcttcacgattttttaacgcctgtccccaattgtatttatacttattttatgttaaactctactatgaatgtccagcgtcttatcgccggaatttgttgcataagtcacagtattccccataaaactgtattatgatacatgtaaaacagctttacggtcccccagtactgccggacatggttttctcccatggagcggcggaacagccgtcaagttacaaaggaggtcagggtaaaaccccgcatatatgaaattacatacaaatacccttacgcttggaatcgacattggttccacaaccgtcaaagttgcactgttaaatcaggcttcccatatagtattctccgattatgaacgccattatgccaatatacaggaaactctggcgggacttttaaaaaaggcccgtgagataaccggacccattcaggtaatccctgttataaccggttccggagggctcaccctctcctcccatctggaggttccctttgtccaggaggtagtggccgtggcctctgcgcttcaggacttcgcgcctcagaccgatgtggccatcgagctgggcggtgaggacgcaaaaattatttatttcaccggaggcatcgaccagagaatgaacggaatctgtgcgggaggcaccggttcttttattgaccagatggcggccctgctccagacggacgcttccggcctcaatgattatgcagaacattataaggccatataccccattgcggcccgctgcggtgtgtttgcaaaatccgacatacagcccctgattaatgagggcgccaccagggaagacctggctgcctctattttccaggccgtggtcaatcagaccatcagcggtctggcctgcggcaagcccatccggggaaatgtggcgttcttaggcggtcccctccacttcctgcctcagcttcgggaaagcttcatccgcaccctgcgcctgacgccggagcaggttattgcgccggatcactcccacctgttcgctgctgtgggggcagccatgaatccccaggataaccaggaggctattcccctggagaccctgattcagagactgtcctcaggcattaagatggattttgaggtcaagcgcatggagcccctctttaaggaccaggaagactatgaccggttctgtgcccgccatgccagcaaccatgtaaagagcggggacctgtcctcctatgaggggtgctgctacctgggcattgacgccggttccaccaccaccaaggctgccctggtaggcgaggacggcacactgctgtaccgtttctatgacaataacaacggaagccctctggccactgccatccgggctatccgggagataaaggaacagctgcctgaaaccgcccgtattgcctactcctgttccaccggttacggcgaagccttgttaaaggcagccctgatgctggatgagggagaggtggagaccatatcccactactatgcggctgctttctttgagccggatgtggactgtattctggacatcggcggacaggatatgaagtgcatcaagattaaggacggcacagtggacagcgtacagctcaacgaggcatgctcctccggctgcggttcttttattgagacctttgccaggagcctgaactacagtgtggaggattttgccagggaagccctgtttgccaaaaatcccacggacctgggcacccgctgcacggtattcatgaattccaatgtaaagcaggcccagaaggaaggagccaccgtggccgacatttccgcgggtctggcttattccgttattaagaacgcattatttaaagtaattaagataacaaatgcttccgacctcggagaacacgtggtagtccagggaggcactttctacaacgatgccgtgctcagaagctttgaaaaaatatcaggatgcccggcagtacgcccggacatcgcaggcatcatgggcgcctttggcgctgccctcattgccagggaacgctatcacatggccagtgaaccggagacctccatgctctcccttgaaaagatcatcggccttaagtacagcacctccatgacccgctgcaagggctgcaacaaccactgtgtgctgaccatcaaccagtttggaagcggacgccgctttatctcaggcaaccgctgcgagaggggtcttggccttgaaaaggccaagaaagagattcccaacctgtttgattacaagtaccaccggatgtttgactacgaatccctgcccatggaccaggcggaccgcggtacggtaggcattcccagggtgctcaacatgtatgaaaacttccccttctgggctgtgttctttaagaagctgcgctaccatgtggtgctgtctccccagtccaccaggcagctctatgagctgggaatcgaatccatccccagcgaatccgagtgttatcctgccaagctggtacacggacatgtgacctggctcattaagcagggcgtaaagttcatcttctacccctgcatcccctatgagcgcaatgaaagcccggacgcaggcaaccactacaactgccccatggtcacctcctatgcggaaaacattaaaaataacgtggaggcgctggccgaggaaaacgtgcgttttatgaatccctttatggcatttaccaacgaggagattctcaccgattcccttgtaaaggaattttccaggacattccagattccggctgccgaagtcaggatggctgcccatgccgcctggcaggagctgactgcctcccgcgatgatttgatgaaaaaaggcgaggagactctggcctggctgaaggaacacggaaagaggggcatagtcctggccggcaggccctatcatgtggaccctgagattcaccacggtataccggagctgattacctcttatggatttgccgtcctcaccgaggattccatatcccatctgggcagggtggaacggcctctggtggtgacggaccagtggatgtaccactcccgcctttacgctgctgccagctttgtaaagacccaggataatctggatctgattcagctcaattcctttggctgcgggctggatgcagtgaccacggaccaggttgccgatatcctgacccattccggcaagatttatacggtgttaaagattgacgaggtcaataacctgggagctgccagaatacgtatccgctccctcatcgcagccttaaaggtaagggaccagagacattttgagcgcagggtggtgtccagcgcctatcaccgggtggtgttcaccaaggagatgaagaaggattacacccttctctgcccccagatgtcgcccattcattttgaccttctggagccggctatccgctcctttggatataagattgaggtattgcagaaccacaaccgaaacgcagtggacgtgggactccaatatgtaaataacgacgcctgctacccgtccctcattgtcatcggacaaatcatggacgccctgctgtcaggcaaatatgacctggaccacacggctgtcctcatgagccagaccggcggcggctgccgcgcatccaactacatcggcttcattcgcagggccctggaaaaggcgggaatgccccagataccggtcatctccgtcaacgccaacggcatggagacaaatcccggcttcaccttcaccgtgcctctgctgacaaaagccatgcaggccattgtgtacggggatatcttcatgcgggttctctatgccacccggccctatgaggcagaaccaggcagtgccaatgcccttcacatgaaatggaaggcccgctgcattgcctccctgtccaagaaaaacgcggccatgatagaattcggacgcaatataaaggggattatccgggattttgacgctctcccaaggctggatgtaaagaagccaaaggtgggcattgtaggggaaatcctggtgaaattctcacctctggccaacaaccacattgtggagctgctggaatccgagggtgccgaggcagtgatgccggatttgatggatttcctgctgtattccttctacaacagcaactttaaggccgagcacctgggctccaaaaaatccaccgccagactgtgcaacgcaggcattgccttgttggagtatttccgcaggacagccaggaaggaactgacggccagtatgcattttacgcccccgtcagccatcaacgagctggcccagatggccaaaggcttcgtatccctgggcaaccagaccggcgagggatggttcctgaccggcgaaatgctggagctgattcacagcggcgtaaacaacatcatctgtacccagcccttcggatgcctgcccaaccacatcgtcggcaaaggtgtcatcaaggaactgcgccggaattaccccctgtccaatatcattgccgtggactacgaccctggcgccagcgaagtgaaccagttaaacagaatcaagctcatgctggccacagcccagaagaacctgaaaacagagagttcccgggaggaccgcggaaacggaaggcgccccgtggctgcctacagcccctgcctgggaaccatgtcgcatacataaaacggtgtacggaaactacaagctgtatccctccatatacggaataatgtatataatcaaactataacaaaacccctccgtccaataaggttatcaactgattgatacttattggcggaggggttttgtttattgctttttaatatatatcctgcgtcttactccggaaacagaggcacaatccgttttgcggtcacctgcaccagccccatatccgacatcttggcatcaggtataaccggaagggcaagggttacaatgcggagcaaaggattttccatattggtaaggcccagggccctgttggcatccttcatcacagcgctgtcctctgccagctcctctgcgggcttaagggacataaggcctgccagcggcaaagccaatgtgtgaagaatctttccctccttcacggcgcacataccgccgcctgtgcgcgccagctcctctgccgccataagggcttcctccgggttgtcgtacacaatggtaagattgtggctgtcatgggataccgtggatgccagggcgcctgtctttgtgccaaagcccctgaccagacccagggctatgttgtcattgccctcatagcggttgaccactgccacaaatttcaggtcctggtccccgcttatatctattctgccgtcctttacccaaacctcctcgcacacgatatccgtggtggagagattcatgtcatagtatttcatcagattgacctttacttttccctgggatacaggcggatggatggtaaagtcctccgcggccagcttccttacgtggactgagttggctgactccagaggataggatttgtcctcaatttctgccagcagcctgccctcctgtgccaccagcttacctgcgtagaacacatggctgggcgtcagctccctcaaatcatctaccagaagcatatcggccgcatatcccggcgccacagcgcccaggttctgcaatcccgcctccctggcggaattcagggtggcgctcttgatggctgccaccggctccatgccgtatcttatggctgccctgaccacatcattgatgtggccgttgtgaaggatatcatcggcctctctgtcatcggtgcagagacagaagttgtcaaagaaacggaaatccttaactccgctccatatggcctccacattcttggtgatggagctgtccctggcatccacccgcatgccgcttctcatcttctccagggcttcctccgccgtcctggattcgtggcaggtgttaggaccgccgcacagataggcggacagcatccttccctccacaaagggggcgtggccctggaggtacaagccgtgctcctcagctgttctgataatatccatcatgcggtcgccgccatgaatcacatccagataatccatgacttccgccagccccaccacccgctccagcttagccagctcctctatctgggccggcccaaactcggcgcctgcatgctccagtccgggcacagccggcacgcagctgggtatgtcaatcagctggcgcatgggaaggccctccgaagcctcatgcatataccgaactccctcaatgccccatacatttccaatctcatggggatctgtgatgaccgtggtggttcccttgggaatcaccgcctttgcaaaattcctgggtgtcatcatggaactctcaatatgctcatgggcgtctatcagacccggaatcaggtattttccctgtccgtccaccacttctttcgcaaactgttcctcccggcccggctccttatactccacatggctaatgaagccgtcatatacataaacgctggccgggtaaatttccccggtaatcacattgaccagctgtacattctttatggccaaatcactttttatctctcccagagctgccctgagaagtgctcttttatctcttggctgtatcttcatctctatctttcccttctttcaactatcattttgtctgcaattctactatttaaacacaaaatacatgaccagcggaacagccagcacgtacatgaccggatgcagctccttaaacttacccgtggcagtcttgatgatgatatatgccagaatgcctgccgcgattcccgccgcaatgcttccgcagaaaataacaaacataatcatgacaaaggggccgaaggcttccgtgaaatcgctgaaatcaatgttcctgatgcctgataccatcaaaaatcccacaaagataagggcagggccagtggctgcgtccggtatcatcagaatcaggggcgaaaagaacaccatgacagcaaagagaacggctaccacaatactggtcaggccggttctgccgcccgcctccacgcctgatgtggattccacaaaggtggtgatggtggtattgccggtacaggctcccacacaggtgccgatggcatctaccaggaagggtttctggattcccggcatgtttccgtcctcatccagcatgcctgccttgccggccactcccagcacagttcccagcgtggagaaaaagtccccgcaaaaggcaatgaatacgtatatgatggcctggaaggacaacagtcctttgaaatcaaagcagaatacaatatttccccaggatgaaacatccggtatcttggcaaaggtatccggcagggtggtcacacccagaggaattcccatcacagtgacagcaacaattccgatgaggatggccccgtttaccctgtatgccgtcagaacggcaatgataaccagacccagcagggcgataaatacagccggttccttgaaattccccattccgattccatttgtaaaggttccgatgcccgaattcttaaagcccaggtaggcaatgtagaaaccgattgccgacccaatggccacctttatgtttttgggtatggccttgacaatcaaatcccttaccccgaatatggtcagaaccacaaaaatcaggccggaaatcagggttatggccatgatggcgccaaaggacagggtgttggactggagcagggagccgaacatgaaattcgttcccatacccgttgccagcgcaaagggcaggttggcgtaaaagcccataagcagggtaataagcgcgctgatgacagcacatgtaaccgcaattgcctccttggtgataaccagcccgtttatatctgtaaaggataccgcatccccgaaaccaatgatggcgccgggctgcaccaccagcacataggccatggtcatgaacgtggtaatacctgccagaacctctatcttgacactggttcccctttcttttaacttaaaaaattcttctaatttttccatagcaatctcctttgtcagtcaatcttatctgaaacgcctgccgtctcaagcagaagccccagcagcaccccggccccgcgggcgcagtcctccctggaagtaaactcctccttcctgtgggacactcctccctctgacggcacgaaaatcatggcagtggggcacacatccttaaaattcatacagtcatggcctgccccgctcatcagttccataaaagaatacccctctgaccggcagatattctttatggcttcccggagaggttcatgacagcggcatggtggaagcgcctggtcaggccttaggctcacctccacgccgtggagtgaggacagctctgccccgtaccgctccatctcctccgcgatttccctcaggtcctcctggcggatggaacgcagatccagtgaaaacaccacacgctcacagattacattccgcgctcctgggtatgctgtaatggagcccacagtggccacacatgactcccgtgcccctgccagctccgttaccctgtcaatccaccggcacatggctggaaccggatcctttctggccttcatgggcgtggcgcctgcgtgtccgctttctccccgtatctccaccgtataccgcaccagcccggctatgccgcttacaacgccaatggacgccccatggtcctccagcacctttccctgctcgatgtgaagctccagatacgtccccacgtcctccatcttacaggaagccagctggccgggcctgcacccgtaatcagccatggcctgttccagggagattccatccttatccacggacgtaagtccctcagggtccagtatgccgcagatagatttactgcccaccatcccatatccaaagcggcttccctcctcgtccttaaaggctgccaggcgtatggtccgctctgtgacggttccctgctcccggatcctgcgcactgcctccagggccgagaggattccaagagtcccgtcaaactgcccgccgcccggcacggtgtcgtaatgggatccgcacatgacgcatggcttttcaggccggctgccgcaaagctccccgatcagattgccggccgcgtcctcccttacggcaagtccggcgtctctcatcctggcttccagccagtcctgtgcctgccggtcctggggcgtaaaggccagacgggtaatgccgccgtccgggctgcgcccaatccttcccaactcctggatatccgaccacaacctgtcctggttaatatccatactcacacctcctctgctgcgcagtatgggccgtaccggaatctgtttaaaaattcagtttctagtattccacgatttcgccatacaatgctataatatcactattactcatattgttatctttgtcaatacagtttttcaggattcccgggcaggcgctctgtcatgaaccgtatggaggagctgtcagcgcatcaggacgcggaaggctgacacgctgaggctgacacacatttaaaggaggacgaacttgacaaccagaggacattccagaaagaaaagaaaacaaacaggcatcaaatggctctatataacggcggcaggactggtatgtgccgtaatccttgccgccatcctatttaaaatcaaggccggcagcatggattcccggcgtccggccgggacagacgcctcacaggagattggggctgccggagacagggcaggtgacgggacaggtgagcccccaaattctgagaaccggccggatcctgtaagtctatcggataaaaccaatgcagacaacacagataacgcagatatccgggccgtcatcagccagatgtccctggagcagaaggcggcccagctctttatcattaccccggaagcccttaccggctttaagaccgtaacccaggcaggggatgccacatacaaggcattgcaggaatacccggtgggcgggcttatctattttccccaaaacctgcaaaacccaggccagcttaaaaccatgacagccaaaacccaggaatttgcgtccggcttgaaccagcccccactgttcctctccattgacgaggaaggcggtaaggtggcccgtatcgcaaaccaccagggctttgatctgcccaaggtggataccatggctgaaataggaaagaccggggatacttccagggcatacgaggcaggttctgttatcggaggatatttggaagaatttggaattaatttggactttgcgccggatgcagacgtactgaccaacccggacaataccgttgtgctggaccgctcctttggttcggatccggttctggtaacacagatggtaaaggcctacatgaaggggctggaagaacaccatgtctatgggactcccaaacactttccgggccacggggccacagagggggacagccataagggatttgcttatacctataagacatgggacgaactggagcaggcagagctggttccctttgccggcctgattcaggacaacacgcccttcattatggcaggccatatctctctgcctcaggttacaggagacgacaccccatcctccctgtcctcccaagtgctcacagattacctgcgggagactatggggtataatggaatcatcatcaccgacgcccttaacatgggagccatacaggacaattatcccccggaccgggccgctgtcatggccctgcaggcaggcgctgacctgttgctcatgcccgctgactttaaggaagcttataacggggtactggatgcagtaaaaacaggagaattgacagaggagcgcatcgaccagtctctgacccgcattctgggcctaaaactgacccttccccgtcacaaacgctgagaatcacacctgaacatttcctcccatctatacaaggggacaggtataaatagaacaagtataatagaacaagtataatagaacaagccgccctgccttcgcaaagcggcttgtcctgccttcttctacagatcgttctcttccaaaacgttccttatccaatcagttccctgatataagcggccagcttctcatctttacattttccaaagaacagttccccgaacttttctcctgaaaacgcgcctttcaccagttcctggtccagtcccttaaagatttccaccagatcctccctgaaggaagcctttctcacatcatccagaatccgcttgtttctctgctccggaacagccctctccctgggatatccctggccggaaggctcgcagaacagcttctcaaatatatattccaggttcagatcgccgccccagccaaatcccttggcaaatggaatggcaatggcgttcccgtcgttaatctgggcaaatgtataggcgtccagcgcatcctccacatggccgcaaatcacgcccgggaatgagttgcaggccagcatggctccctcgcccgtgccgcagcctgtaatcacataatccgccgcctttgcgttcagcagggctgctgccagaattcccacctgtacataggtaagctgcgcctcatcctctgctgtgtacatgccgtagttgtccacctcaaagccgtactggtcagccactttctttaaggaattgtagatcatgccattcttggcgccctggctgttctcattaatcagtgctatcctcatgtctccacctctcaactttattcttttggtttttcctgatattgtaagcatatctcccaaaagattttctgtcaatagatatataaccaggcatcattgcttcttctgttcccgcgccattttctccatgcgccacagggtcgtcctgctgacccccagctccttcgctatatcctgttttttcttcctgggcttcaaattggcatacacaatcccggtttccggctggtccgtttccttgtccggtgtctgagtgccgggcagagggccttcctttttcctgaatatcttcagcatctgtatttccctgagtccgatttccgtggtgtcgctcagcacaatcaggcgctcgcagatattgcgcagctccctgacattgccgggccagccgtaatgggtcatcaaatccactgcctcctttgacagtctggggatgggctttcccatctcacaggcaaagcgggtcaggtagaaatccaccatttcccggatatcgtctcccctttccctgagcggcgggatagtgatgtccaacagattaagacggtaatacaggtcggcgcggaactgcccttcctggattttttcctcaatatttatattggtagcagaaataacgcgcacatccaccggctgtacccggttgctgccgatgcggcggatttcccgctcctgaagcaccctcagaagctttgcctggagcgatatgggaatctccccgatttcatccaggaaaatggtccccttatgggccagttcaaacaagcccgtcttgccgtttttagacgccccggaaaatgctcccggctcatatccaaaaagctcgctctccagaaggttttccggcagggccgcacagtttaacgccacaaagggctctgcgctgcgcctgctctcccggtggatgctgtgggcaaaaagttcttttccggttcctgtctctcccacaatcagcacattggaatccacccggctgtaacgctttgccatgagaatattctcccggatggcagggctgcttccaatgatgtcgtcaaaggaatactttgccgtaagaccctgcttcgcaaggctctgccggattttagtctctgcctcaataatctgctcggtgtagcgggcaacaatgatggcgccctttcccatcttgtccaccagcacgggcctgtattccgtatacagtttcctgtccttccactggataacctcctcccgttcccgtccggtctccaccacatccttccatttaagggcaggacagacctcctccacgggacggcccgtgtagtcagcctgggaggagagctgaaaggtacggtacgcctggttattcaatgcctgaatcagcccgctgccgctgacggcaatcagggcatcggaactggtgttgaggatggtgctggtcatcttggacctggcccgctccatattgatggtcctggccgcatccatggcctgcttcagggcctgctctatggcgatatcctttgtgtggatgtggacccggttcaatgcctctttatcgcacagtccgcacatggtaccggctcccacaaacacatcggcgccattggccctggcactgtggatggcttccagggtggaggcctcgtcatggaccgtataatacgcaatctccgcctggcacagcttttccagctcggacacagcgctctcatccatataccgcacacagagggctatcttcttgggatggaactcctgtctggcgcaaatcagggctttcagtatatcaaagctggagagctgtatctccaccacatgcttttccggaaacagatacctgaggcggtcataagtcatgcccctggccactaatatgtcggcgtccccgtaccgcgacagggattccggtgtgccgaatacgtgaagcagctccaccctcacatcgtcctgaggctccagacggctcaccgccgcctcgaacctgcttttcatattcatatatggaataaacatccgcactgttaccatgaattcacgccctctttccctctgtgtctgccccatttgcgccaatacggaaatacgccgggaggaatcaaagcattctcatgccctcttctgccgcccggcgtctgtcatgggcctgcgctgcaggctgtctgattttcctactatttatttaccacattctgtggtgctccgtctacaaaatgtttcagattatccactgcaatgtccataagtctctgtctggattccctgggagcccaggcaatatggggggtaataatcatattcttggcgcccagaagaggattgtcctcgcggataggctctgtggataccacgtccactgctgccccgctgacttttccactgtccagcgcttcccttaagtctttttccacaatcaggggacctctggaggtattgatgatttttactccatccttcatctttgcaatggaatccctgttgatgattccctctgtggatgggaacagcgggcagtgcaggctgatgacatcggcctgagccagaagctggtccagggaagcatatttgcagttatctgtctccaaagccttgttgggatactcgtcatacgccaataccttcatgcccagagcctccgcaattttggctgtgccctgtccaatccttccaaaaccgatgacgccgaatgtctttccggccagctccaccaggggatgcttccagaagcaccagtcagcattgtgggtccactcccctgcctttacacagtcagaatgctccccgatgtggtggcacagctccagcaaaagggcaattgcatactgggccactgcgtccgtaccataggttgggatgttggacacgatcacgcctgctgccttggctgccgctgtatcaatcacattgtagccagtggccagcactccgatgaactttaaattcggacactgtccgatggtctgcgcactgatcggggttttattggtataaaccgcctctgcgtccccaatccgctctgcaatcttgtcagcaggagtcctgtcatatacggttaactcccctaatctttcaagtccctcccagcttaaatcacctggattttctgtatatccgtctaacactacgattttcatgacttattcctcctttttccaattattcaattctatcctatctcatgcgccactgtcaagcacacctccggcacaatgatactgcagacgctgtttaatcctctaccagcgcccaggccctgttgatgactctcttggtgttggccagtatgatatctccgtcctcgtctgcccacggctttacctccagggacaatacatagggattttccttattaaagaagccctcttccttcaggacagtgaagaaatccacaagctgctctgtgtcgttggcgctgtcagggaacccgaaccttgggtgctggtcgccgtacgcctcaaaaccttccttcaccaccgcattaccgatgtgcaggtgggtgatatagggacgcagcgtctgaatcacgaacctggaagtctcataggtggtggggaaatgggaaaggtccaccagcaggccgaaattgttgtgggtggtgcgcatatccgcagcaaacctggccgcataaggagccggcccgatgagggctgccttatccatatcaaagtcaaacacttccagctccaccatcattcccttggttgcagcatagctgcacacagccctggtagtcttaagcagctgggcatatgcctggtcctttgtctccggttcccattttcctgccaggaaggcaattccctttgcacccatgtaccgggcctcatcaatggaatccatcaggacggcctcggccttcttcctgccttcctcgtccagatcattggggttaagctttggtcccagcaggcggggctgtgcgccgtagcacaccttcatgtggctctgggccagcatatcccttaccttgtcctttgtctcctggtcctcgatatgggttatctccagggcattaaagtattcgtcgcagcagatggtcttaacggaatccagtatgggataattcaccggaggatgggtcatccactgtatggttcctacctgaaaatatttctgaattgggtctttcataattaaatacctccttatttctgtttgcaaatcttgtttgattcaattgcattagctcaatatgtatttatatatatcaaatgcaggtacctgtcacaccagctcccatgccaggttcaacgtacgttttgcatttgctataatcacttcgggggattcatccttccagggcttcacctcaaagcttacaataggccgtttcttctcacccagaaatccgatttccataagcgtcctcagataatgggccagctcctccacatcattttcactgtccgggaatccgaatctgggatggttgtccccgtatgcctcacagtccgggcttttaattaccgtgtttcccatatgggcatgaatgatgtaatccttcaccggcaagatgctttcttcgatggtctcatgaatcatggggatatggctcaaatccaccagcaggccgaaattcccatagtccctccggatttcccctgcatagcgggcagccagggctgccggaccgatgagagccctcttgtcaatatcatagtcaaagacctcgcagcagatgggcatatttcccttctcccctgcataaccgcacagctgcctggtagatttaagaagctgttcaaaggcctgttcccttcgtccctcgtcataccggccggacaggaaggaaaaacctgcgcagcccatctcataggcttcatcaattccttccttcagtgtgtccactgccatggcccttctggtttcatccaggtcattgatgttgagtcccgcagacaaggtcctggactggccgccgtaagcagacaccatatgggccgcgcggatcatctccgccgcctttttccggacctgtccgtccttcattctggccacctccacggcttcaaaataatcatccccgcagatccgctccaggcattccaggataggtccctcgcctcctcccagctgcgggtaggatacgtggagaatgattcccaccttcataaaccttctcatggattgttccataggcgcgccttccctcctgactttttatactggtttttaacttttttgtactggttttctgcactgattttcctgtattactttttctgtacctgcttgcgcttcatcactttttcacatttttctgcgatggattccgggccatagccgtatttcaccaaaagctgttcataatccccggattctgcaaagtcagtggccccgatgcgggtcatgggtaccggcatatgctctgccaggacttccgccacagcgcttcccagtccgccgcagacagagtgttcctccacggtcacgatggcgcccgtctccctggcgcattctataatcagttcctcatcaataggtttgatggtatgcatatccaccactcttgcccggattcccttttcttccagaagctctgccgctgccagggccttgtgaagcacggttcccgtggtgatgatggttacatccccgccttccctgaccttaatgcccctgccgatctcaaatttcatatcctcaggataaaacacaggagctgccgcgcggctgagccttaaatagactggtccctgatgttctgcaatggcaaataccgctttttttgtctccactgcgtccgccactgtaatcaccgtcatattgggaatggctctcacaaatgccaggtcggtaatggcctggtggctggctccgtcataggagtccgaaagcccgcagtaggttccgcagagcttcacgttcagcttgtcataggcaatcaggctctgtataggatctgcccctctggtggtcaggaacaccgcgaatgtatttacataaggaatcagtccctccctggcaaatccggctgacatggataccatatccagctcgctgatgcccacattaaagtaacgttccggaaatgcctttccaaaaattccgctctttgtggaggaagccacatccgcctccaggcccacgatcttctcattctgttctcctaattccttaagcgctgcgccgtaggcgtcacggattgctatgttttctcccattatctggcacctcctaattctgctttcgcttgtgcgtattcattatcattgatggccttgccgtgccaggtgttctttccttccataaaggaaacccccttgcccttcacggtggcggcaagaatcagggaaggacagcctttggtcttcttagcctcctccacggcccggcagaaatcctccacatcatggccgtcgcatggtatcacattccacccaaaagccttccattttgccccgatgtctcccatgggcatgatttcctccagggtgccgtccagctgtactccgttgttgtccagaatgccgatgagatggtcagccccgaatttggaggcggacatggcagcctcccagatacagccctcctcaatctcaccgtcgcccatgaccacataggtataggaatccagtcccttaattctgtctgccatggccatgcccaggccggcggaaagtcccagccccaaaggacctgtggacagctccacacccggagttttatgtacgcagggatggccctgaagcatgctgtccatctggcgcagggtctttaactcctccttggggaaaaagcctttctccgccagcaccaggtacagcatgggggccgcgtggccttttgacagaatcaggtggtcccttccctccatctccggatcttcaggattcacattcatgatttcaaaataaagggacgtcagtatctccgtgcatgacagggatccgccgggatggccggtctggatgctgtgaagcaggtcaatcaggtcgttccggaatttgctgcattgtctctgtaactcctcttttctctcattcgtcatctctatatctcctccaattttttcttgatttcttccatacacagcctgggactggtaaggacagggcagcctgtaatggaagctgtctcgtcctccagatgggccatggacgcctgggcaaggacaatgcagtcatagcccttcattttcccggccttttccctgagaatcatgtcgtgcttcttcatgtccatggctttcatggcaaagaatgcatccatgcacacgcaggtggatatgtctgcttcccttcccgccttatccgcctcagccttaatctttgagacagtgggccccaccgtgctctctgccgtggccatgaccatgatgcgctttccgtagagaacgctccttctggccatggcatcgtcgatggcaatgacgggaacctggataaaaggccggatcagttccaccgccggggtcagggtggagcaggtggtgacaatgatatctgctcctgtcagctcctgggccttcatatcgcagaacagacggtttcggttctgtatggtaaactccccaatctcgttgggattattggccagaaaatcgtcccacaggttatgtatcttcacttcatatcccagatagtttctcaggctgtcatcaaagcccgatgccacgctctttaccgtatgaatcaacgcaatgcttttcattgtttcctcccgttttcttccatgtgtgttattcacctgttttctgcatcagacagtccgtccgtaaacccggtccgcgatgggccgcaaatgccggatggcgcccgctgccgcctcctccatggaaggaatctggaagatttcggtacagaaattgccgtcatatccgcattctttaaaggtggtgagaatcttctcaaagtccagaccgcagtggcccggataccgtctgttgttatctgccaggtgtacgtggatattgtaggagctgtacctgcggatggcctcatagatgttcttctcctccagattcagatggaaaatatccatcatcagccggaaattggggcggtccacacggtccaccatggcagccccctctgccagggtattgatgaaattcgtctgcataatagtcactgtctccagggcaatgttcacgttcctgggtgccccgtagtcagccagctcccggaaggcctccactgccaggttttcggtttcttctctggaaagttctccgcagtactggcctctcacacgtccgatgttgatattggctcccagaaagcctgcaaaatcaatgatttccctgctcctgcggatagcctccttccggatctcctccctggggtttgtatagcttaatcccagctgcccgaagatttcccctgtacataccagtataacagacaatccgttcttttcagctgtttctttcacttcattccagtccagtttttccggattcagggtcatcagctccaccccgtcgtatcccagccttcccaggtccccgaagcttttctccaggcttccctggtatgctgtcactgaatcagcgattgccacatctggtgtggccacctgataacatagtttcatctccaaacctccttcagtgctttgccttattaataagcaaaaatcgtgccaatttcaaaacacgttgaaaccgttaaaatccgttccatttgtcccaaatatttgaaacattccttactgatttgccgcatttgtttcttaatgtttcaattcgttttttatgtttcaaatttttccggcatcagtgtttcattttgttgcgttccctgcgttccttgcctgtttcagggtacaaaaagggagaggatgcggctccggttcccatatgtcccgttccggtcctctcccgtgttgattggttttctaatgcatcagccgtgtttcagccgtgtttactggattccgttggcagccatgaagtccttttcataggctgtcacatattccgttgccgtggcagcatccatatagttgccaatcagtttgttcttttccagataatcattcttccatgtatcggtctcagcaaccttgcccaactgttcactccagtaagcggccgctgcatcgctcatggctgcaggggctgccacgccgcgccacacagggacttccacattttcatagtccccgatttcgctcagtgtgggggcatctgccaggttgccggtgtatcgttccgtggacagggccagcacaggaatcagggaaccggctgtcacatactcagaagcagccgcaggcttggagataacaaattccacatggcctcccagggctgcggtgatggcgtcaccggtggagtcataggtgatataggacatcacgtccttgctgattccgatttcctccagcatagcatcataggtggcgatatcatctcccttggagccgccgatgacgatctttgtaccatttttggcagcctcgattgcctccttgaaatcagcatacttggtctgctcccccttgaaaataagctgtttgtcaaccgccataatggccaggatacggaaattggacgagcggttctttgtattctggaccatgggcattaaatcgccgctgttaaaggtgagaagggtatagtcagccttgctccccttggtggtagccacctcgtttctgccgatctcaccgcttccgtccgtcttattggtaacaatgataggctgtccgttgaccaggttttccttggtcatgatatcggatatcattcttgtgtagatgtcgctgccgccgccgggactggatgtaacggtccagttaatggtttcctttggtgtgaatgtgccgtcgctgctgacggccttgcttgtacatccggttactgctgataccatcataagtgctgccattgccattacaatacttcttttcttcattattaaatacctcctcaaaccatgttcttaaatatatgaacaaacctgcaagttacctttgttatgctactttgggaatattacgtttactgtaccagctgccgaatcattacagccctatttggatgcccttgcctttttaaggacggcctttaccacaggtgtgcagataaatgccaggaaaatcagcatcagcacgcaggtaatgggtcttgtaaagaaaatgcccaggcttccccccgatatgataaacgcctttcgcatattggactccagcagcttagccagcacaaaggacaaaagcatgggagccgtgggatagtcgttcttgaccagcagatatcccagtatgcctgacagaaacataatcagcacgccatacatggaatagctggagctgtaggatcccaccacgcacacaatggtgataatgggaatcatgtactttacaggcacggacaatatctgaatcaggaacggaatgacaccgattgccacaaccagcgcaaatatgttggagaggaacagggatgcaatcagtccccatgtaaattccggttcattggtaaacagaagcggtcccggattgagcccccacatcatcaggcctcctaaaagcactgcgccagtgccgcttcccggtatgcccagggccagaagcggcgcaaatgcacctgccgcggccgcattgtttgcagcttcgctggccgcaatgccctctatggcgccggttcccagttcttcctcgttcttgaatttcttctgggctgcgtatcccatgaaagcgccggtggttgcccctgctcccggaagcacgcccacaaaggttcccatgacgccggagcgcagggcaggcggaagcagacgcttgaaatcatgctttgtcaggatacttccgcggatggtaagcttcatgtggggctctgatttcacctcattgctgcgctccatcaccagtttaatgacctgtgaaaatcccactgtgccgataatgaagggcgtaaagggaatgcctcccagcaggtacatactgccaaaatcatatctgggagagcctgagagagtgtccattccaatgcttgccagcagaatacccagcatggttatcaccacgcccttgatgggattctcacccaccagccagctgatggacgtcatggcgataagaagcagagccgtcatctcggacgggccgaacttaaggccgatatccgccagggcaggtcctgtaaaggtcaggatgatgatgccgatggttcctccgataaaggaggccatattggctgtaaacagcgcctgtccgggacgcttctttttggatgccattgggtagccgtccatggctgtgcagatggccggtgagtctcccggaatatttaacaggattgcgctgaaggcgccgccgtacatattggagtaatacaaagctcccagcataatgatggcagtggtgggattaaacttgtaggtcagcggaagcagcagggccacaccggccagacttccgataccgggcattgcccccaccacaaggcccagaaccgctcccaaaagggcggctcccacattgctgaaggtgaacagcgtggagaagccatgcattaacagttgtatattttccattttgtttacccccttctacaagaatgcttcaaaaagccccattggaaaatggacccccagccacatgcggaacacaccgatggaaatggccatacagacagcaaggacaatgagagtttccttccatccggtcttctcaaacactttcagccacagtatcacaaacaaatagcagctgggcagcaggcctataataaaggaacccgctatgattccagctccccctgctatgaccatcatctcatcccgctcatacctggcagccttctcttccttcagggactgaaagaaagaagcaatacttgccaggaacatgacgatagccatgatggccgggaagaaaccaggctgaggaccatccacatcctcccagaaccccagctgtgtaaaaccaaccactgcaaataccactgcaaatactgctaacaccaagggtacaatctgctttgtacctatttttttcatgtaaacccctcccttttatcagcagcctttcagatgggccgccatcttggcagccatcttgaccgcattctcaaatgccgaagtcttgacaattccctttccggcaatatcgtaagccgtgccatgggcgcatgtgacgattggcgccggaagtcctcccgcaatggtgatgccctggtcaaatcccttcagcttaagggcgatctggccctggtcgtgatacatggtcaccactccgtcaaaatccccgttaaaggccttgatgaacagaatgtcggatgggaacggtccgttggcgtcaatccccatctcccttgccttttcaatggccggcgcgattacatcaatctcttccctgccgcactttccgccctcgccgcagtgaggattcagggctgccagggcaagcctgggcttctcaataccggaattcttaagggaaacattggccagtcttatggctctcatgatggtatccacggtcaggctgtcgctgaccttgctaatcggaatatggctggttgtccttgtggtccacagatctcccagcacattgatttccccaaacggctccgtgtgtccaaagagatgggccatgtaatggtgctcgctctcaaaaggacacccggcctgaatcattgcctgcttatttaacggggcaaagcagaatccgtcaatcctgccggcctggtaaagctcaatggctgttttcagcatgttcaggcaggcgcgtccgctttcaatgctgatgttggcaaacggaacctgctcagggtccacatccctttgatccaggacaggcattcccttggtccagtctgcttcctccaccttgtcaatgacctgcaccgggatttccagaccgcatatcctggcacctctctcaaacaccctgacgtcccctattaccacgggacggcagtattcatcgtaaaatctggaagctgccagcttgacaataatttccggccccacgccggctgcatctcctaataagattcctaaaatcggtttaccgctcataaaaaaatcatccttccttctattttggtttttatttctgctcttgacttatgcctgtattaaaagcaaaaagcatgccaaacttttcaggaagaacgattttttctgttttacctccgggaaccctttatttacgttatgcattttgcatatatcaccatcatttatcccccaatgtattcatacttttcacggcataaa

SEQ ID NO: 3219 - DNA, 43322 bp, Unknown
  gut microbiota DNA sequence
ccatgacctcatccttattaattatttatactccccttgagaagtccccggatagctcccctatccggggacaactctttgtaatttcgttgtatctgcttccctattttcacttccctatttttttcaattctcccttgacttcaaccgtaaaacatggtatgtttaatgggtatttttaataagattttgatttcacatatttttgtaagtcattattcctatgatgatttacaaaaatatgtgatttttatttttatcgaaaatataatattatattatggaggtatctttcatgaacaaaggtacagtaaaatggtttaactcacagaagggctacggcttcatcacaaacgaagagaacggaatggatattttcgttcatttttccggaattgcctccaatggcttcaagtctctggaagaaggccaggccgttacatttgacattacaaacagcccaagaggcttacaggcagtaaatgtttgcgctgcataatagagattgacctgacagggaccgttttccaaaaggaagcggtctcttttttatgccttggtcgttcctattttcatattaccgttatcttttagttctgccagacagcacaaaggcccgccggaatactccgacaggccctgcttatatatattgaaaatcctatcctagcacatttactatcttcaccggatttctgtaattccagttggacacggtaatgcctgtcctctccgttgaagcatgtacgatctgtccgttgccaatatacatggctacgtggttaatacttcttccgctgccgtaaaaaatcaaatctccaggctgcatctggtcagcgctaatggcgatcccctgctgggcttgtccgccggaagaacggttcatggaaattcctgctgaattctgcagtacgtatctggtaaatccggaacagtccgtccctgtacgcgggtcgctgccgccgtacttatatcttccgcctacaaactgcatggcgtaattcaccacctgctggcgcttatatgtatctgaggattcaatggcatcctgctgtacctctgccatctcactttctcctacctgctccacggtagcattaccggatacaggcagaaatccttcggattcattgacccggaccttcatccatccgtttcccatatcctccaggacttcgtatgtattccctgttttggctgtcatcagtacttcttcactgtcttggcttttgttaatgttgacgctctccgctgtaatggtggcaatgtatgtacctgctgtgaatccaggaccgattgcagccagggaagtaaatggattcatgaccatcagcatcccgcatacagctcctgcctttaaaaggctgcctaacatttttctcattgaagaaactctcccatcatggttttatactgaatgtagccggagtttatttattacataattgttacattcattacaaatgtattatatcacaattttatctcacgtcaacaattttagacatatttaatatttccttcattatttttaacattttatgtagtaattttgaattaaaaatgaatttcctccctgatacggctcccctcccggcccagatcacaaaaaaacctgctgtctcaggacagcaggcttacaatcttaactggttttctgtaattatatggggacgtcttgattcccgtcttttctgtggatgcatgcaccacttccccgtctccaatgtacagggccacatggttgatgcccccgcctccggcataaaacagcaggtcgcccggctgcatctggtcctctgtcacagacttcccgtatgaggactgtccggtggacgaatgaggaagactgatggaagcagccttgcccagcacgtatctggtaaagccggagcagtccactcccttattggggtccacaccgccgtactggtaacgtccgcccacgaactgaagggcatactccactacctgacggcgcatcttggcatcctcatctacggtttcatgcgctttttccacaaccgtggcattaccggaggtctttatgtatccttcccttccgccggtgcggatcttaacccagccctgttccgttcttcccagcacctcataagtctggcccctcataacctggccctgtctggccgaaccttcactggcacttctgtgtacgtccacagcaggcgcctctatcttcactacataggaggaccgggtctggacctctgcctgctttacagctgcctggctgtccatagggttcaccacccacagtcctgcacacaggcatataagccctgatgcctttatgattcctttccctaatccccttatgctcacgctgattctcctaacttccatctattttcctgaaaatgtaaatattacgcaaatattacgtttattaaaaacagtatattatttattcacatttttgtcaagaaaaaggagctgttttttaacagctcctgccatgtgcttctttcatatgtttctttcatatgcttttgccatatgccttggtcatatgcttttgccatatacttccgccccatcagcccaatatctgcttctgattatctcctgggtcccctgaacatccacacggccagcattaccagcagcaccggccatatataggacagaatccagccagccagtcccatgatgccgaagaacacagtcatcaccaggaatatgaccaggaataccaccagcccggcaatgagcctgacataccacttgccaaagtccacataatggacctccggttttttccccctgaacggttcccgttcttcctggctgcttcctgccggccctgaacggtaggatgcttctgattcaaaggaatcaaatccatccggcctgtcctcggtgtcaagggcagcgtccactatggtcctggcaatgattctcggacctcccaggctctctatgacctcatcctctgtctgtcccttggcagcctcctccataatataggagtcataataccgcaaattctcctgtatgacggaatagggtacccgtccttccagctcactttttagtccttgcaaaaattctgtcctgctcattactcaaccctttccttaatcgttccctctctgtaagcagctaccagctccttcaaatcggctatctgtccttttaattcttctcctttatccgtatcagccaccatcaccctgctctttactttctccaccacggatacctttggcgtgctctccttcttagggtcaaagggcctgtgctctgccagagccaggtgatgtgaattataaatcaaggtatatcccgcaatgcccgtggtgctctggtatgccttcgatagaccgccgtcaatgatgaacagcttaccgcccgccttcatgggcttctccccatcctttagcttaaccggcacatggccgttgataatgtgggagccctccacgggaagcccgaattcctccagcaggcggttgcagaattcttccttcaggctcagctggtagtaggggttcatcacttccttatatgtggatttatcctccacgaaataatgttcaaaggtagtcatcttatccttgccgaatacaggggattttgccccgcaccacagataccacatcatatccatggcctgctccttaccgggcgtcccctccggcatgaaataggcattctgaacctgctggttaaagaagtccatcagcgccttcccgccataggataccccgttcatggtgatggtatcgaaagaaccgtcctttttcataggaatacagccatggtaaaggaggttggaattataacatttataaatggccccatgggagtacaggaatcttatatgcttatgcagcagttccccatgcttgaaggaggcctgcagggtgcgcagcagctccttctcaccacggctcagctccagaggattctttgggtccacggtcgggaaattcatgtccagcatgggaaatgtttttccttcaatgaccactgtacccttctcaaagtccacgccggacaaaaggaccctgttgtccatctcatactccggatggcgcttaatcatggcgccctccactttaaactgaatcaccgcaatggccttgtgcatcttggccgccaggccggggtccactgcatcgtaaatgttctcgtccagaattttgggcatgaaccgtgtgcaggggtcgtcctggtacaccttggctgcaaacatggaaaggggccttaggttgatgccgtaaccatcctccagcacatcaaagctgttgtaactgatggcaatacgcagcacattgcagatgcaggccagatttcctgttgctgcccccatccatgaaatatcatgattcccccactgtatatccacatcgtggaagcacatgagctcattcatgataatgtccgcccttggccccctgtcgtagatgtcgcctataatatgaaggttgtcaatggtcaggttctgaatcagatggcacagggcaatgatgaacttgtccgccgtgtcattctcaatgatggagtgtataatttcgttatagtacagtttcttgttatcgtcgttgtagtccacgtgaagcagctcgtcaatgatgtaggcaaattcctgcggcatcttcttgcggacttttgagcgggtgtacttggaggacacctccttgcagctttgtaccagacggtagatggtgattttctgccaatcctcggtgtagtgcccctgtttcatcatacgggccaggttccgctccggataataaatcaggtttgccagctgtacctgctcctcctcgggaatcaggtggccgaaggtctccttgattttctcccgggtaatgccggacgaagaacgcagcaggtgtataaacgcctcatattccccgtgcaagtcgctgaaaaaatattcggttcccttgggaagactgcaaatcgctgtcagattgacaatttcactggtggcttcctttactgtggggtattcttttgccaggagcttaagatatgccaaatccctcatcatcatattcccccaatcccaattgcattttatttaaagttatagtaacatattcttaatgaaatgaaaagtttttccaactgaacaaaggtttaagattatctaaattttttctaaggagaagagatgccaatggaggaattatacgtatttggaacaggaaacgcccaggccacccgctgttataatacctgttttgccataaaggacggggatgaatatttcatggtggatgcaggaggaggaaacggcatcctgcgcatcctggaggatatggatgtggacctgtgccatatccacaacattttcgtcacccatgagcacacggaccacatcatgggtattgtgtggatggtgcgcatggtggccgctgccatgaaaaaaggaaagtatgaaggcgagctgcagatttactgccaccagggactggtggataccatctccaccatctgccgcctgacgatccagggcaagttctataagatgattggaagccgcattttcctggtgccggtggaggacggcgagacagtccatatcctggactatgacgtcaccttctttgatatactgtccaccaaggccaggcagttcggatttaccaccactctgaaaaacggccgccggttcacctgcgcaggcgatgagccgtacaacgcggagtgccgcccctacgtggaaggcagtgactggctgcttcacgaagccttctgcctgtaccgcgaccgtgatatcttcgaaccctatgaaaaacaccacagcacggtaaaagaggcctgcgagctggcaaaggagctctccatccccaaccttgtgctatggcatacggaggacaaacacctgtcggagcgcaaagccctatatacggctgagggcagggaatactatgacggcaatctgctggtgccggatgacggggaaatcatcccgctgtaaacgtgcggtgtacgccgcattcgtgtacacaggattcgtgtacggcggatttatctacggcggattacagagttatgttaagagataggaaatcaccacggttctatattgccgtggtggttttttacttacatgggcaagaatagtcgagaactcctttttccggttctgtataatgataaacgtcggaggtgatacagatgaaagaacagatagaagcagtccaaagaatgcaggattatatagagagccactggcaggagtccattactctggctgatttatcgaaggcctcccatttttctccctggtattctgccaggctgttcaggaagctgaccggtctttcgccggctgactacatccggcgttacaaactgtcccggtccgccctgcggctgcgggacgaggactgcaaagtcattgatgttgcttttgatttgggattcggaagcgtggacggataccagagggcatttctccgtgaattcggctgtaatccccgtgaatacgccgctcatcccgttcccctgtatctgatgaccccctacggcgtaaaatacagattcacagaaaaggagcccatgaatatggaacaaattaagaacgtatttattcaggtcattgaaaaaccagcccgcaaggtcatccttaagcggggcatccaggcgtatgattacatgacctactgcaatgaagccggctgtgatgtgtggggacttctcaccagcatcaaatccataagcggcgaaccgttatgcctctggctccccgaacaataccgcccggagggtacatcccaatacgttcagggcgtggaagtatcctcagactacagcggtcctgtgccggagggctttgatgtaatccagctgccagctgccagttacctcatgtttcagggagagcccttcgaggaagaggacttctgccaggccatacagatggttcagacagccatggaacgttacgacctgtcggtcatcggtctggcccctgaccctgaaaatcccagaattcagctggaacccatagggaccaggggatatatcgaaatgcttccggtaaaacaggctgtatcctcatctcattcacacccggcgccggctgttaatccttaagaagccttaaccgcccgccgtcctgaatccgaatggatgataacgctgacccttttatagaccagggcggtgagcaggcttacaatggcgcctttcagtatattaaaggggcctacagccaggattacgaatgtccacacattgctgatagccgggttgatggccgcgcctgcagcaatgatggtgtccaggggcatgaaatgggaatagaacggaagcataacaaccgcattgagtatcacagccacaattgtcatgattacagttcccgcagccattcccatgacagccccctttttcgtctttttaagcctgtaaataataccggccggcagcacaagggagcatccaaagcagaaattggcaaactcccccacaaatcccgtgctggtaggctttagtatcagcttcaccagtattttcaccagttccatgacaacgcctgccacaggccccagggcaaaggtacccacaagcaccggcacctcactgatatccatgccgtaaaatgacggcgcaataaatggaagcggcacctcaaaaatcataagcactgccgccagggcgccgaacatggccatgacggttacattccttacactgagtaagtgattctgtttcatttccctatcctccttgttatgagcacttggtgtccgttttccggtcacttacgtgcgtatatgtgtccttcggaatgcgtgcactataaaagccccggatacgcaaataatccggggcctgttcatctaccacttacacaccttcttctctcatccagactatactgtcggttctggaatcacaccagatcagccgccgtagcgggtcgcggactattaccgccggtagggaatcacaccctgccccgaagaactttatttaattatagctgaatcatagcacatatgagggtggttggcaataggctgcgccataatttccccatttccccatttcaaacccaacgttctgactcagcgcttccagactaccacatcctccagctttttgcgcggacgtggcggcggcgattcctccggatacccaaaggccacggctgccaccagctcatccccgcagtccatccatgcgcacagctcctcataggcaaagaatatgtcgcagatccacagactgccgattcccatatccgttgcttccaaaagcatattctcaattgccgcgctgacagactggatattacagagctcataaatcctgtcctcgtcgttgaggggagaaaacatccccttccccaggggatttaggacaaatatgaccacaggcgcctgttccatgatttgtaccgtgtactccgcgcctcccaggtgcctgctgctgtccggcagcatggcttttcctgccttctcccgctggattccggcctgaaacgccctcagcatgttttcttttgcctgtccctgaatgaccataaatttccatggctgcctgttctttgctgacggtgcctttatcccgctttccacaattttacagataacctcatggggtatttccttgtctgagaacctgcgtatacttctgcgcctgtctattgcatccattttctgtctccttcgtattttccgggcaggctaaactcctatggccattattcttctatggccattatccatctgcggctggtatctccatacccgcgattctcctgaatccgcgattctcctgtacccgctactctcccaaagccatcctgtaaatttccatcatctcttccttgcccagttcccggatgcccggcagggtacgctttcccatgttggtgcacttgacagccatttcttccaggcgttcttcctccacacccagttcttttaaggaagagggcatacccaggctcttatagaaatcttctgtggcccggattcctgccagggccgtgttcatagggcagtcaaaatccatgtctatgttccacacctggaccgcataacgtgcgaagcggttcacatcactggggcacacaaacctggcccaggatggccacagggctgccagacctgctccgtgggcaatggatgggtacatgccggaaagctcatgctccagctggtggacctgcatgaagaactcccttccagcccctgtcaacccgttgtgggaaaggcttcctccccacataagagcggctctggcttcatagttatccggatctttatcggcaatccttcctgcctccaccgtggattttaacaatgcctcggctatgcggtccgtcagttccgtatccctggtcttgctgaaataccgctccagggtatgcatcatgatatccactgttccgcaggctgtctggtatttgcttaccgtgcaggtcagctccgggttgcagatggaaaacagcgggcggtgggtcacgctgttaaagccccgcttaaatccattttcctcatttgtaatgacacaggacgcgctcatttcactgcccgaggcagaaagcgtaagaatgacgcccaccggcaatgccctggcaggcacagcctcctggcggaaataggtccatacatccacatccgggttccctgcgccgtctgctatacacttggatgagtcaatcacgctgcctcctccaacagccagcaccagatccacgccctccttcaggcacagttcgatgccctccttggccttagacagagtgggattggcctgtacgccccccagcgtcacatactgtattccctctgcctcaagagagcctgtaactgcgtccagaagtccggacttcttagcgctggacccgccgaaatgcaccagcaccttcttaaatccgtattccttgacaatctttcctacctgctgatgggtattctttccaaatatcatcctggttggtgtaaaaaactcaaaattttccattatgtaatcctccttcatgccgctttcaccgctgtctccattatacataaatcagggcgctttttccacttaaatctgctgcctgttcagccctgcgccagtttgtccttatacccgctttcccatttccccactctcctccccgcctgaaataccagactcctgccagagccccatgaaaggaagggaatgcctgtttcaccccacccacccccattaaaaccaggtacacccccatacaatccaacaggaaattaatacgccgcgcattccccggatcgcaaaaaaaggccgcagacgaagcatcgctgcggcctgaaaatccattcttcactgcaaggcaaagcctgccggggaaatgctctgattccatcagcctggtacttgtgatgccatgttgctgatggagagccggagatgtaccatgctgctgatggagagccggatatgtaaataccggcatcaggacagattatcgcgaaatgttctcaccatctgttcctgccaggcccctccgtattcccccataaccagcctttttagcgcctcggccgggaaccggcgccaggacatctcctcatgctttaccaggatgggatagtaatataccccgttgtcccccgctgcctcacagtcccccggcgcatcccccaccatgagcacatggtccgggcaatacccctttttcagaagagcattgatacaggcggactttgacccggagtcctgggacaggaccacgtccacatattccatcaggccctgtctctgccattcttcctccaccgcttttttgttggcagaggataccactgccacgtccgctgtctcatgggccgccttaagggcctcacgcacaccgtcaaaggcgcatttggcttcttccggcatggccccgattttccggtttacttcctcagaccattccagtgcctgtcggaatatctcctttccggtccgttcccactgggcctttaccgcctggtttgacaactccggcgcttcccctgtccatcggacaaaggcatccacatccggcactgctttatatgtccggtcaatttctgccagaatcatggccaggcccttaaagcggttgattcccctggtcatggtgtaaagattgatctcatcccagcgcctgcgtatcttctgctcccattgtgaaagcccccagaccggaatcagacagggcccgaaacaggttatatgttttgagtccatggtatccatggcacagccgtctgaatcgacgcagatcagatattccttttgcttcctgtatccctctaatatgtccggcatccgaagctctcctctcctttacgccactgcatattaccggaactggtaccagtaatcctgtacatcctgcagatttttatagacgaagtcataattaatcatccaaagcttcatatcctccaaggggatattgccttctgccggggttgtctccgggcgtaccggccatcctccgatggtgttgaatggtttgataccatttccgtttccatcctcgccacctaacagatagcgaatcagcagcttggctccgtttggatgaggcgcctcgtttaccactgccacaaagttcatgaaggccacgccggaaacaggctccatcttaaggggctcggattcgatattccaccccttgtcagcccgctcccggtacttggaggacggtgtgtagccaatgagctttgactccttgccctctcccacagactggatgacctcgttgtttgagtcaaagatgaccggatcattttccagcacccgcttcatccaggcatgggctgccgtgggctcgtcgtccgccagtacaatatcctcgccgtagcacgccttataggcttccgccatctcgtccgcatgctccaccatagtggtgaacagggccatgtagctcactgtgccgattgggttctggagcacgaagcttcccttccattccggctttgtcacatcccaccagttggtgatgggggtttccgtatagatgccggtattgtagaaccaccagtcagtctcaaagtacaaaggcgtcatatcctttaaatattcctggttcacattcttgtaaatggattcaggctggtaattgtgcaggattcccttgttaaagaaattaatcatgtaatcccctgtctgttccttggaatggattacgtcagctgtgcgtatacccgagttgtactctgtactcagtttggtggacatgtcattggcattgatgtcatatacctccagggtcatgccgggataatcctcctcaaagctggcctttaccttagccatacggctggaaatggaataaatgactaccttcccgccctcctcgtccagtgccttcttatacagttcatctgaggattcatcctcatacagtcccgcgtccacggcccactgctcctccggggcagacgctgcatttcctcctgctgcattttcccctgccgcattctcccctgccttgtctccagccgcctccttctgcgtctctcctgctcccggctgctccccggccttgccctcatctgctgccttggcagctgttgtgttcccggatgcagcctttgtgtcctcaatcttttcgcagcccgtaagcgcagatgcagccatcacgcctgccaaagccagtgccaataaacgttttcctcttctcctcatgatttcttctcctttatcatttaattgaattttgttggtcctgctgtgcgtccatgacagccagctttgccagcctgccgctgtccttgcaaaacacgttcatcttatccggattaatccgcagccacaccttttgatccggactgtactgcttaagtccgttctgcttggacaggattcgttccccgcccacctccaggtaaatggttgtctctgaaccggccggcatcacagagtatacttccgcctctatgctcccctctgcgggtccgtccagtatctccaccaactccggtctcaccccgaccactgcctcaaagcttccgtcacccggggcttccccggtaaaggacttcctgtcataagacgcggttcccaaaacggattccacggtcatggtatctcccgccaccctggcctttcccggaaggaaattcacctttggattgccgataaagtcagccacccgcagggaggcaggattctggtacagctccatgggcggcgccacctgctccagcacaccctcaaagaaaatggctattttggtagacatggtcagggcctccgtctggtcatgggtcacatagataatggtggtgcctaactcctgatggagccgtttaatttcacttctcatctcgattctcagcttggcgtccagattggacagcggctcgtccaaaagcagcacctccggctccgacacaatggccctggctatggccacgcgctgctgtccgcctgacagttccgacggataccggtcaatgaacgcctcaatcctcatgcgttttaaggcattttccaccttccttcgtatctcctccttgggcacctttgccacttccaggccaaaggccacattgtcaaataccgtcatatggggccaaagggcatacgactggaataccaggttaagatggcgttttcccggttcctcataaaacttttcaggcgcattgacaatctccctgtcccccatgtacatatacccttcctggggcttctccaggcctgccaccacgcgcagggtggttgtctttccgcagccggacggccccagcagtgtcataaactccccgtcctcaatcaccaggttgatgtcctttaacacatggttcctgccgtaatatttattgattcctcttaattcaattctgctcatctttcatatcctcccgcattaaaagcccttggtgatgtccgcgtccgtaaaggtattggcaaaccagtagacgaagaataccagcacaaacataacgatggtcactgcactggacagctgaatcagattttccgccgaataggcgtacgccatatagggcagcgtctgctggctgggcgtcatgagtataactatcaggtccagttccttcatgatgctgataaacaccagcatgaatccgcttatcataccgccctttgacagagggaacacaatcttaaagaacctgcgcaggaatcccgcgttttccacctgggcggcttcctctaactccgtactgatctggagcatattggatgttcccgccctggaggcaaagggcatgttcttcaccacagcgataagcaccagcagggcaaaggagccgtacagggacggtaccagggtgatgcggtagccgaacatttctattttcttagccgttgcaaagagagccaggtacatggcgccaaaggcaatggatggaatcaggtaaggtataaataccagctgctccaccagttttcctgagaacagcttgcgtcccctggaattgatatagccaatcagctgtccgaacacggttgcaaacagggaggtaagcaccaccagcttgatggtgttgaccacatatttcatgaactgcggattcttaaatatacccggctcaccctggtcaatggtgggcacggaacctccggtccagtaatgaagggtgaaattgctgaggctgtagttgcccggctccagcataaaggactggtacagcagaatgaccaccggaaacacaacggccactgcgatgaaggcaatgagaatccccacgataaccggcctccatttgcccaggcgtatgggattgctcctgctgccctttcctcctatggtactgaaggattttctggaaccaatggccttctggtttaagaacacgctgaaggaggcaatggctatgagaatcagagatatggcaaacgccacccggttctgcccgttctgtatggagttgtacatggtggtggatacggtgtagtatccgattttaagccctaaaaccgacggaacgccgaaggtgcccattgcctttgaaaaggtcatgataaccgcggacagaatagccggcatcaccagcgggaatgtaatctttgtaagtatcctggccttgctggctcccaggatttcccccatctcttccagctccgagttgatggagctgagggccgaggacaccagcaggtaggcataggcataatagtggatgactaacaccacgatgatggcaaacggcccgtaggccagccagtccggtgtctgaatccccaaaaatcccagaaggccctgggcgccgcccacgcgttcattcttgaatatggtcagccatgccatggacttgcaccaggatggtatcatatagggaatgatgagggccagggaaaagaatttcttatatggcaggtcgctgcggaccatgagccatgccagcagtgagcccagggtaattccaaacgcagccgtgcacacggatatcaataaggaattcttaaggggcgtccacagcattttctgggaaatgctgctggtcagaacccgtttccagtaatagagggtaaacatcccctcccttcccccgtccaccctggccgcgtctgcgcctgccagggtaagcgtctgtataatcatctgtcccagaggaatcagaatcagataaaccatgaatatcacggaaatcaccaccatgatattgtatggattctttacaatgcttcctgcctgattcataagacggcgtttcctggaaaattcccggacgccgccttttgttccggcctttgtatctgtctgcatactgcctgctcctttctgttgcctgcatactctcttctgtcagcccttcattttatcccttgtttaccccttgtctatcccttgcaggaacggcgctccaccagcctcggttccagcttcacagaagcctttccccccactggcgcaccctcctccaccattcccagcagcagctccacggcggtctccatctgttcctcatgggaaactgccaccgttgtaagctcgatgtagggcaattcctcggttatgttgtcaaacccaatgagtgaaaaatcctcaggtatgcggattccattttcccggcatgccttaacaatcccgttggccgtggcatcgctggcagccacgattccgtccggcatggccagtccgctttgaaggaaatgcttgaagtggttatatcccctttcaaagctggtccgaaaatccagattgcactcgtatacctgggccggaatccgctttgccctggctgtctccagaaaactggcggccctgtagcggtgggccagacgttcgggcttgaaccccacaaacagcaggttcctgcaccctttggatatgagatactcggcggcgattctgcccgcctgctcctcgtcggcgcagacatagggaatcccgcactggcccgtaagctcgttaagggcaaccatgggtacattatgaataaactcagccatgctctccgtgctcctggggccaatgggaaatatcaggattccctccacctggtgctctgccagaagcttcagataatccctctctgccttcagctcccggaagctgttgcataataatacctgataccctcttttgtgggcagcatccgaggccttcaccatgagttcggaataaaaaggactcatgatatccggcatgatgatgcctatggtctgagtcctgcgcttcacaagactccgggccaggccgttgggcgtgtaggagagccgttcgcatacccgtaatatccggctgcggttttcctcgctgataccatccatcccgtttaacgccctggatacagaggcgatggatacccctgcctccctggcaatatctttgattgtcacttgtttcataataggccttctccccatttctccgttttaaagaatggttttcgtaaacgtttacgcttaaaaatattataccatcagccaggttttcccgccatttccagaaccaacaaaatgcacaggtacccctatgcattttgcataataatttaggcattttttcgtaaattttacggccgtatacgtttacggccaaaagaaggaagtttttcttttgtacaaattgcccctcccccttcattcatgcataaaacagcacggacagacataagattactccaggacccatatttcccgaaagggtgtcaggaggcggttatatcatgagattcttccgaatgctccgggagcatttacatatcagtacaaagacagtgatttacggggaaatgatggtgctgagcctgctgtgtctcagcatcttcctgtttaaaacagacccgggccaggcagtcatgagccaggcctccaggctggccggatacatgaatcccctggaaaacatagacggagcagacccggacaagacagggacagataagaaagaagctaaaaataaggattatatcaaatgggtggacttcggcgtcacctcggaggccatgaaccaggcattccgccttgacgtggacacctgccaggctgacgttcatctgaactgggtggatttgctggcctatctgggaacccgttacggcggggatttttccaaatataagccggaacacatgaccgctgtggcagaaaaactgaaaaatggtgaaaccaccatagaagaactgacaaaagacatgaaatattactcttattaccgccaggcctacggagctgtattagacggcatggtagggcagtttgaggcagagataccggcaggcgaagccccggccgcttatctgccttccggagtggcaggaggcgcccccggagaccccgccacggtctgggtgaccaaatacgggctcaaggcattttctcccattgccaagggctttccctacagcgattttgacgactttggcgtggcccgcagctatggcttcaagcgccagcacctgggccacgacatgatgggccaggtgggaactccggtggttgccgtggaatccggctatgtggaagccctgggctggaaccagtacggcggctggcggctgggaatacgcagctttgaccacaagcggtactactattacgctcatctgcgcaagaattacccctaccagtcaggcctggaggtgggaagcgtggtgcaggccggggacgtcataggctatctggggcgcaccggttacagccgcaccgagaacaccaacaacatcgacgacccccatctccactttggcctggaactcatatttgatgagtcccaaaaggacagcaacaatgaaatctgggtcagctgttatgaactggtaaaattcctgaatctgaaccgctgtgaggcggtaaaggtggagggcacaaaggagtggaaacggttatacggcatcaaggacccgctggttccggtgcagcccgccacaccgtcccaggccggacctgcggcagaatcccaggcagagccccaggcaaaatcccaggccggaccccagacagacccccaggccggatcccaggcggaatcataggttcattccgccaaaaggcgcctcctccttttcttaccctctcacccgcggctgtccttctcgcccaccacagccacacctccgttctttaagaactccgagggcgtcacattggtgtatttcttgaatacgccgcagaaatgtttatactcgctgaatcccagctcatcggatatctcatagatccgcatggtgccctggctcagcatattcagggccttcttaatccggtactggttcagcaggtccacaaaggtggtgttaagcccggccttcagcttcctgctgagatagctggtgctgacccccaggctttccgccacctggttgatgctcaccttttccttgtaatgctgcttcacgaactcataggttctctttacgtagggatccatgctgttctttgcgctgtcaaatatcttccattcatcatagactgtcagtagcctgtcctgggatatcttctcgattttctcatacttgctggcgtaagctatctgctgacggattttgtccagagactccttcagctcatcctcgtccacaggctttagcagatagtccgtgacacccatatggatggcctgccgggccagctcaaactccgaatagctggtcagcaccaggctgtaaaactgctggtccttgatggctgtctctatcatcttaagcccgttcatcttaggcatttttatgtcggtcagcacaatatccggctgctccctccgtatggtctccagcccctctgccccgtccttggccgtgcccacaataatacagcccatgtccaaccagtttaaggcaaaggtaagaccctttctgatgatctcctcatcctccacaatcactacttttaataacatgacagaatccccccatccttacaccgggagtgcgccgtcccctgtgccttactcttcgcagggcacccggagcgtcaccactgtccccttttccatttcactgtcaattcccactccatacccgcttccatagaccagacgtatcctcttatggacattgtagatgccgatatggtctgtctggttctgtccctggtccagattggccttcagcttctccagaagctctgtgctgattcccactccgtcgtccgatataatgacgaagagaacctcattttgtatcctggtgctgatacggatctccaggcagtcacggtcctcaccaaaaccgtatttgatggaattctccacaatgggctgcagggccatcctcggtatggacgcattcctgctgccctcctccaggtcaatgctgtatcttaaccggtcgccataccggtagagcataacctgcagataccggctgatgaaatccatctcctccttcaccgtcaccacatccttgccgttctggatgctgtagcgcagcattctggacaggctgaccagcatcttctccgcctcccccggcccgaactttatcatataccggatagattccagggtattgaagagaaaatgcgggttaaactgtgattccagaatctggaccgtggccagcatgttctcctttgccagttcctgatgcctggccagcagatggcgtatgctgcctatcatggtgttgaaggaatggccgatacgctcaaactcatcacccgaggtgatttccagggacacatccaaatcccccttctccacctggtcaagggcgcctatgagatcgtaaatgatttccgtctttttgtccgccaccttgcctgcgctcctgtagatggccagggtcactgccagggccagaaatcccaccagcaccagggacataaggcacagctggacaaaggatgtacagtcgtatatgacctgtacggacgcctcctcatccagcacggacacgctgtccgtgtaataccatctgttctccagatgcaccatgctgccgccgtcgcggaattcctccaccagcttgccccggtcgttctggaacctggacaccccgtcggtgaacagccggttgaacttgttaatcagcagtacgggctgttccatatttcccagccgttccttaaacgcatctgctttcagcacaaagccgctgtatccctggagccttccgtcctttaccacggtctggaacatgagccatgcaggaagggcccttccgtctatcaccgtattgtcatagataaagatacagtcatttttgctgtcattctggtccgttgtgttccagggcagataatttcctatgtactgtatgacattggactggctgttggtggaaaaaaccagattcctgtcccggtcaaacaggtaatagtcacccctgtaaacctgaccgttaaggaaccggtaaatctccgacactgcctctgtcttataggaaggcagtcccttaaactgttccacgtccagctcccctgccatccttttattctcgtccacatagctgtctataacgccctcaaactccccggaaaagtgctccagcatggtcctgctcttccggatgatctgctgggaccccaccgctgtaaacaccagaagcaggaccaccagcgatataaagcaaggtgcaagcgcatggaaaatcaaacttttccggatttcgtccctgaaacatgtttgttttcgcttcttcatacgcctgcaccttttaccatttttaatattaatacactgcacattactgcagttttcagtttatcatacggcagttacattgtcacgtccttattgcccgacaccttgaagaagatgagcagggataccacggtggtaacggtgaggatggttgccagggcagcggctgttccgtagctggcccggatgacctcattgtatatggccaccgacatggtccttgtgttggccgtatagagcatgacggaagaactcagttcattaatcagggtaatccagcttaatatggcgccggacgcaacacccggaagcatcattttcgccgtcaccttcacaaaggacatggatggtgaatcgcccaggctgatggcggcctcctccatgctgggactgatctggtaaagaatggcggagctggaacgcagcgtatatgcctgcctccggatgaccagggatatgaccataatgatggcggaaccggccagcatcataggaggatggttaaatgcaatcagtaacgtaataccaaggacggaacccggtacaatgtacgggaacatggcaatggtgtcaatggcgttggtcagccagctcttgcgcctcactgccaggtacgcgatgagcatgcccaggaccacgataatcacaatagctgccaggcagtaaagatatgtattcttgatggactggatggctgtggagaacaccttgcggtagctttccagggaaaatccatccacaaacacctgcatcttggtggcgcggaaggaggtgtaaacaaccatgcactggggtatgatggaggtggctgccagcagatagataaacaggtgaatgaaaaagcctttgattccatggacctccttgggctgaatcggcctcatggagctcatggtaaaggacttggtattcacataccatttctgcagcaggaacacagttgcggtgactaccaccataatggtcgccatacatgccgcaaagttggcggaaccgcctgtctctcccacgaactcggagtataccagggtgggcataacacggtatccctcgccaatcagggccggggtgccaaagtctgccatacagttcatgaacaccagcagggctgccgctatcagggtaggggtgaccaggggcatgattacggtaaagacctttttcaggcctccgcatcccaggctttccgccgcctcagacagggccacatctatctttttgagggctcccgatacatacatgtagataaacggatacagcttaagggcaaataccagcagcattcctccaaagccgtaaatagacggcatgtggattcccaggccctttaagaactgggtcacggttccgcttcttcccagaagcaggatccaggagtaggcgccgataaagttgggactcatcatggagatgatgaacaggatttccagcaggccttttccttttatcttataaaacgacatgaaataggccagaggcacccccagtataatggctaccacggtcacgctgaaggtcagcttaaacgagttgagcagtgcgcttttataatacttctttgaaaagaacctggcatagttgtcaatggtccagactcctgtctccgtgtccttgaaaccgcttaagaaaaggctgatgagcggatagagaaggaacagggcaaacagggcaatgatgaccactgtcacaatcgtccagaagtcccacctgattttcttattcgtcatatctcttcacatcctttatcagactctgttccatgtcctgggtgaacacgttgattttattagggttcggtctaaggcgtatcttttctcccactgagaatatgcggtccacatggcctaaatcctgggagtactcaatgcttggctggtcctccagcaccatgccgtccccgaagcgcaggaagtagttggtgtatttgcccaggaaggtcctgctgatgatttcgcattccatgccttccggattcagggagaattcctcagggcggaccgataccacgaccttctggccctctgtcaccgtgtccacaaggtttgccatctccacatggtatccgccctcaaacacaacggacggcacgctcccctgctttcttatggttccgaaaaagagattggaatggccgataaaggtggatacaaatgcattgtagggccttgcatagatgtcctgggggcttccaatctgctggataatccccagcttcatgaccgcaatcctgtctgatatggcaagggcttcctcctgatcatgggttacgtaaaccgtggtaatacccacctgcttctgcacatcacggatggcgctgcgcatctcaatacgcagcttggcgtccagattggacagcggctcatccatgagaagcacctggggatggatgacaatggccctggccagggccactctctgctgctggccgccggacaggcgctccggcagtcggtcctggtattcgtcgatttttaccaccttaagaatttcatccacccgctccttcatgtgctccttcggcaccttgcggattttcaggccgtattccacgttctggcgtaccgtcaggtgggggaagatggcatagctctggaacaccatgccgatgttccgtttctgggccggaatatcgttgatgaccttgtcgtcaaatttgatggttcccccctcgatgctgttaaacccggcaatcatgcgcagcagagtggtcttgccgcacccggagggccccagcagggtaaagaattccccattttttataaaggcggacaagtccggtatgatggtcgtatccccatatttttttactacattgtcgattccaattgaaacactcatacgtttcccctcaattcctctaaaatgaagggggctgacatattaagccacgcccccgatgtatgtaccttcatctgctctttggattggtttactctgtaaacagctccttaaactcatccagccactcagacttgtgtgccgcggtgtctgtctcatcgtcctggataaccttaatctggtccattggaaccatggcgtctcccgcctccacatccttgcggatggttcttctgtactgggtattgttcatgaattcctgaacatccttgctggtgagccagtccacgaacttctgggcatttgattcattggggcagcccttgatgatgtatacgccgtcgccgcggaagataacgccttcactcatataaacggtcttgacaggcgcgcctgcgcccacatactgagcggaaccctgctcaaaggtaagacctacggtgtactctccgtccgcaacgcccttatacactgcggaggaaccgcctaacagcttgccgtccagctgtgcgcagaactgttttacatagtcccagccattgtcaggattgccgccgcccattgcatagagcatgtttaccagatgctcaaaggaggaggaggatgcagccgggtccgcaaaggcaatcttgccctttaattcagggttcagcaggtcctcatatccttcaatcttgatatcgccaatcaggtccgtgttcaccatgataaccgacggaatggtatcaaaacgtgtcaggttgccctctgtgttcttgtattcatcatagaacgcgtcctcgttggatgtggtgtaatccgcaaaatactcactcttgttttttacggttccgatggttcctgaccagagaatatctgcctgggggttgtcggcttctgtctggattctctttaacgcgtcgccggtacccatggccagacactcagcgtcaatacccgtgtcctcctcgaacatggccagcatggaatcaatcatggactctgtaagggggctgtagattatgagcttctcatccttggaagcgcctgcctcttccttcttctcaccgccgtcctcttcctttcctgtctctgcaccggcctcagccttgggcgcctgggtatccgcgcctttctctgtggcggagcctgaactgcctgaacagccagccaggctgacagccactgccgccgcgcataataccgggattaatcttctttttttcattacctttatcctcctttaaacttggttgaaatggtttatgtactgaatcaataggttcctgcctcctggccgccaagaagcttaagggctgagctggttccaatccgctcacagccttcctccaggaactgctccaggtcctccctggtcttaacgcctccggctgccttgattttcacgccttcaccaatgtagcgcttaaacagcctgacatcctcaatcctggctcctgctgttccgaacccggtggaggtcttgatataatcggcccctccgtccgtgacgcatttgcacagctcccttttctcatcctctgtgagataacatgtctcgatgattaccttcaccacatggtttccggctgcttttttgactgcctcgatttcacgtgtgatctttggaaattcgccgttttttacatcacctaagtttaccaccatatccacttccccggctccgtcagccaaagccttctgggtttcgtaaacctttgtctccgtggtattatatcccagcggaaatccgatgaccgtgcatacattcagcttgtccccataggcttctgatacccgtttaacatagcttggagggatacagaccgaagccgtatggttttcaatggcttcctcacagagtgtctgtatctcgtcccaagctgagactgcctttaacagcgtatggtccacatggaccagaatctcttcctttgtcatacccatccccctgtcctctttgtttgtaatcccattatatcgtctcattgccgcctgaaccatccgaaatcctggcaaattatccaatattctgaactcattttatatttttctatatattgtagataattcatgctatgaactatccattggatattatctgatggaatttacactgaaatgtgataagatatagacagaacctgattaaattacagccaggaagcgtctgaaagacccagacagtcctctcccactggcagaaatggaggcatctatgttcggaagaaagaaaaaggcagaagtgtttatgaccaacgacctgggattatacaccaccgtacatcaggccctgaaggccggacagattccctgcgaagtaaaggttgtcaatacaggtacccggaacaggcggaccggcgcactcatcggcagggtaggtgaacggcctgagctggaaatacagtactatatttatacgcccctggaatatgcagacagggccaagtatgtgattgatgaatacaggaaaaatttatcccggtaaccaaggaatccataacgtatcaggggaaggacgtgactcgtaccaatcacgtccttcccctgtttacttccatccatatctatagccggccggctttcagtccgctatgcctttaagccatcatcgttcccagccccgtccgtattatccttcatggccatgcgcttttgcgcaagcttccgcatcagtgcgaattcatcataaatactccactcttcccggaacataccgtcttttataatatgctgcgatataccggaaatgaccacgtgggctcctgtggcaggcccatagatgccaaagccctcatgggtgccgattatattccatctggtggcgcaccggtattcgtcccgcttttcatcataaagatagtatacatcctccacctgcatggccagattggggaaggcctggaacagattcagctggtcctgcaggaaatcgcctctgcccaccaattccctgtctgaaggtccatggtatctgtaatcaggggcataattatccttaaactgattgaacattcttctgttataaatctcatgatagctttttctgataaaatactctatatcgctgtaccgcccgttattatctccaaatttgtccggagcaaactcgccgttcagccgttcaatctctccccatgtgccagtgtctgccttggcgctgcctcccttattggctgtggcctccaatactttcatggggttgtaccccaattgcctgattaggctgatttcgttatataccacccactcctccacaacacggtcgccttttacatagcagttagccactccccataccactaccttcctgccggtaggcggaccatagatggtgtgtcccgtattgtggccaatccaggtccacctcatggaagtatggaagcctccgtttccatcagatgcccagataacatcgtcaatataatccttgatatccggatatccggccagcttcatcacagagtttgcgatgacctgatcccggccgtatgtcacaccatccgatgtatgtaccagggcattatgcttataatggtcatatatcttccccatccccttatcatcccatatgtcataggtatggcggatgataaaatccgcagggtcgcgccattttccaaatccaggcatgggcacttcctgctcccttgccttgccgtccttccacataactgtaatatcatccttcaacggcactgacagctgtcccagggtttcctggtatacattccccctgtagcggatgttcctgtcgcaatcctcttttttaccgccggtacctgactccttttgctcccctgaaggctccctcaggatatcttctgcttgtgcagcctgattctttgtgttctttacctcactcatatatcgttctctcctatctctctgttatttcatcaggccaggcagccaggtagacatctgcggtatgaatattacaaatatcagtccaattcccatggtcagtatccatggccagatttcctttactatctcctcaaatggcgctttggatatctgggccgccacaaacaggttgcctcccacaggaggagttatgattcccagtgtggaattaaatataaacatgaccccaaaatggataggatcaatcccatactgtgttgcaatccccagtaaaatggaactcagtatgacattaatggcaataccgtccaagaacgtcccaagaaacaataccaatgcgtttaatattataagggccacaatctttgacgaaacgcttcccaatattaatgcagccgattttgtgggtatttcctccagcgtcagtattttaccgaatcctgaggacacgcccaggataaacagtattgtacacgtagtaatcacagttttataaaacatctggggcagcattctggcctcaagcccgctgttcctctttaacaggccgtaaatcaggccgtaaaccaccgataccacagctgcctctgtaggcgtaaaaatcccggaatagataccccctaaaatgatgaccggcataatcaggctgaatttcgcctcccacatggtcctcagtttccggcgcaaaggaatggggtcgtttcctgaacagatattatgctttttgccgtaaatatggcaatataccaggaaacagcagccaatgaataatcccggcagaatctctgccgtaaacagcttggagatagacacattgttcaggctcccgaatacaaccagtcccatgctgggaggaatcatctggccgcagcagcctgccgtggcaatgagtgccgccgccgctccctggctcagcccctgctttcgcagctccggcagggcaatcaggccaatggcagctatggtggcataggcggaaccggagattgcgccaaaggccatgcaggccagaaccgttaccatcatgattccgcccttcagcctgcccacccatacattagcggctttaaacaaaccttctgagattcctgcctctgacataatctgcccggccagcacaaaaaagggaaccgctgtcagtgtaaaggaatcaacactgttggccatggcgcgcacaaaataggacagggatatgatatcgcttgtaaaaacagagcccaataccccaatgcctatggcaaagccaatgggtactcccaagaaagccagtcccaggaacagaacaaacaaaacagcaactgacatcacgctccccccttttcttcctcaattttgtccgccccaattcccccctggcgaatttgtcccgcaatctttaccgtacactggaccagccttagacacaccagcagaaatcccaggggcataacaagataaaggagccacattggtatgggcagggacacggcggtctgccctccctggcggatgatactcaacaatttatatccttcaatcatacagataacggaaaaaccaaaacataagatattacataaaatatccagatacagtctcaggcccggcctgagtaaggaacgcacaaatgttatccttatatgttcccctgtctttaccgcataccctatggagatgaacaccatccatacaaacatgtacctggtcatctcttctgtccatggaaacggagttgaaaacaggtaccgccccactatctgaagtgttgtaaaaacaaccataagggccaggaacacagcgcctataaaaacttccagcttgtcgtccacccattgaatcacttttttcacgctctttttcacatccttccgtccttataaagcagtcatcagttcctgaatgtctccagtatctctttgccgcacatttcttccactttaggctcggtcgccgccaccatagcttccttgatttccgccctggcctcatcggtcagctccgtatagagaatcttgccttgttcctgaagctctttaatcttctgtacggaatcctcctcctccttcatggcaatcttccactcctcctctgctgccccggcgattgccttatcatatgcagctctctgttcttcagaaaaagaattatatttggcggaagagatcagtattacattgatggaataactgtgattggtatcggttgcgtacttcagtacatctataagtccctgctggatgataggcatttttgatgaaaccagaccgtctaccgtgccttgctgaagacctgtatacagctcattccatgccataggtgtagggatacatcccagtgcttccagctccgcaatgttaatgggattctccggcgccctgctcttaattccctggaaatccgccagagtgttcacttctcttacattattccagaatatccttcctgagcttccaaagaaagcagccactttgacgcccatatttttatcgtcagcagcctttttcagcaaatccccctgctctccgtccagcttcgccttggcatcctttaaatcatcgaacaggtagtccgcgttaaatacataaaactccttaatatttggcgcaaactgtagctctgccacagaagtcatatcaatctctcccagggtaacggcctcgatactgtcgcggtcggatcccactacctgcgcattaggaaatattttgacctcaattcccacgtcctccccttcaataatttccttaaacttcagaaaaccctgatgggtggcctctttttcatttgcctgatgggcaattctgatttccagcttggatgattcagcgccggacggcgagggagcgccttccccgcttccctgctcttgctttgcagcagctggtttctctgtaccgcagcccgttaacgcgagagctaatcctaccagactgattgttataacctttttcattgtttttttcattttaaacccctttctccatcacacatttacgattatttgcttcactgattccccaattaccggtttgacctccccttatccctcccttcccatcaggtttaatcagaatatatctgcggaaaatgaatacgtagtcattttcctgtaaaataaatgattgacatttaatgtctgtcaatcatccatttgttctaatgacggacagtattcctcacaatcagctgcataggaaccgctaccgtctctgggggcatctccggattctccatattctctatcaggacccggacagcctctttgcacagaatgccattctgctgctgcagtacagtgagggaatacgaccttaaagatgctgcaaacgtatcatctaatcccataatagaataatcttcacccggcacatacttatactttaaccgtccgcagtccatgactcccagagccatcaggtcattggcgcagaagattgcctccacaggcagtcccgaggcaaatatacggtcgccggcccgatagccggactcatacgaataatcgcctgcctgtatcatacactgggttataccgcattgtttaaggccgcccagaaaaccttcctggcgctcatcgtgattcagataacagctttcctccgcggaaacatatgcaaattcccgcatccctaatccatacaaaaatctcgccgccctctccccggccccgtaattgtcggaatataccatattaatatccgtattaggactgtatacattgagaaggacaagaggtattcccttctttttccactccccggatatcttatgggtcagggccgatgaggtgatgatgataccgtccacacagtactccaaaagccgtctgagtatctgattgatgtcactgtccggagccgtgttgaacaccattaccctcagcccatattcctggagaagattggtaaggatattaagcaggccatagtagtacacgttatatgtatcagacaacacaactccgattatcccggtccggttggagttaagacctctggccagtgcattgggactatatccaagctcttcagcagccttcagcaccttttccctggtcttatggcttatcctgtcattccacttttcattaaagaccctggatacagaagactgggataccccggctctctttgccacatcaaacgaagaaatgctttttatcattcttttatctatcatataaccacctataccgcgattgattacgtcgtcatattttatgactacgcaatcatttatatcttatatatacactccccgtttaataatgtcaatattaaattttatttttttcatttttttgtctacatttcacatatcaaaccgccaaaaattagcggtttttttgtttttctttttcccaggcttctaacttctccgtccagactcatatttttaataaacgctccacatccgcttcgattcccagacagtcatccgctgtctccatgccgtactccactaccaggtcagcctgaggggtatattccccggcccatgccatgaagctgtcaaaatccagggttccgtccccaatccgtctgtggctgtcgtgaactccgtcattattgtgaagatgatatgccagaatctgccctttcaggcgttccataacgctgcgcaggtcccagccattggcatgggcatggccgatgtctatgagtaccgggtatccttccgcccggcacagggagacaaagccgctctcatctaacagcatattgttccggtccatgacccccgcattctccacggccaccggtattcccaggggacgaaacagttcctccaccctgcggtaattggcgcaggaatcccgcagcatcctctcctcatctctgacaacacagttgttgtgatgaaaaaccatatagcggctgttaagcctctctgagtagcggagggtctggcccaccagttccatggtgtactcatactccggggttccctggggcgccgagtgctccgccttgtaataggggccgtgaaagctgatgggaacatgttttaacatgtccatgctctcctcaaggagagaggcgaatacctgccggtggaacatgggaaatacttccactcccacctgtcccttccatttttccacataggacagaatccgcttaaactcctccgccttatacatattggtactgatgagcaaagccatggccgttctctcccttcttactggcacctttttggagtatatacggctccctggcagcccttagctgctccggatagcccagggacacctgggtggccctgtcaaagagatggattctgtcaaaatccggctggatatatacgctctctcccggagcagggacatccccctcgcttacagcaataatttccatattgtccacctgcacatatacgccgtaccggttgccgtaatcctccacgtacttgacggttccctccagggtattttcctggcgcctgcggtgcaaaatcatgtgttccgggcgtattcccaggaacagacggccggattcgttgcgggaggccaatcctgaccacatgtccggcagccagaccacctgtctgccgatcaccagcgttcccctggtataggatgcctccacaatattcatggagggggatccgatgaattttgcagtaaatacattggcagggcggttgtatacattggcaggggtgtccagcatctgcattttcccctcatgcatcagagcaatgcgctgtcccacggtcatggcctcaatctggtcatgggtcacataaataagggtctgatggtacatctcatggattttcaccagctccttcctggcccgcagcctcagctgggcatccaggttggaaagcggttcgtctaaaaggaaataatccgagcgcttcaccactgccctggccagcgccaccctctggcgctggccgccggaaagatcctttggcctgcgctcctccagccctttcaggtccagcatatccagaacctccgaaagcctggtctttatctccgcgggatccattttgtgggccttcaggccgtaaacgatattgctttgcaccgtcatatgaggaaacagggcatagttttgaaataccatggacacattcctctccccgcagggaacatcgtttaccagacggccgtccatatagagatttcccccgctgagcctctccaggcccgcaatcatccgcagggtggtggatttgccgcagccggaaggtcccagcagaatcaggcgctctccttccctgatttccatgtttaaatcctttacgattacatttttgtcataagctttcactacatggtcaaatactatgtttttcattgatttctccttatttgattcccttggccgccaactccctaacccttgattcccgacatggcaaaggtattgatgatatagcgctggaacaggatatacaatgccagcggaatcaccatggtcatgacagaaacagccattgctatggtaaactccgttcccccctccgcgcttatgtacatctgcagggccagggacagggtataattctccttgcttttcagtataagaacaggccacacatactcgttccaggaattgatgaaaaagatgattcccgtggaaatgatggagggccgtactaacgggatgatgatatccctcatgatcttcagattcttcacattctccatcctggccgcctcgataagagccctggggattccccgcatagactggcgcaggagaaagattcccagcacatcggccagctggggcagggccacgccccatatcttgtcgctgaggccgattttggaaatcatcagatagttgggaatcatggtaacggtaaacggtatgaacatggtggccagcatgataaagtacaggattcccttgcccctaaaatcaaaatacacaaaggaataggctgcaaacaggccggtaacggtcttaaaaacagttacagtggcagcaattaaaaatgtattcatggtaatttttaagaaggggagcttgctgaatacatggatgtaattctgcaccgtgggcctggccggaataatctgaaacaccgtattaaaggcatcctgcatggtcttaaaggaatttgacaccgcaaatacaatgggcatcaggataaggaacacggcacacagaagaagcaggtgccatcccggctgcatttctttaattttcatagtatacccccttttccacaaaccggaattccagaagcagcagtacaataaacagcaccatggtaatcactgaaacagctgatgatgtgcctgtgcggtacagggtaaaggcctcatggtaggacatgtatatcaggttggagctggcgtagttgggaccgccctgggttaccaccttgatgggtgtaaacacatactgaagcccctgtacaatggtggtgataaacacgtagattccagtggccgagctcatgggaaccaccatgtcgcggaagattttccacaggggaatattgtccagtctggccgcctcaacgacctcctgggataccccggacacacctgccagtatgatgataaaattatagccgaacaccttccaggaggtgattatgctcagtacagcaatgacccacccctcggccttggaccagaagggaagggccaggccaaagtactttaacacaagggccacagggccggaaatggggttcagaatccagatataaagaatggatcccaccaccagggatatgacgctgggcaggaaaaacacagctttataaaagccctgtcccctcttaatcaccgctgacaggatgaaggaaaggatgtagggcagcacaaaattcagaaccagcagtacaaggatatacaccgccgtatttcccgcaatcttccaggaattcgggtccctgaaaatggctgcatagttagccagccccacaaactttttcaccggttttaccatattccactcaaaaaaactgagatagaccgtataaaacaggggataaaacatgaataccgcaaacacagccagcgatggcacaagaaacagatatcccagcagtgtctgctttttttcttcctgattcaatctgattttacctccataaaggggcaggtatccccatgtccccggggatacccgctccaatttattgtaagcagctgtatttcagccggttactgtactgccagcagctggttgatggcatcctgtgctgccttcatgccctgttctgccgtcacctgcccgcccagaatctggtccctcatgtctaagagcatctgctctgcctgcaggccggcgtctcccggaaacgctgtccacggaaccactccgtccatctgctggatggctgcgttcatcatcttgttctctgccaggaatgtcttaagcccgttctcagccccggccacatcctttctgggaggcacataaccggttccctctgtccaggctgccatggactccacgctgtagagaaacttctcaaattcccatgccgcctcaatctggtcatcgccctgagccgtaatagccaggaagcatcctcctgccggaaccatgcgctccttgtctttccacaggggggattttacggttgccacgtcaaactgcgcgcccttctgcacggaagcccttctggcaatggtggtgtataacatggcgcagttgccgtcaataaagctctggcacccttcctcccaggagatatgtaaagcggtctggtccttcaccatatcagctatcagctgcatggcttcaattccatcctccgtggcaaaggatgcctcttttttgccctcagcgttggtggtcagcatcttagcgccgctgctttcaatcagtccctgctgtgcccagaaatccgcgggctcctgcatataaaaaccgtactttcctgtcttttccttgatggtctttgcaaactcgctgacctcctgccaggtagccgggccgtcctccgcaagtcctgcctcccttaagatgtccttgttgatgtagagaaccggattactcagggaataggggatgcccacctgggaaccctggctgtttacagccagctcaaggacattgggaagaaatttgtcctgaaggaaacccgcatcctccttgtcaaacctgtctatggcttcctgaggggacacataggaaaagttattggaaaaataatccagaaatgcccagccaatctgcaccaacgccggagaattgcctgctgccgcctctgcctggaggttctgcatcagtcccttatacatgtccgggttgtattttgccactacctggatgtggtcgttgctttcgttaaactgcttaaccagctcgtctaccaccaatcctccctgtgtttccgcattacagtgccagtattcgattactgttttttctccggaggagctgtttcccccggtcccggaccctgtaccggtatctgtactggtatctgtattagtgtctgtgccggcctctgccccgcttccggtctggtttaccgctgctgtgccggtctgcgcattggctgcacccgcgttatcccgggctttgctgcctgacgctgcaccgcagccggataaaactgccattgaagctgacactgaaactgccatggccaatgccatcaaagattttacacttcttctcattactccatttcctcctaatcattccgttgtatgttttatcttaaagattgaatgtaaattccggaagataaaatctgtaaaatctttgcaaggaattggaaaagtacaaaaataaagcacggacctaatcttttgtccgtgctttcatccatacatatactgtatcaatttatccgcccgccgtaggggcatgccttaaattcctgaatccgggccatccatctacaatgtgactccctgcttaaagatagccaaatcatgaaaaccggcttcctctgacttaaccttttccccggaagccaccctgagaacatattggaacaattccatggccacctggtccttcgtttttgtctccaccatttcgccggcattaaaatcgatccatcctgccttgtatccggccagctttgaattggaggaaatcttcatggtgggaaccagagtcgcaaagggcgtgccccttcccgttgtaaaaaggacaatctgggcgccggatactgccagggccgtggccgctaccaggtcattgcccggagcggacagcaggttaaggcccttctccctgacgcgttcgccgtactccagcacaccgcacactggtgaggaaccggacttctgggtgcagccaagagacttatcctccagggtggagatacccccctttttattgcccggggatggattttcatagatagtctggttgtggctggtgaaatattccttgaagccattgatgagcttcacagtcctggcaaatgtctcctcatcccggcaccggttcatcagaatggtttcagcgccaaacatctccggcacctcggtgagaatcgtggtcccgcccttggatataagtatatcggaaaatgcacccaccgccggattggccgtgattcccgacagcccgtcggagccgccgcacttcatgccgatgatcagctgagacgcgtcacattccaccctgacatccccggaagccttctcatacagctgtcccagaagctccatggcagcttccatctcatcctcacagtcctggcattgcaggaatttcacccgttccgggtcatactcaccgatatagtccatcagaaccggtatattgcagttttcacagcccagtcccagaaccagcacaccgcccgcgttgggatgatggatgatgtcggccagcaccttcctggtattctcctgatcctcccccatctgggagcatccgtagggatgggcaaacgccacgatatcctccacgtttcccagcataaaacggcgctttgcctcctgctccattgccctggccactgaattcacgcagcctacggtgggaagaatccacagttcattgcgcactccgcatcctccgtccccccgcttatatcccataaagctggatggggatgacttgggaagttcctttatctgaggctcgtattgatactccagcacatcgcccagggcagtgcgtacattatggatatgcacccagtccccgggattaatctgccgggaggcatatccgatgcggcagccgtatttgaccacgggcgcgccctccggtatttggcagactgcaaacttatgtccctggggaatatcctcatttaaaaccactgtatatgggtctgacgcaactgtacttcctttggacagcggctttaacgccaccgccaccgtatcttccctgttgatttttataaactcctgcatataactcttcctccgggccgcacatatcatttatgcctgacaggcatctactccgattcactcagaaccgcgtcgtacgccttgtccataccttctgtctcaatcaattcataccacttctttacatcagcgagaagggggcttaaatcctgtccccagtaatcttccctctttaaaatatcctccaccggagctgttttcatgaaatccatgatttcctggctgtcattggcatcatcggtgcggtaaaatgccatgagagctgccagagaaaaagtaagcccctggggacaggaaccaaacatatccctgtattccagtatggtgggaagcacccttgcccggaatttggacacagagttaagcgcaatagagaggagcatatgcctgataaaggggttggagaaccgttccagcactgcctctccgaatttccggttatcttctgtatcgccaatggccggtataatttccctgaagatgcatttgcgcaagagggcggacaccttttcatccttcaggcactctcccaccgtcttaagtccgtataaatgggctcccagcaccatggaggtatgggctccgttcaggatacgcaccttcctctttttatacgggtccacattgtcggtccagaccacatgaaaacctgccttttgtaacggaagctcatcctcatggcttccctggatgacccacaggtggaatatctcagccgtatccatcatattgtcctgttcgccaatcctccggcagagctcctcatgctcatccctgggaaatccggtgacaatgcggtccaccagtgtggaacagaaatcattttcccgtacaagccatgtctcaaattcctctcccagctcccactgttttgcgtaacggagacagcatttttccagctcctcgccgttgtggtcaatcagctcacaggagagaataatgaaacctttaagccccagccggtaccgcttatataaaagctgggtcagcttgccgggaaatgacctggccggcgcatctgtaaattggttggaatccacatactcgattcccgcttccgtggtattggacacaataaagcggaaatccgggttctcggccagcttcatgtaggcttcaaaatcatcatagggattcacgcacctggatatgatgtcaatatgggtgtgctcatccaccacctgcccgttatcaatgcctctgaggaacaggttgtactcacatccctgctgctccagtacgctgcacatccctttttcaatcggctggactatgaccacagagccgtcaaacagccctttgtcctgcatcttctggaaaaaatagtctgcaaagcctctgaggaatccgccttcgccaaattggattactgtttcttttcttgccatgatacacctccatctttatgtttacaaggaatggataccccgttgtctgcagcggggtatccaactcatattgttaactattaccacaggttgccgtcctcatcaaaaggaagatactcaggttcgctttcaatcgtgatgccgggatgattcctgacttcatcataataagcctctgacagcatgatatgttccaggtgcaggctgttgggaatccggacgattctcggattctttttatcaatttcattgcaggtgcggacgcatacctgtatggcttccttatcactttccatgacaatggggattcggaccccgccaaggacagtacaggttattgcgtttggatacatggaagccaggtccagctggttaaacacccgttttgtagttgcgctggaatatccaagaccgattccgtttccatgggtttcggggctcaaatccagtacacacaccctttgggcattgataccgccagatgcatagggtgtacagaacgtacccgtaatattcgggtccatgccatcaccgctgaaattcttgccaatctggtccacaaccagtacgtcacaggaatccaccagtattctgggcatgtaggtaaatgcctctttgagaaggggcggctctttctccactatgtcctctgcctggaccgccgctatcttacaggtctcatcaaaggcattttctatcactgccactgcaaacagtacaggtgcattctctatgattgcttttccaaacatcggcacatactttgccatgtttttaaagcccgcctcatggcacacctcagccccatgctgttttccaagtccaatggccatcattttcatgataccgctttcatatggtcccctgaaggctgtatggggttttatcctgcagctgacaatgatgccgtccgcttccgcggcatatttgtcaatgaacacatccatgccttcctcattgacgcctatcttttttacttccatggatgagagaatcgggcatcccagataagactcagtgatgccgtaactctccaggacatctttttgtccctctgccgtagctcccccatggcttcccatggcgggaaccacaaagggctctgctcccctggatttaacatagtccgcaattgtctttgtgaccagggccacgtttgcaattcccctggatcctgccgtaatggcaatcctcatacccggcctgactttcgctgcaaaactctcctcggacaggtatccccgtataattcccggtatatcctccggctcaatcctgggccgtggaaacgtctgtcttactttaaacattttaggcaaatcctggctgctcaccaggtccgctacaaattggcgttctctcattttccgcaacactccttatccggcattaataaaatacatttacaaagaacgtagtcaactgtggaatatatgtcagcacaataatatcaattgcaaacaggatataaaatggaactgcttcctttatgaaatcctttgtaggacacttggtaataccgcagcttacaaacatcagtgttcccatgggaggtgtaaatgctcctattgtacagttaaaaatatagaccatggcaaaatggatatcatcaattccataagccattgcaaccggatgcagaagaggtgccagcacgatcatggatgcgtttccttcgataaacataccaacgatcaaaaggaagatattgaccataatcaggaatacatacttattatggatattgcttatcatccactgtgaaaactgctgcggtatctgctcctttgtgagaatccatgaaaaacaggtggcggcagctacaataagcatgatagacgccgttgtcgttactgtttccttgcacccctgcatcacgtttttaagtgtcagttctttatacagaagtcccagcagcaccgcatatacgattgccacagttcccgcctcggaagcagtaaaaacgccaatccttaccccgccgataataatgatcggcaaaagcaatggaagaaatgcaggcctgacagctgctattttttcagaaacaggaatcttagtggtcctgcttggcaggtatcctctctttttggacaaaaagtgtgtaaatatcatcaatgtcacacagagaacaattccgggcccgattcccgctatgaacagtttgccgattgatatgttattgatacagccatagataatcagccctactcccggaggaatcagcggaaccaccatgccggatgcggctgtgatgacggttgaaaatgactttgaatatccctttgactccatggttggaaccagcatcttacactgcatggccgcgtctgccaggctggatccggacaagcctcccatgagagtggagagcaggatgttgacctgcgccagtcctccgggcatcctggctgtcagcacttcacagcagttcataatgcgcttggtgacgcccgtataattcataaatatgcctgcacatacaaaaaaggggattgccaggagagagagtccctctgcgccgcttatggtcttctgggcaaatatggagagattcattccgggcgttcctataaagtaaacggctgacgctgataaaaccgcaatatacaccggtaccttcaggaaaaggagtaccagcaagagaattgcgcatatgataaccagattattcatcttcgtcctcctctaccaatttttctacttcatcctcgtaaccaaacacattgacaagaaaatagttaaatatctgaagcatacaggaaaccggtacaattatataaatccaggtaaacggtaagttgagcaccgctgttgtccttcctgtacgcatgaaaagctgaagataaccaatgcttgtatagcacaggaatcccagtaccgctgtcaccaccagcccgataaaaatactcacgattttgcggaccggttttgg

SEQ ID NO: 3220 - DNA, 22120 bp, Unknown
  gut microbiota DNA sequence
aagaaacagccgtgtcctgctgcattctgtatgaatcatctgagaaaaccacttttcttctttatatcaggccggctcttgaagcgtatctgtcccggcctgaggtaaaggtccttatggaacgctttggttacaggggatgggatttggaagagattttaagccttgtgtccatcaaatatgaggagcacatggaagactgcgccgggttccctcatgagataggtctgttgttgggttatcctgccaaggatgtgacaggatttatcgagaataacggaaagaatttcctttatataggatactggaaggtttattcggatctttctgagtgcaagcgcatatttcagtcatacaatcatgcccgtgagcacattatccatatggtttcccgcggtatgaagattgatgcaatcttaaggatacacaatctgaatcaatataaatcaatgacaatataaggaggatatacgacatgaatcagattatggtagtttactggtcacagacaggcaacacagaggccatggccaatgcggtggcggaaggcatcaggaaggccggaaaggatgccctggtgacagaggtctccaatatttcggcagatgcgctgaaggatgcaggcgtttttgctctgggatgcccggctatgggagcagaagtcctggaagagagtgagatggatccgtttgtggcagaggtggagacgtttgcttccggtaagcatattggtctctttggctcctatggatggggtgatggagagtggatgcgcgactggcaggcccgtatggccaatgcaggagccgacgtagtgggaggagaaggcgtcattgcccaggagagtccgggcgaagatgcactcaatcattgcagggagctgggagaggctctggcggccgcagaagtataatgcagaatcataattgcagataccatgtcttttggcagacctttcggtttgcctttttttggcgctatggtataatgatggaatggtgtcatgattttataaaagcagcagggggatataaaacttatggaaaactcagaaggcagaggcaggattaaccgaaaggagggcagaggatgcagaaggagctccatctcttttaaaatcagcctgagccttttactggtactgattccctttttaattatacttattaccatggcctgtgtcatggcagccggggccatttccgccctgaatgacaaaatactggaggttcagacagattatgcagtctccagcgtggatgactttttcagcagcaaggttacagcagccggcatgtttcgggataatgatgatttgcagacatattttgcatctgtctccagggaggaagatatcagtgcttataaccaactggacgatgtgctgagggtgcttaatagtgctttggttcagatgggggaaaaggagaaggtgatggaggcctgggtggcagatccaaggacagacagctaccttctgtcaaacggcagtgtggtggacgccggtttggaggatactcaatggtatgaatctgtgatttcagggggaagtaccatcataacagaaccatttctggatccggccactcatgagatgattgtctccatcgtgtcaccggtagtatccgggaatggttcagagataacaggtctttttggatttgacgtatacctggatacacttaagcagacactttccgatataaaggtaggagaggcaggatacctggagttgatttccaacagctcggattacatctacagcgacgaccccactgcatccggcaaaaatgtcagtgagataaaaatatcggatgattataaaaacaaggtaaaaaataattacaatggatttgcggattttacatattccggcgtcaaatacacagccatgttccggaactgtgatacaacggactggctggccgtggccacgctgcctttgtcagaagtaaaccacacccgcaattatctgatagagacaatggcgttcgtgtccattctgatgctggccctgctggtcctgctgattgtatttgcggtccgcagggtgctgaagcctctggggggcatcagcgccagtatggaggcattttccagggggaatctggatgtggatatacgggctgccggggatgatgagattggaagactatctgaaagcgtccgttcctcagtgcgctccttaaaggatatcatcgaggatatcacctatatactgacagaggtttcggcgggaaacctggctgtgccggtggaggggaattatataggtgatttcaggtttatccgggaagctctggagcaaatcatcgcttctctgaatgataccttaaggcaaataaacatctcggcagagcaggtttcctgcggttcggaacaggtttccgcgggggcccagacactgtccaggggggctgcggaacaggcaggatccgtggaggaactggcaactgttatcaatgacctttcccagaagattacatccaatgccgacctcgcctcagagggcagccgcttggccgcaaatgtgggagaggaggctgtaaaaagcgatggcaggatgcaggagctgcagaacgccatacacaatattaagaccagtacctttaaaatacgtgaaatcatcaggaccatagaggatattgcgtttcaaaccaacatactggctatcaatgctgctgtggaggctgcacgggccggggacgcggggaagggatttgccgtggtggcaggggaggtcagaaacctggcatccaaaagcgcccaggcatccaggaattcagctgaccttatcacccattcgttaaaggcagtggaggatgggacactaattgtggacgccacagctgtttccatgcgaaatgcattgaacggggtgcagaatgtggtaaagaccatggacgatatagcgtctgcatccagggaacaggcgtattccgtggaacaggtgacccgggagatggaacagatagcaggcgtgattcaggagaattcagccacggccgaggaaagcgcggcagccagcgaggagctttcagcccaggcgctgctgctgaaaggactcttagagcggttccgttttgacaatacggatgtactgtgacaggattttatcatcaacccttatcatttgttcttgacacctacatatagtaggtgtaaactgagtataagaactacaaaatgtaggtgaaaggggttggtcagatggagaaggaaatatcactgcctgaggcacaaatggaggttatggaggtcatctgggacaaaggaggaaggaccatgttcggcgttctgggggaggaactggcagccaggggaaagtcttggaagcccaataccattctgactctgttatcacgtctgactgaaaatggtatgctgaccgtgcgcaagcagggcaggctgaacgaatatgtttccctggtgtccagggaggagtaccggcagacccaggcccggcttctggtagaccggatatttggcggagacacaaagcatctgatatccgctcttgtcagtcaggaatatctgacggaggaggattatgaggagctgaaggcgttctgggagaagggaggagataagggatgaatatgtgcctgaagatgctctttaccctgtcactgtcaggaacagcactgattttggtgctccttggagccacacggatatttggcagccatatggggcgcagatggcagtattacatctggctggcagccgtgctcaggctgcttttgcccataccatccccggccggccttatctttccggatgctttaagcagcgggatgtccgccggccttctgtctgacggggggaatctttatgcctggatggatggacgttccggcagcggaaatcctgcgggacagccggaatcggttatgggagtgcgtccgggaacggggacggagagattggcggaaacaggagatatggaggagatggctttcacggtgggagataccgcaaaagctgataccgcaaaggcctataccgcaaaggcccctgggctgtatctgtttctccttacactgtggctgtctgtggccgctttgctgatgggaagaaggatatggaattacaggtccgcagccaggctgtataagagaaatgaatccctggctattgcccgtgatggggggctggaggcctatggcgcaccgctggaggaagcctgccgtgtctgcggcctgaacaggagaccgaggctggtggtcagcagcacccttccttcgccggtgacaatggggctgttgtcccctgttatcatcatgcctggtgattttccggcagagagggcatattatgtatttctgcatgagctcacccatgtccggcgtatggatgggttttacaagtggctggtggaggcggccgtatgcctgcactggtttaacccggctgtgtatgtgctgcaaaaggaggtatcccgggcctgtgaactgtcctgtgacgaggaggtaatccgccgtatggacggcaggaataaacacctttatggcgagattctcctcaccgcgctcaggcgccgtcccatgccggtgagtgcagatatgggccttcctctcagtgaaaatgcaaagtggatgaaggagaggctggtttcgatcatggaattcagaaagagaagcaggccatggtccctggcagcctgtataatgtctgcaacaatcgtgtccatggctgtgctgtgcggatttgctccgttacagagggaaaatgggacggttggggcagagaatgttctgacaggcgcggcagatcggctgggagcgcagacgatagcgggaattgggaaagcagatacatccgtcaggtccggcgggagctttgccgattcagaaacgatcagctggaatgagtatgaggatgtgcgccgcagtccgaaccagaaaagccttcagacaaaaatgttctgggtcaatggttatatcgtggttctggcctggaacgtggaccccggccagtatgatgtagtccggcaggttgacggaaagcctttatgctttactggcaggacggagcaatatgcagataacagcgccatagctgaggcagtgcggcagtctattgaaaagcaaaagctgagtaagagcaaatacgggttccggccggagcagatggccctgttggaagcggcaggcccctttgaaggtacggcggatgaattggcccagcgcttctatgaggcggataatctgtcctactttgcagccgtgtcaggcagtgtaagcccggaaacctgtgccagcctgatggaacagttttatgccgagaaccagatagagtattttgccattatctcggaaaatgatgccccatcccttaaggccagaaaaacagagatggcaaagcaggctgccagggccgggaatacggacattttttccatattaaaggatgagctgacggatgctgataaggcggaaatcgcccggaatgcataccagacagaccatgcagatatattctatatgacatatgagtcattgaatcaggaacaggccggggaaatggctattcaggcttatgaagaggaccgggtggaatatctctatgttcttaaggagcggctgtcctccagccagatttcatccctgaaggaacgtgccggaagggatgggaagcaggagttcttatatgtgctggattaaccgtatgaggtaagtaaaaatgtgtttggccatgcagcagggcagcgcaggaatttgggcgccgccctgtattgcacatcaggttccggcagtttgaatggcagctttaatggctgtcttaatggaaacctttacaaggaattaacttgtaaaagcagatggaggggtgttagaatatattatttagtaaatggattggcacagagcccggaacaggactgtgctcccgggacggaggagctacatgaatcaatttgtcacggaacagcttatctacgtattacggctggtggccgctgctctctgcggcggccttattggctgcgagaggcagagtaaaaagaagacggcaggcaccaggacccatgtaattattgctgtggcctctgccatgatgatgattatttccaagtatgggttcggggatgtgctgaacgagtatgtaaaactggacccttcccgtgtggctgcgggggtggttacggccattggctttattggttcaggcatcattattttccggaacaacagcgtgaacggaatcactacctcggccggaatatgggcgactgtgggcgtgggtatgtccatgggagcgggaatgtatattctgggggctgtatccacggctatcgtgatgctctcggaactgttcctgggcaggaaaggttatttttccagaaggaacggggaggacaaagaggtggagattgaatactgtgaaagtctggatgaggacatcttccagttcatcaaccggacattgcaggaccaaaactgcaagatggtgaatatccagcttacagaggaggcgtccacctatgtgctgacggcccagttaaaaacgcctgcgtattacgatatgtccggactggtgggagagcttaagaaaaaaggccagctgaagcgtatatccgtgcagtgagcctgtcatagaacatgattggcagctgagtgatgaacgggggcaaaagaggatgatcaaagagactcagaataaaccggaacaggaaagaaaggcggaaaaggccgtgctgtccagccggcaaaaactgcttatcagggcgccccggactataagaattataggtgcgattggaatcgtattcgggggcctgatgtcgttttggtgctatcgggattacctaaatggcaatgagactgcgtcggcaggtatgtccctgggatttttactgatttttggcaccatgggtttatggctttggtgttatggatgcagaatgctccaggtcaaaggggaggagatcctgtttcgggatatatttttcagaaaacacagatacaccctggatgatatatgtagtgtgagatggaaccatgacggctttttattttcaggcagtaccggtaagctgtttaaaatttacggctactgcccggattgtaagcggctgtttgaactgttggaggaacggggagcacaggtggaccttccggggcgaatgttcagcccggagcagactgcggcggttcatccggagcctgataaacgccgtttcctggtcaggacttccccgtggcttccaaaagaagtgtcaaagattgaggtgagaggaaggcagcttgctgtaagtaagctgttccggaaagagtttacatgcagctgtctggatgttgcaaaaatacagctgaaggaaaataaggaaggaagactgaacgcccggatttacggcggggaaggaacgtgtctggcaaaggtacggaccttttcagcagatgcgtctgatatgcgctgcgcatttgccttcctgcgtcacatgatagagcttggcattccagtcgagggggcggagaaaacaagtgagtatgtccggtgcctgctgcagaacagatttgtgtctttttcaataggacaatctctttttaaggaggaataccaacggatttgcccgctgcttgacagatatgcggcagttttttcggatttgggaatacagatggaatatggtcccattgacaaagagcagaaggaggaactggagaagagcctggcgttggaaaagattacgtatgataccttcaaccgcggatttttcatatgccttcaaagagacggtcagatgcttttcgataaaaaggcatccctgcctttggctgagatggtgatgctattggcggaggcgccggaaatggggaggggaaggcgggaggaccgatacctggaggaccagggcatggcagccgtacaaaatcttctgtacttccggcccataccggaaatcgttatacagcagatactggaatattttctgaataaggtcaaaaagaaacagatacatatatctgacattaaaagggactggtcgtgattttgtccctgcctgtatcctgggtcatgtttttgctgtgcacaacaggtgggccagaacatatgacagaccgtgcggcgggaagtctgcacagtctgcacgctctgtccggtactgtaaattatttctgtccggtactgtaattctatttctcccgaagcctgaccttattcctggcgctgcgtcttctctcatcctccagcgcggcatagtgccgcttagtggtattgacatcggagtggccaagcacatcggccaccagatagatgtcgcctgtctccctgtacaggttggtgccataggtgctgcgcagcttgtgaggggtgattggttttaaaggagctacggtgcgggcatactttttaaccagattttccacgctgcgcacagccattcgcctgcgctgcagggagagaaaaagggcgtcctcatgtccctgctccgggatgatgcggtcgcgttcctccaggtagtctaaaagggcgtcctccacctctgttccgaagtatacggtcacctccttgccgcccttgcggtatatgcggatgccgccgttcttaaaatcaatgtcggagatattcagccccacacattcagacacacggattccggttcccagaaggagggtaagaagggccaggtcccgcgtctttgttttggcatggtaatttttctgtttatcggtcagcttgtcaccctgttccacctcgtccagaagaagggccacctcatccacgtccagccggatgatttccttttcatggagcttgggcaattgtaccagggccgccggattgttcttaattcgctcgttcctgtaatagtagttgtagaaacttttcagggaggatatttttcgcatgattccccgttccttgttcatgacctcctggttcttgtcattgaaacgatatttcaggtattccatatattcctcaaaatccgtgacagacagctggtccagctggtccagtttgatatcctgcaccgtaatcctggcaagggccggattttccttatggaggaaatcaaagaacacatgcaggtcataggcataggcgatcctggtcctggaggatgtcctgggctcgattccgcggaaaaagtctccgcagaatggcggcaggtcttttatcagattgcgcagccgcagaatgttttcccggtctacctgttcatggtatgataattgactcatgtaagtggatgcctcatttcataaaaagtattgtcgtgtcagacacgctataatatatattttagcgtcaactgcaaatgattgtcaattgattgttttttccttatggattttgttgtataatagagcaattcagataaacaaacagagaaagaaggcaacatggaattaaaattagaatttggcggccaatcctgcggcgtgtccatcttccttcctaatgggacaaagccggagaaaaaggcggcggatgaactgaaatcaatgatggaacttaccggtactgtggagcggatgaaagagtccggcgttttttcggcggaaaaggaacactctgtcataaaggcagcagtgactccggattttcacaagggagccggcattcctatcggcactgtgctgatgacagagggattcgtgataccccaggccatgggaaatgatattaactgcggtatgaggctctatactacggatttaaaggaggaagaactggaatgctgcctggtgtccctgctgccccaaatccgccgtatcttttttgaaggcggacgcagtatacctatgaacggaatacagagggaagccatgctgcgacatgggcttacgggattgctggagacttcgggggaggcagaaggaaggggaatatggtccctttatgacagggatgaacaggaaaaagccctggagtacacggcctttaagggcagcctgtatacgaccggcaccgagggcctgggggattttatcggggccgcccatactttgtcctatgatgaccagattggatccattggaggcggaaatcattttgtggagatgcagcgcgtggcggagatttacgacggccggacagccaatgcatggggaatcaggaagggaagtatactggtcatgattcattccggatctctgaccatcggccaccagagcggcagaattaaccgaatcataacaaaggagctgtatccgaaaggagttccccatccggacaacggaatttatcttttgcccgaaagggaaaaaatggaaataaatagcagagaaaatgttccggtaagcgataagacagacagcccatggcagcgtttctgcagcactacatacaacgccgctaatttcggatttgccaaccggttattcctggggcttatgcttcagcgtgccgtgacagacaaggtacggccctatgagatgaagcttctgtacgattcaccccacaactttatctggaaagaggagatggagggcaggaattatttcattcacaggaaaggggcctgctcagccagggggatggaggggatggagggaacgccctttgcctactacggggagccggtgatgatacctggttccatgggaagctccagctatctgctgagaggcatgggaaatccgcaatccctgtggagcgccagccatggagccgggcgcaggctttccaggggagaggcgatacatggaaatgaccgggaatttaaggaatttatgaaaaaattccatatcgtgacacccattgatccggaccgaagtgatttaaagggccggaacgatatactgaaaaaatgggaggaaaccatccgctctgaggcgccctatgcctacaaggatatccaccaggtggtaaaggtccatgaggaacacgggatggcaggactggtggccaggatggagccggtgtttacggtgaaggcgtagaaggggaaaccttatcagaatatgttaggaagaaaccgctgtatgaaatgaggaattgctgacggaatttttcgcgatgacacctcatataacagcggttttttttgcgggaacaggaggaaaatctggtaaacaggaatcatatggatgacaaatgtgaatgacaatgacatatgtcactcacaaaatggcaaatgacatctatctaattccggcattgtatcttataattgccacatagtgataaggaggtgttattatggcggagaggccggcagaggataagagtggtatactgccagaaacgtctatcttcttttatggaataccggcttacgggcatctgcattcaaacctttatttaacaggatgcctgtctgctgccggatacagggttgtttattattcaatggagccttacaggagagaaattgaggcaaatgactgtgagttcagggcttatcctttggaccgggattccattgatgcttctgacggggacaagccgttaaaactgtaccgtctgattctggaatacacccgcgatatgcttcctcatcttctggcagaggcagaaaaggagaaaccataccgtgtcatatttgattctctggccctgtggggcagggctgtgggagaaatcatgaagataccttcatacagcttttacagcattgcggtcatggaccgtgtaggagggaacgcattttgggcgtatgcatccgggttctcagcctcttttctccggtatgcgggagaatttaatcgggccatggatgtccgccgcaagctaaggcaaacatatggaatcagaaagctgggtgtgctgtctgttttgatgaacaggggaagcagtaatctgatgggatattccaaagacttccagccgggcggaaacaaattgggaaacggttatgtattcctgggacccttggcgccctttagaaaggtcatccagaccaatgattttgtttgtcccgatgacaggctgatttatatttccctgggaaccgtatttaaccgggatgagggactcctgcgggagatactgcgccagtttgggcaaaaacatccggtggatggggaaccgtataaaaatgagaacccctggaatatagtcatggtctgggatatggaaacggccggcaggaacacagacaccaagaaggatgaatggaaacacagggataactttattatccgtcctttcgtcaaccagggtgagatactgaaacatgcggacctgtttatcacagcaggaggaatgaacagcattcatgaggcattgtactacggcgtaccctgtctgatgtgcccccagcagggagaacagcggctgaatgccggtcagtttgaagctttggggtttggacggatactgagggacaggttggatttatatggggaagccatggctgcaatgaagctgaaagaccagtgggatgaaggactcagaacagaaatgtgtgctgtgcacatggaagcggcactgcaattatttgatgaaaacaaatgaaaaggccggctgaaatatatggataagaggggaaacaaagtatgggaaagaccgtggaaaacggaaaaaatacagttcttataacaggtgcaaccggatttctgggagaatatctggtaaggcgtcttacaaaggaataccgggtcctggcaatgggaaggaaccgggaacaggggaggaaacttgaagggctgggcgctgtgttctgcccgggtgattttacagaccggaaaacgtgtgaggcatattttaagggagtccggtatgtgattcacgcaggcgcacgttccactgtctggggcagatgggaggatttctaccggacgaatgtggctggtaccgcccttgtggcagagctttgcctggaaaatgggattgagcgtctggtatatatatcgtctccgagcatctacacggtaaaatgcgaccgctatgatatccgcgaggaacaggcaccaaagtataatgacctgaatcattatatcaggtccaagctatcagcggaacgagtggttgaggacgtacaccagaagggattggagactgtcatcctccgcccgagggggatgattggggttggggatacaagccttgtgccccggctgctgcgggccaatatgcgaattggaattccgcttatgagggagggccttaatacggtagaccttaccagcgtggaaaatgtggctcaggcctgccagttagcgctgacagcccgggcggctgatggcatggcgtttaatattaccaacggcgagccgatggaattcaagacattgctggagcattttcttgcagctatcggagagaagccccattacagaaaactgccctttggagctgtctatggcatggctgcggccatggaatgggtatacaggagcctccatcttccgggagaaccggcacttacaagatatacagtgtgtaccctgggattttcccaaaccatggatatcagcagagccagaaccatattgggctatgagccggaaaagacattgatggaatccatagaggaatatggaaaatggtggaaaaacagggacgagccgattccggatcgtatcgccagggtaaagatgtatcactgcggctcctgtaccaatgacctgggtctcctgtttaagaggcatcccggccaaaagagggagtttccggccagagcgtttctgatacagcaccgtgacctgggcaatatattgtatgatacaggttattcacaggctgtgtatgaagatggatttcttctaaagctgtaccgccggctgaatccggtccatgtgaagcctgatcagatcattgatgagaaattgagggcagacggcataaatcctgagagcgtccaaaccatcattctgtcccatgcacatccggatcatatgggagggcttaaacatttccacgggtatcatctggtggcaacagaacaggtacacaaggcgcttctgagaccctctgtgaggaatctggtgtttgcgaatatgcttccgaataggtctgcgcatatgcatcccaagcgttggggcatgttttccggtacgcccagggaggcagtatcagagcttcctcaggatatgatgacagatattccatcgggaaaatgctgtgaagtaatggggcgaacgcccaaaaaacggctgtcagaacactttttatgcagatattttgaacaggtgtatgacctgttgggagacgggagcatcataggcgtggtgctggacggacactgcagggggcagatggggatatggattcctgattttaagctgcttttggcagcagacgccagctggggcggcgatttggtccgccatacgcttgaaatgaggctgtttccgcgtctgatacagaatgactttacggaatataagaaaacattaaaaaagctttgtgagcttcacagggaccatccgcagataaggattgtgtttacccatgaaaaaggaagcgaggaaacatatggctgatacgttatctgttctcaaatactatctttactacaaatacaaaaagcggttttcagacagaagcgccctggaacggtggcaggtacaaaaaatcatgaagcatctggagtatgtgggggagcattcccggctttacaagggaatgaaaaaactgtcctcttatccggttatagacaagaagtttatgatggaacattttgatgaactgaacacagttggaattggcagggaggaggccctggaatttgcggtcctggcagagcgccaacggaatttctcacctaagcttaagggggtaacagtagggctcagttccggcacatcgggaaaacaggggatctttctggtatcggatgatgagaaaaaccgttgggccggatatattcttgcaaggttcctgccgggaagtctgtttgagacgtattccatagcatttttcatgagggcggacagtaatttataccaggcagtgaagtccaaaaacatacagttccatttctttgatatttacaaggatatggaggaacacagaaaacggctggaagaaatccgtccccggatactggcaggacagccgtcgctccttcttatgattgcagaggatgtaaggaaggggaaaacggatatttgtccccggattgtcatatccattgccgaggtgctggaacaggcggatgaacagaggataaaggaggcgtttggcctttctgttattcatcaggtctaccagtgcaccgaaggatgcctggcagccacctgttccatgggaacgctgcacttgaatgaagatatagtgtacattgagcgggagtatctggatgaccggcggttcgtgccggtggtgacggatttagagagaaaggcccagcccatcatccgttaccgtctgaatgacatattggtggagcgaaaggaaccctgcggctgcggcagccccttcctggctctggagaagatagaggggcgcgaggatgatgtgttttcctttaaagggaaggacggaaggaatgtgcctgtgttcccggattttatcaggagatgcatcctgtttggggataagggcagcggtgaaaaccaggcagggtcttccggagattacaggattgtacaggagacggatgggcgtctgactgtgtatgcggacatggcagaccctggtaaacagagggttttaaaggagtttgaactgctctcaaaagactgcggcttcctgctgccggatatttccttccagccgtacagttgtgaaaagggaaggaaaatgaagcgtgtggagcgcagaggtgcagagccggtgaagggaaggtacatatgagggaacgcaaggtgaaaattgccggctggggaaacaccctgtcgggaaagaaaatagagtttgatggccagacccggtaccgtctggataaagatgaaaccttactaatgcttgcggttaggtctgcccgaaaggcattggagcgcgcggccatggatatcagtgatatggactgcattgtatgcgccatggcaaccccgctgcaggccattccctgcaacgctgccctggtgcatgaacagctggccaagggactggacataccggctatggatattaataccacctgcaccagctttatatcggcattggatgtgatgtcatgcctgattgaaatggagcggtacaagaatgtgctgatcatatcaggcgacacggcgtccgcggccctgaatccaaggcagaaggagagctatgagctgttttcagacggcgccagcgcctgtgttttgacgagagctggggaacaggagtcatcggaaattctctacagctgccagaaaacctggtcggaaggcgcccatgatacggaaatcaggggaggaggaggcatgatgccggcattttccatgaatgatgaaaaccgcgaggatttttacttcgatatgaaaggcaaacgtatcctgaagctttctgcccagaatctgcccggatttgtggagcagtgtctgaaggaggcgggggtaaagcgggagagcattgacctggtggttccccatcaggccagccgggcgctggatgttattatgcccaggctgggctttaggaaaggaacctatatagaccgtgtgtcacaatatggaaatatgatttcggcctcagtaccctacgctctctgtgaagccgttgaggagggacgggtggggaagggagacctggtgctgctcatcggtacggcggccggtctgacggcaaattttcttttgatgcggatttaatggggatgtctgaaggtgttcatttccaagccggaacctgtaaatctatattgccagctccagatatgccccgtatccttcctcctccatcctgctgcggggaatgaagcggagggcagcgctgttgatacagtagcgcagtccgccggtcccggcaggaccgtcttcaaacacatggcccaagtgggaatcaccctcgcggctgcgcacctccacgcggtgcatgccatgactgctgtccggaagctccgtgacggcgcaggacatgaccggctttgtaaagctgggccatccgcagccggaatcaaatttgtgggcagaggtaaaaagaggctctcctgtaacgatatccacatatagacctggttcgtgatgattccaatatggtcctgaaaagggcctttcggtggaggcattctgggtcacgtcatattgctccctggtcagctgtttctgaagctctgcccgatcctgctttatgcccgttctgccgtccggacggacaatgaggtccttgagactgctgaaatcaatatggcagtaaccgtggggatgattttgcagatagttctggtggtaatcctcagctggatagaaattcctcaatggttctaactccacagccaggggctggctgcagtccttctggatttcaaacatgacagactggatggggccgagatcctcatcgctgatatagtagataccggtccggtactggcttccgaggtcatttccctgacggtttatgctgacagggtcaataattttaaaaaactgtctgaccagtatgcgaagtgcaacaatgtccggattatacaaaatacagactgtttcagcaaaaccagtggtgtctgagcagacctcctcgtacgttggattttccacggctccgttggcatagccgcactccgtatcgcagactcccggtatacgggaaaaatattcttccaccccccagaagcatcctcctgcaaaatatattttctgcatgatcctatcacatccttttctatgttttttctgaattgaatccatgattctattatgccctggtaaaggactaaaatcaatgaataatgaatgcggcaatcaaaaggagtgccgtctgcggcagagagagctgtttaatttgttgcagactgtaaaattctggtgtaaaatcatattatacagacggttaatacaggtctttgggctggaggttctatttatggaaatgttggttttcggaattgccgcagcagtatcctattggtatgaaacagaggtttttttgtttttgggcagcgcgtacgttacgtgcaggtttttgtataaatggtatatgccgctgcttgagacctggccgcctgaacatggggagacggggcgccgggttttgggctgcctgccccctgtttccttggccatcatactttttgttctactgaccatggcatcctatgacgtggttggaatttgggttgttttttatattcttatgggatatgcgtggatatgcggcggggttttcatgatggaatgcctggatttatcctggccctttgacgctgtccacctggataataaggctgcggtttttccggctgccgggggatttgtgggagtgactcttatttacgcgggagccaacacaggggatggacccggctggtgggttgtcttatttgccgcaggactggggttaattacctggcttggactggcgctggtgataaatctcttgactgatatatccgagcgggtcagcgtggaccgcgacatgggcagcggcatccgtttcggtgcttatctgattgccagcagcctgatactggcttatgcgtcgggcggggactggacctccacccaagccacgctcatggagttctccgttggatggcctgtgcttccccttatgctgttttctcttgcggtggagtggttttacatacgtccgtcccgttcccttgcggacaaccgtctgcaggcaaatatacttccgtcagttctttggggggttatttacctggtctatgccggtattgtgcttttgatttttcatgggattccggaacgtatttccggcggggtactcctgtgagcggggcggtgcttgcccggattcccggtgaacggtattcggattaccgttatgaggcaatttttagggcatacaaatgggatcctcaggtggaggaccacaacacagtggctgagcatgtggtgcttctggacagccagacagccagacaactggaacaatgggcggaacagctgtccgctgagactatggagattgagcaggctatgatggaacggagcgatttggtaaaaaaactgggcctgccgtctaaggtaaagaaggcaattcccagaatgggcagttattccccggaaagacatgttaggctcatgcgctttgactttcatcccaccacagatggctggtcagtatcagaggtcaacagcgatgttccaggaggtctggcggaagcgtctgtactcccgagaatcgcgcagccgtattttccgcagtatgaaccacaaggccatgtggcccgcagtttgttggaggcattccaaaagagaaccggtcccggtgtaaggattgcttttgtacatgctacctcatatgcggatgaccgccaggtcatgcagtttttaggggactattttgaagaaaatggataccgttccctgtatgcggcccctgaccatcttatctggagggagcagcaggcggtaagcctgattcagggggaagaaggccctgtaggcggaattgtgcggttttatcccctggaatggctccccaatctttccggacgaacggactggggcggttattatgatacacagacaccatcctgcaaccatccaatcgctgtttttgcccagtccaagcgtctgccgcttatatgggatgagctggggcttgaactgcctgcatggagggcattgcttcctgagacccgcgctccggaggccggtaaatttggggatgggtggatttacaaacccgcccttggccgtgtgggggaggggatttccattcgggaggcactgactccaaaggaatacaggcagattcagagaaatgtccgctggcacccaaaagactggattgtacagaaacggtttgaaagcaaaccggtttctggcgatgagggggaacattttcatctctgtgtgggagtgtttacagtagatggcaaagctgccggtttttatgggcgcatcagtccctttccccgcatagatgccagggcaaaggatattcccctattggtggagaaggaggataaacccaatgaatgacaattacaatacataccgaatctgggcgccggacaatgctctgtggactcagtgggccaagccggtgctgtttgcccggacgctccagcaggttccggaaaagctggttctgcctgccgttaaatgggccccttatggggacggcagaacggctctgtttgtggatttgcctggaaagagaggcgtactggagggacttgccctggctcaaatgggttaccgtcctgtacctctttataacggtgtctacggcgccgataagtggtccatggccgtggatgtaacatctgtggcggaaacgttgtatcaaggtgcagattaccttagctgccagcatattcgtccagatgcgccgcctgcatttcttctggatgcggccagaatgaaaggtacggcccgacagccgggaagatatgataaccgctggtgcgtctttccgcaggacgccccctcggctgattttctgaaggcccagggtatcgaatccatttatgtaagaaccaaggagatacagaatgatctggcccatatacttctgcgctatcaaaagaaggggattcggatttatcaggtcagggataatggcgtgccgaaaaagctgactgtagtgaggccttcccattttaaaagttttctgtaccgcttttgcacattgctgggactgaccaggaatgcagcggggggattcggcggaatggtgcccgaggccacccagtcctcaggaacccggtattatggtattggctaggaagcggcggaagaatgcgaaatcgtcctattgccttgaagatgtctgccaggcaatagggcgatttgttaaaagaaatgctattatttttcatacgttaccagctggctcagggcaattctctgccggtcaaagcggctggtatcagcagttccggcattggaatatccaattgccagaatattgattggttcaagatgttccggcagttcaaactccctgcacaaaatgtccggattaaaatagcatacccaaacgcttcccaggcccagttccgtggcctgcagcatcatatggtctgtcagaatagaggcgtcaatgtcgccggtctgttttttgtcaaagggacgaacccatgccttctcatggtctgcgcagacaatgatggccaggggagcgccgtagatgttagcagcctttccgatttttgcaaggctttgctcactttgggcgacaatcagacggatcggctgcagattggcagcagtgggggcaacacgggcggcttccagaattttctccagcttttctggttctacatgctgactggtataactgcgcacagaaaaacgctgcttggcgatactgagaaactccataatattaaattcctttctgatttttattatggcatcaaatcaaccattgattttacaaccattgactttattttatcatctgtcatataattcacaagaatgcacttttaaggtagatacttcccaaaaccatagtatccccgtaagcaatagcaggacaaacaggaggaaatcatgacacagcaggaaagaagcatgttcaactgtccggtggaggcgaccttatccttgattggcggaaaatacaaaccaattattctctggcatctgataaaagagccgcttcactatatggagttacagcggctcattcccggcgcaacacctaaaatgctttcccagcagcttcgcggcctggaaacatcgggtatgatttccagagaagttagaccggagaaaccgcccaggactatctattccctgaccgaattcggcaaaagcattattccggtgctggatgtgatgtgtacctggggaacggattatttaaacgggctgaatgtgaaaacaccttgtcagaagcaggagaggggatgagtggagggaaagactcatagcatttttatgttagttagattatttggtttacgtaaaaatattatgtaaacacaaagcgtgtgagaaaatattaagtggatacaaggtatcccgaaagaacactaaatcccttgtgcattttaactgcacaggggatttttaataaataataaatattatagtcacgatagcctctctgataaatattgaccaaaacagcggcttcccataatgcatattatcaaccaaaacaaatatctcctatttagataaatgcggatacctgtgcgcataac

SEQ ID NO: 3221 - DNA, 8408 bp, Unknown
  gut microbiota DNA sequence
tgattcttgacaaagaacaagagtaggagtattatataagtataaaaacaaaacaaagttttgcaatgcaaaacttattattttaactcatattacaaaacaaagttttctattacaaaacaaaagaagggaagggtaatgagagagaacgatatcttaaaaggggaacagggtgctctaaagcgggctctgtacaagtctatgggattcaccggggaacagctgggcaaaccaattattgccattgctaacagctacaccaatgcgacgccggggcattttgtattaaaacagctgtgcgagagcgtaaaggaggggattatcaaggcaggaggaacgcccatggagttctccacggtggctccctgcgacggtattgcggaaggccatgaggggatgcgctacattctgcccaccagggatttgattgcgtcatccattgagtgtatggtaagggcccaccggtttgacggactggtgctgctgggctcctgcgacaagattgtaccgggcatgctgatggctgcggccaggctggagatgccggccattttcctgaatggaggtcccatgtatccggcttcctactgcggcaggcattacgacggaaacattgtgacagaggctattgggtggaaacaacagggaaggattgatgaagaggagttccggcatattgaagatattgcggaaccgtgtcctggctcctgtgccatgctgggaactgctaataccatgagtgccctatcggagagcctgggaatgtccctgatgggaagcagcaccattccggctgtcctggcagcccgcatggcaaagggggttgagaccggagagaaaattgtagaactggttcaaaagggagtcaccacaagggacatccttacagaggaagcatttgaaaatgcggttatgcaccttttaacaatgggcggatccaccaacggtattctccatctccaggcaatttatcatgaagccggactgggggaactgccgctcagtgtatttgatgaattcagcagaaaaattccgcaggtggcctccatttatccggcttcggaatttgacatggttgacttttacgagggaggcggagttccggccgtattgaaggagatagaggaatacctgcacaaggataccctgacggtatccggccttacaatgggggaggcactgtcacggttttcttataccaataacagaaacatgattaaaacggcagaggagccctttgcacctacaggcggtgtcgccatattaaagggaaacatagcgccgctgggatgtgtaatcaagcccgcggccgtgccaaagcacatgttcagatattcaggccgtgcccaggtctttaccaccgaggaggaatcctatcaggccgtactggagggcagggtgaaaccaggcacctgcatggtcctgatgtacgaggggccaaaaggcggaccgggtatgcccgagatgtacaaaaccatgaaatatctggagggaatggggctgtctgatacatgcgccctgattacggacggaagattttcagggtccaaccgcggacttttcgtgggccatatctcacccgaggcatatgaacagggggactttgctctgatacaggatggggatgtgattgaaattgatgttgatgccaggagcatagaacttaaggtgccggaggagatacttgaggaacgcaggaaacgttttgttcctgtggaaaaagaagtaaagcggggatatctgaggacatacagaagaatcagcgcatctgcatccaagggagcagttgtagaataaagaatactaagagaaggagtatttaaaaatgaagaagagaatgttagcagcattattagccgggagtatgttattgacagcatgtggcggcacagggggacagacagcgtcacaggcaccgaagggagaggcatcccagagtgcgccggcagacaccgggacacagtcaggccagaaagttaccatgaaggtcagcgtgggtgtggctgataaccattttgaggcggttgctgtaaataagatgaaggaatacatagaagagcagacagggggaaacttcacggtagagatattcacaggagcccagattggaaatgaccaggaggtttttgagggactgaagctgggagtggcggacatgcttccctgcggtacggatatcatcggaaacttctcaaaggacttcggactgctgtcactgccatatctctttgacaacgaaaagcaggtggaggctgttgtggaaggcgaattcggacaatcactgctaaaggagcttgaggacatcggctatgtgggtctgggatttggaaactttggcttccgtcatacaaccaacagcaagcatccaatcaacagtgtggaggacatgaaaggattaaaaataaggaccatgaccacgccgattcatctggaggtgtttgaggcattgggggccaatcccactcctatggcattcagcgagctgttctctgcattgcagcagggcgttgttgacggccaggaaaatccgctaatgaatatttacgctaacaagcttcatgaggttcagaagtatcttaccctggatggtcatgtatttacctttgtcacatttgtcgtttccaaggattggtatgataaactggatccatcctaccagcagattctgaacgatggtataaagatagccactgagtatatgaaagagagctgtgagtctgaggatgcattggcccttgagaagatgaaggaagccggagttgaggtggtggagcttacccctgaggcaaaggatgaattcagggaagctgtgaagggtgtcagcgaaaaatacggcaatgagataaatccggacagatataaagaaatgctggatatcattgcagcggtgcagtagatgactcacagaaaggggttacgtatcaatgaaaaaaaagaataactttgaatattatctgattgtttttctgtttacgattctgatagtggtgtgttttctccaggtgctgttccgctttgtgttcaatcttccgctggcatggacagaggagctgtccaggtatgtattcattatcctgatatactgcggtgccagcgcagctgtgctggacaacgcccatgtcagggtggagctgattgataatgtactttcagagcgcggcaggtttgcgttagacattgcagtaaagctgctgtgcgctgccgtcagcctggtcatcgcctacaactccagacagatcatttataatgccagcctttccaaacagctgtccgcctctctcagaattcctatggcaggcctgtatgcactggttgctgtcatgttctgcctgattgccttcagattcctgcaggcagtgtttaagatgatagtccggaaaaaggaggttgaaaccaaatcatgagcatatttctgatgatgatggcagtatttctggtatttgtattccttgggataccggtatcgttcagtataggactgtcgactgtggcggcggtcctggccaagggtatgcccctggcgtttgtatcacagatggcatttacgggattggactcttatacatacctggctatccctatgttcattctggccggctatcttatggagaccggcgggctgtccaaaaggctggtgaattttgcagccagccttgtgggaaacattcatggagggctgggaatcataaccgtgctggcctgtgcttttttcgcggccatctcaggctcatctccgggtacggttgcagccgtaggtgcgatgatgattcctcccatggtggagaaggggtatgacagggatttttccgcagcattgacagccagtgcaggttctttgggagtcctgattccgccatctattcccatggtgctctactgtattgccggtgaggtgtccattggagagatgttcatggcaggattcatacctggtttcctcatgacagcagccctggctctcaccacctatgtgatttccaaaaagaacggatacaagtctgatgagggagaatttgagtggaagaaggtggctgccagttttaaggaggcaatctggcctctccttgccccggtcattatcctgggcggcatatacagcggtatctttactcccacggaagctgccgtggtggtagtggtgtattccatgtttgtaggactgttcatcacaaaggagcttaaagtgtcggacctgcccggtattctctataaaggtgcagttacagcaggaaccactgtattcatactggcatttgcaatggcattttcacgctatctcacattaaaccagattccgcagctcattggaagcgtgattctgggcatcacgggcaatgtccatgtgattctgattctctttgtgctgctatgttttgtgacaggaaccttccttgagacagcttctcaggtgctgatttatacaccgttgttcctgcctaccttaaaaggactgggtgtcagcccgctgcattttggtattctgcttacagtggggaccatgctgggcatgatgacgcctccggtgggaatcaacctgtttgtcgcgcagggaatcagcggagcaaagatatcaaagatgaccaaggcaatccttcccttcctgtttgtgatgctgtttgtgcagatactgtttgtgttcttcccgggcttttcgaccttccttccgggattgttctcaaagtaggggcaggattaaccggttgaccgcaggcgagcacataaactataataaataaaaaaggtttggagttgggtgaatggaacgggaaagtcaatatacaatctcatcggtaaaaaaggcgctaaaggtattaaaactctttgacagtgcccataaaagcatgacgctgactgaaatcagcgagagggcagatatgcgcaagggaaccatggtcagggtgctgacgaccctggaggaagaagggtttgtaaggtacgacgagatttccaagcgctacagccttggcatgtccatttacgtgctgagcagcaatgcatttcagtttataagcgttgtggaagctgccaggccttatctggagaaggttacaacagaactgaatctgattgcccatctgtctgtgcttgaaggcgaaaaaatcgtgctgattgaccgtgtggtgcccaacgcaaacgctgttgtctttgatttgaactctaagataggcggtgaagtggaggcgcataatacgggggcaggaaaggtgctaactgcctattctgcggcagaggtcagggagaaaattatcagtcattgttcctttgaatcatattcagagaggaccatcacggataaggacgagtacagaagagtcctggatgctgtcaggaaaaacggttatgccaccaatgaaggggaaagtgaaccttatttgaaatgtattacatatcccatattcggttatggaggcaagattgaggcggctctcagtttgagcggaattattcaatattttgacgccgggctggagcagagatgccatgaggcgttaaaggaaatctgtgaaaagatttccgcggccatggggcagagtctgtaatcctgtccctgccgtatgggcagagaggaaatggaatgaaaggacaggagtctgtttatcttccgcatttcaccatcgggctcaatgcatttgatgcgttccgggatgtgattgggagatatggaaataagattgcggcggttcatggggaaaaagcctggaatgccgccggccggtatgttacacaggctgtggaaaaagccggcatgacgacgacgggtgaaattctctatggccatgaagccacctggagtaatgtggaacgtctggttgcagatcagagggtcaggcagtcggatgtgctgctggcggtgggaggcggaaaatgcgtggataccgtaaaactggcagcagatcttctgagaaagcctgtgtttacgattcccaccattgcatccaactgtgctccggttacaaagctgagtatcatgtatggtgaagacggaacgtttgagaaggtgaaacggttaaattcggttccggtccattgctttatccatcccgggattatcctggatgcccctattcgttatctcagggccggcataggagatgccatggcaaaacatgttgagtcggagtggtcggccaaggcaggagagaagctgagctttggaagcgaatttggtattttagcgggaaggctgtgcttctatccaatgctggaatttggtaagaaggcagtggaagacgctaaggcggggattgtcagtgaagaactggaaaaaatattgcttaacataattatcactccgggaatcgtgtctgtatccgtacattcggattatgtgggcgggattgcccacgcattgttctatggacttacgagacgcagacagatcgaggaaaattatcttcatggagatgtggttgcttatggtacactggttaatctgatggtggatcgggactgggataagttggaaaagacttatcggttcaaccgttcccttggactgccgtcatgtctgaaggatttgggacttaccctggaagatgatctggaggatgtgctggcggcggctgtggaaaatcaggaactcagccatacaccgtatccggttacggctgacttgattcaggaggccatgagggagttggaaagctatagggcctgacgtattgacagagaacgattacatatgaatgagaggaatttattaaatcatggttgtatggaaaaatgatgacgagctttttgctctcatgagggaaacactgtattcatctgttataggtgatatattggataaaatgaactatctccatcagttcctgccatggaggattcagcccatgcgggaaaatatggtggtggccggaagggccatgactgtgcttgaggcagatgctctggagacagtatctgaggggcagaatccaatcatgaggcagagctttggccttatgctggaggcgctggatgaccttaagaaaaacgaagtatatatatgtaccggatcgtcacccacatatgccctggtaggggagctgatgtgtacgagaatgaagatactgggtgcggccggcgctgttgtaaatggatttcaccgcgacaccaacggaatcctggacctggatttcccgtgcttttcttatgggagatatgcccaggaccagggccccagaggaaaggtgattgactacagggttcccattgacatggagggagtgaaaatcaatcccggagacattgtatttggggacttggacggtgtccttgttatccctaaggagattgaggaggaagtgattgtcagggctgttgaaaaggctaccggagagaagatggtggctgaggccattaagaacggtatggctgcaaaagcctctttcgataagtacgggattatgtaaaatgaaagaaccaagtgattaagaagcaggtgataagaaccaagagattagcaccaggcaagaaaaagccccgcatcagcgaatcctgatgcgggacttttttgcattatgcttcccagcgcccggatgccccgcagggcagcaccaggcctgtctgggtgacagggaggcccacctcctcggcgcttactgttccgccgaaacgggggacgatttccacgcctatcatgtaggaaaggactgcgggcgccagtccggtggtgtaggagttaatcagaaagaacaggggcttgtctgacaggagctggacgcacagcttgaccagaggatgaatggcgtcctctatcttccagatttccccttttggtcccctcccataggagggagggtccatgatgaccgcatcgtagcggttgcccctgcggatttcccgctccacgaatttcacgcagtcgtccacgatccagcgtatgggggcatcggccagtcctgaggactgggcgttttccttggcccaggccaccatgcccttggaggcgtccacatgggtgacactggcgccagccttggctgcggccagggtagctccgccggtatacgcaaacaggtttaggaccttgaccggacgtccggcttcgcgaatcctggcgccaaaccagtcccaattggcagcctgttcgggaaacagaccggtgtgtttaaaactaaagggctttagattgaaggtaagtcccttatatccaatggaccactgctcaggaagatggaagaattcccactcgcctccgcccttgctgctgcggtgataatggccgttcatctttttccagcccttgtggtttctgggggtgtcccagataacctgagggtccgggcgcaccagcaggtaatcaccccagcgctccagtttttctccctttgaacagtctatcacttcataatccttccactcgtctgcaagccacatatatttatttaacctcgtttcttccatatataataatgataata

SEQ ID NO: 3222 - DNA, 16302 bp, Unknown
  gut microbiota DNA sequence
gttggtagagcagtagactcttaatctatttgtccagggttcgagtccctgaaggcgcactaaaaggtctgattttgcagatattggaagctgcggggtcggacttttttgttgtcctcccccgctctgtcctatgcttcatccaggcggtattcctgtatcttacggtataacgtagccttgctgatacccagggcatctgccgcggcctgcttgccgtagggacctgtaaaacgctgcagcgctttctgtatcagctgccgttcctgctccttcaggttaaagggcccgtcgttctgtttaaaatcaggaagccgaagcacgtcctcttccgtgatgattccgctggtgtttatggatataaggtagcttaagacctgttccatctgtttgaaattgccaggccacgaatggttcttaagcatggtaagggccctggagctgcaggcaaccttctttttctcaaaatcctgatagtaaatcagatacttctgaatatagtagtctatatccatatccctctccctgattggcggaatacacaggatagcgggataaaacaggttaaagagacgcttggaaaacgcgttgtggtcagccatcttagacaggtcctccagggtggtggcaatgaggcggatgttgtggttttccagcagggtaatgttatccgccagctttagctgaagccagtaaggaagcctgggaatctcctttaagcacacggtaatatccctgccgcagaatatgccggtctcctcgtcaaatacctggttggcaaaattcaggtccgaaaatgcattgcagtcaaaaatcaccagctcctgctgggcatagcgcccgctgttatgtatggcctttacccacatctccttgcccagtcccctctccccctgtatgaccatgtaacggcttatttccgaaattttcatcacgttctttttcatcttcgtcagaacctcgctggttccctcaaagtagtccagagacagattcctgctggcatcctggaaatagctctgctccgtcacaagattctgctccagcacaacatactccagccgttttcccataaggaactcagaatcaaaaatctggtgctttgcgtgaaggcggatactcctgttctccgccctcatatccagccagttgctgttccttctcttaatgaccttcaccgtttcccggaacagctcctctcctatccccattctctgcatctggatccgggcattcttgttgacctttgacacccgccggttctctatcaggacagccccgtcctccatggaatccaccaggtcggaaagggcgtgctccgtcacatgcagggcatcttcaagaaggtatgactccgcaatcctggtaatgacctgtcccacatgaaccgccaggtttttataatattctgtatgttccagcatatccttgtgtatcttctcatcatagcacagcacggacagagttcccagaaaggcctgcctgatatacaagggcaccaccacctctgcctttcccgtacagatgcggttggtgctgcatttgcggcagatgctgctgttcctgtttctcacaaatacaggcttcctgtccgtcttggcctgttcaatggcgctgtagggctggttttcattggcatagataatggacctgaaaatgcctgtgcccgcaactctcatggtattctcatcgttcacatcgtactccaggcaggtaaatcccgcataaaattcaatctccttctgcacaatggctgcgcaagcgcttaatacggatcgtttcatttctttcccccatttatctcataatgagattatagtctcaatatgagacagatacaaggggcatctccatttttctattcttttcgactccccctcacttgaataatcaccttgggattaatagaattacggtaacctaggtaaataaaatataagtgagggaatgttatgatttgcaaagaaataccaaagaccatgtactgccacatcggtggctcaggaacctggggatgcgaatttcccgaagatttaaatatggaaggcattaccctgttaaaacgggacatggaatttgaaaccccgtttggagtcaccgcctgcatgaaactgtacgaaatggatgcctccatcacggcagatcacaaaacccggcaggtactttatgtgcctttccacggctggaagggactctcaccttacaatgacactcccagcgagcgcattttctgggcattgagggaagccggcgtgaaatacatactggcagacggcagcggcggcggcatcaatcccctgctggagccgggcgacatcatatgtccccaggatttcattgattatacaaagcgtgtgtcctatctgggaaaattcaccccctacagcatgcgcatgagggaaatcatatgtcccgacctgcacaggatacttttagaaaaggcctccggcgtattccgccgtgtgttccgcaccggcatctacggcgttgcggaagcccccagattcgagtcagctgctgaaatccagaaaatgtacgcggatcactgcgatgtgtgcggacagaccatgatgccggaagcggcgttggccagggccatcggcgcctgctacgcggccctgtatgttatcagcaattcggccgagggaatcaatcccaactgggaacgctccatttttgacatttattcggaatgcgcaccggtggtgggaaaggtcatgctggaagccatggctgccatcaatcctgagactatgaactgccactgcggtgaaaacattatagagatgcccaaggccgtacagaaccgcctggacatgtagcgggtatacacagaggaggaaactatcatgaaacatttaaagttatttacagcattggcgctgacagccgccatgaccgtatcattggccggatgccagggcaaggctgcttcatcaccagacgcaggaacccagacagcggcagactccggcgaaacggattccaacggctcagcctccaaggaagcagatgcaaaagctccagctgacggtcagaccgtccccagcggcggctcagagcctttcaaggttgcccttatgatcggcatcggcggactgggagacggcggattcaatgacagcatgctggccggtgtggaagctgccaaggctgattacggaatcgagtatcagctggtggagcccaaggaaatatctgaatttgaagccaactttaccgacctctccgcatccggcaaatacgacctgatcatcggcggcggctttgatgccgtagaagccctccagaaggtggcctccgagtttccggagcagagatacctgttcgtggacggcgaggtgacaggatgtgacaacgtgaccagcgtcctgtttaaggacaatgagaaaacatatctggtgggaactgttgcgggccttaacacaaagaccaacaaaataggcatggtggttggcgtggacagcccatcccagaatatcttcgtggccgggtatatggccggcgccaaggctgccaacccggatgtggaggtaattgtcaaatatgtaggctcctttgccgataccaccactgccaaggaactggcactggctgaggcagacgcaggcgccgacgtcatttttgccgctgccggcggttccggactgggcgtgttcaacgctgcacagcagggaacctttaaggccatcggcgcagatgtaaaccagtgtctcatcgacccggaccacatcatgttatcggctatccgcaagattgatgtagtcatcaaggacggcatcaaatcagccatagacggtactcttgaaggtggtaccatggtacccggacttaaggaggacgcactgggcatcaccaacgaaggttccaaggtagagattgatcctgccagccttgacgctgcccagaccgcaaaggataaaatcatctccggcgagatcacagttccttcaaccatagacgaagttaaataaccggctgcgaaaggtgctgcttaccacaagcaacacctttcctttcacacagggaggtcccaatgtatgcaatagagatgcagggtattaccaaaacctttcacggctcctatgccaataaggaggtatccctcaaggtagaacagggcgagatacattcccttttaggcgagaacggcgccggcaaaaccaccttgatgaaaattttgttcggcctttataaagccgacaagggacggattctcattaacggcagcccggcagccatccgttcgccccatgacgccatagattatggcatatccatggtccaccagcattttgttctggtaggcaatctcaccatcacggagaacatcatcctgggccatgaaccgcgcaaaggcattttactggatcgcggcaaagcccgccaaaaggtggatgcgctcatccgccggtatcactttgatctgaatcctgaaagcaggatagagaacctgtctgtgggagaaaaacagcgggtggagatcctcaaagccctttacaacgaatcttccatcatacttttagatgaacccacggcggtccttaccccccaggaggtgcaggagctctttgccatgctcaggcagctaaagaaggacggcaggaccatcatcattattacccacaagcttaaggagaccctggccattgcggataacatcaccatactccgcaggggagagaacatcgcctcccttccggcaacccaggccacagaagacaagctggctgagctcatggtaggccgacccatatcctttgatgtacagcgggttccctacgatgggtccggccccgtcaagctgggtcttaagaatatctgccttaaaaagaagggccgccccgtactcactgatatcagcctggaatgcagggcaggcgagatactgggcattgcaggcgtggagggaaacggacagaccgaactcattgaggtggtcacagggattgagaatcattttacaggccaggtctgctgcggatcccagccggtttccgccatctctccccgcaggatgctggactatgtgggccacattccggaggagcgcggcaaacgcggctttgtaaagggattttccaattgggaaaacctcattctgggataccattaccggcccgaatacgtgaaacacggctttctgaacatcaggcgcatcaaacaggttgccagggacaccataaaacagtttgatgtcaggacagacggcatcgaccagctcaccagttccctgtcagggggcaaccaacagaagctgatcatcgggcgcacgctccttcaccagtccaacattattgtggctgcccagcccaccagaggcgtggatatcggagcaatcgaatacatccaccagcatctcatgcagatgagggactcaggttccgccatcctgctgatctccgctgacctggatgaggttataaagctggccgaccgcattgcggtgctctatgagggcagagtcgtggccgaaaaggagaccggcgcatttaccaaaacagaactgggctattatatgctgggaggcaatgcccggaaggaggcagcagacaatgattaaatatctgaaaagccgtaccatggcatttaccttgatttccttcctgatctccctggtattggcgggcatcatcatagcagccgcagggtattccccggtggaagcttactccgccatgctgggaggcgcgttcggcagcacctataacctggcccaaactgccggcacagccattcccctgatatttgcaggactggccatggcagtggcgtccaaggccggtatcttcaatatcggtatagaagggcagattctggcgggcgccctgcctgctgccctggcaggcacttatatcacgggactgcccgccgtcctgcacatacctgtatgtattctggtggctgccatcttcggcggcatatgggccatgctggcggctgtgattaagaataagctgcagataagcgaagtcatcatcaccatcatgctgaactatgtggctctgtacctggtggaatacctggtgaacaatccctttaaatcagagggaatggtggtaaggacagaggagatacaagacagcgcaaggctggtatccctggtagcccataccaggctgaacacaggcatcttcattgccctccttgccgtattcctgttttgggtccttttctacaagacaaagctgggatatgagatgcgggcgacaggggacagcccatttgccgcggaatcagccggcatcaacaataagaaaaacctgctggcagccatgttcatttccggcgccctggcaggcattggcggcgcctgcgaagttatgggcgtacaaggttattacatatccggcatgaccacaggatacggcttcagcggtatcgccattgcggtcatgggacacaaccagcccctgggaaccctggcctcggccctgttgttcggagcccttaacgcaggtgcctccagcatgaaccgtatgacggacattcccggcgagttcatctccgttctccaggcccttatcatactgtttatctccacaccgggaatcgtaattgctattcaaaatctgtacaaaagaaggaaggcggtgacatcatgagcggacagattctttccctgttagccggcatggtccgggtggccatacccatttcctttgccgccctggccggtatgctgtcagagcgggccggagtcatcaatatggggctggagggcatcatgctcatcggaagcttcttcggagtggtgggctcctatgtgacaggcagcgcctggatgggccttctctttgccgccctctccggtattctcatgggtctggttctggtgactctgaccgtgggctttaaatgcgagcatgtattggcaggcgtgggcatcaacatctttgcctccggcattaccattgtcctgctggaaatgatatggggcaccaagggcaagtccagcatggtggcgggactgggcatgctgcgtgtgcctgtgatttcaaaaattcctgtcattggggatatcattggtaccatttcccccctgttctacatcctggttctctgcgtctttcttctctggttcctcttatacaggacaccggccggtctgagaatcctggtcatcggagaaaaccccgagatggcgggcaccatgggagtcaacgtatataaaatgcagtatctctgcgtcatggccagcggcatgcttgccgccataggcggcgcctacctgtccatcggggatatcaacatgttcagcaaagacatggtatcaggaagaggttatatcgccctgtccatggtgatacttggaaactggaagccgctgtgggtggcgctgggaggcctggtgtacggatttgcccaaagcctccagttcagactgcagggagtcaacattcctccccagctggtacagatgctgccctatatactaacccttgtggtgctgctgtttgccaggaagaaaagctccgcaccagctgcgtcgggaaaacattattaccaaaaaggagagtaaccgtgggtaaaattcagatagacacagagcacgccagaaagatggctgatgattattcctatgtgatgcgttcctttgcggacgcatacgcagcccagaaaaagggggtgaaaatccgtccccgcctgggcgaccatatgccctttaattatatgagagaacgtcagacccttaccttcctgttttacccggaactgaaggaggctgcctatgaaatatcccgtatcataggagaaagtatcacctcggaccaaatcaggggaaagacactgccggaaatcatggaaagcaaccagcccattgcccagagggacggatacgcctttgaggaagtagtggaagctgatgaaacccacgcagtctacaggcattatgaatgcgcggactgttacggccttcccaatatacattccaaaatatgcgtgtacgaggcaggtacggctgcgggcatgttctccaccgccctgggaaaaccctgccgggtaacagagacaaaatgctgtgccaacggcgatccttactgcgaattcctggtcgaagtgctgtaatgctgtataaaccggctgaggaatccctcccccaggcatcaccggatccggtggtatctgcggggaaggggatacccggcgattccgcccagtaaataatgaactttttcgataagcctttttgataattaacttttttgataattaacttttttcgaaaaaaatgttgacatttttcttaaaacgcattataatagtggacgtgtcacttaaagaaacaaatgaatcgcatgcgcctttagctcagttggtagagcagtagactcttaatctatttgtccagggttcgagtccctgaaggcgcactaaaaggtctgattttgcagatattggaagctgcggggtcggacttttttgttgtcctcccccgctctgtcctatgcttcatccaggcggtattcctgtatcttacggtataacgtagccttgctgatacccagggcatctgccgcggcctgcttgccgtagggacctgtaaaacgctgcagcgctttctgtatcagctgccgttcctgctccttcaggttaaagggcccgtcgttctgtttaaaatcaggaagccgaagcacgtcctcttccgtgatgattccgctggtgtttatggatataaggtagcttaagacctgttccatctgtttgaaattgccaggccacgaatggttcttaagcatggtaagggccctggagctgcaggcaaccttctttttctcaaaatcctgatagtaaatcagatacttctgaatatagtagtctatatccatatccctctccctgattggcggaatacacaggatagcgggataaaacaggttaaagagacgcttggaaaacgcgttgtggtcagccatcttagacaggtcctccagggtggtggcaatgaggcggatgttgtggttttccagcagggtaatgttatccgccagctttagctgaagccagtaaggaagcctgggaatctcctttaagcacacggtaatatccctgccgcagaatatgccggtctcctcgtcaaatacctggttggcaaaattcaggtccgaaaatgcattgcagtcaaaaatcaccagctcctgctgggcatagcgcccgctgttatgtatggcctttacccacatctccttgcccagtcccctctccccctgtatgaccatgtaacggcttatttccgaaattttcatcacgttctttttcatcttcgtcagaacctcgctggttccctcaaagtagtccagagacagattcctgctggcatcctggaaatagctctgctccgtcacaagattctgctccagcacaacatactccagccgttttcccataaggaactcagaatcaaaaatctggtgctttgcgtgaaggcggatactcctgttctccgccctcatatccagccagttgctgttccttctcttaatgaccttcaccgtttcccggaacagctcctctcctatccccattctctgcatctggatccgggcattcttgttgacctttgacacccgccggttctctatcaggacagccccgtcctccatggaatccaccaggtcggaaagggcgtgctccgtcacatgcagggcatcttcaagaaggtatgactccgcaatcctggtaatgacctgtcccacatgaaccgccaggtttttataatattctgtatgttccagcatatccttgtgtatcttctcatcatagcacagcacggacagagttcccagaaaggcctgcctgatatacaagggcaccaccacctctgcctttcccgtacagatgcggttggtgctgcatttgcggcagatgctgctgttcctgtttctcacaaatacaggcttcctgtccgtcttggcctgttcaatggcgctgtagggctggttttcattggcatagataatggacctgaaaatgcctgtgcccgcaactctcatggtattctcatcgttcacatcgtactccaggcaggtaaatcccgcataaaattcaatctccttctgcacaatggctgcgcaagcgcttaatacggatcgtttcatttctttcccccatttatctcataatgagattatagtctcaatatgagacagatacaaggggcatctccatttttctattcttttcgactccccctcacttgaataatcaccttgggattaatagaattacggtaacctaggtaaataaaatataagtgagggaatgttatgatttgcaaagaaataccaaagaccatgtactgccacatcggtggctcaggaacctggggatgcgaatttcccgaagatttaaatatggaaggcattaccctgttaaaacgggacatggaatttgaaaccccgtttggagtcaccgcctgcatgaaactgtacgaaatggatgcctccatcacggcagatcacaaaacccggcaggtactttatgtgcctttccacggctggaagggactctcaccttacaatgacactcccagcgagcgcattttctgggcattgagggaagccggcgtgaaatacatactggcagacggcagcggcggcggcatcaatcccctgctggagccgggcgacatcatatgtccccaggatttcattgattatacaaagcgtgtgtcctatctgggaaaattcaccccctacagcatgcgcatgagggaaatcatatgtcccgacctgcacaggatacttttagaaaaggcctccggcgtattccgccgtgtgttccgcaccggcatctacggcgttgcggaagcccccagattcgagtcagctgctgaaatccagaaaatgtacgcggatcactgcgatgtgtgcggacagaccatgatgccggaagcggcgttggccagggccatcggcgcctgctacgcggccctgtatgttatcagcaattcggccgagggaatcaatcccaactgggaacgctccatttttgacatttattcggaatgcgcaccggtggtgggaaaggtcatgctggaagccatggctgccatcaatcctgagactatgaactgccactgcggtgaaaacattatagagatgcccaaggccgtacagaaccgcctggacatgtagcgggtatacacagaggaggaaactatcatgaaacatttaaagttatttacagcattggcgctgacagccgccatgaccgtatcattggccggatgccagggcaaggctgcttcatcaccagacgcaggaacccagacagcggcagactccggcgaaacggattccaacggctcagcctccaaggaagcagatgcaaaagctccagctgacggtcagaccgtccccagcggcggctcagagcctttcaaggttgcccttatgatcggcatcggcggactgggagacggcggattcaatgacagcatgctggccggtgtggaagctgccaaggctgattacggaatcgagtatcagctggtggagcccaaggaaatatctgaatttgaagccaactttaccgacctctccgcatccggcaaatacgacctgatcatcggcggcggctttgatgccgtagaagccctccagaaggtggcctccgagtttccggagcagagatacctgttcgtggacggcgaggtgacaggatgtgacaacgtgaccagcgtcctgtttaaggacaatgagaaaacatatctggtgggaactgttgcgggccttaacacaaagaccaacaaaataggcatggtggttggcgtggacagcccatcccagaatatcttcgtggccgggtatatggccggcgccaaggctgccaacccggatgtggaggtaattgtcaaatatgtaggctcctttgccgataccaccactgccaaggaactggcactggctgaggcagacgcaggcgccgacgtcatttttgccgctgccggcggttccggactgggcgtgttcaacgctgcacagcagggaacctttaaggccatcggcgcagatgtaaaccagtgtctcatcgacccggaccacatcatgttatcggctatccgcaagattgatgtagtcatcaaggacggcatcaaatcagccatagacggtactcttgaaggtggtaccatggtacccggacttaaggaggacgcactgggcatcaccaacgaaggttccaaggtagagattgatcctgccagccttgacgctgcccagaccgcaaaggataaaatcatctccggcgagatcacagttccttcaaccatagacgaagttaaataaccggctgcgaaaggtgctgcttaccacaagcaacacctttcctttcacacagggaggtcccaatgtatgcaatagagatgcagggtattaccaaaacctttcacggctcctatgccaataaggaggtatccctcaaggtagaacagggcgagatacattcccttttaggcgagaacggcgccggcaaaaccaccttgatgaaaattttgttcggcctttataaagccgacaagggacggattctcattaacggcagcccggcagccatccgttcgccccatgacgccatagattatggcatatccatggtccaccagcattttgttctggtaggcaatctcaccatcacggagaacatcatcctgggccatgaaccgcgcaaaggcattttactggatcgcggcaaagcccgccaaaaggtggatgcgctcatccgccggtatcactttgatctgaatcctgaaagcaggatagagaacctgtctgtgggagaaaaacagcgggtggagatcctcaaagccctttacaacgaatcttccatcatacttttagatgaacccacggcggtccttaccccccaggaggtgcaggagctctttgccatgctcaggcagctaaagaaggacggcaggaccatcatcattattacccacaagcttaaggagaccctggccattgcggataacatcaccatactccgcaggggagagaacatcgcctcccttccggcaacccaggccacagaagacaagctggctgagctcatggtaggccgacccatatcctttgatgtacagcgggttccctacgatgggtccggccccgtcaagctgggtcttaagaatatctgccttaaaaagaagggccgccccgtactcactgatatcagcctggaatgcagggcaggcgagatactgggcattgcaggcgtggagggaaacggacagaccgaactcattgaggtggtcacagggattgagaatcattttacaggccaggtctgctgcggatcccagccggtttccgccatctctccccgcaggatgctggactatgtgggccacattccggaggagcgcggcaaacgcggctttgtaaagggattttccaattgggaaaacctcattctgggataccattaccggcccgaatacgtgaaacacggctttctgaacatcaggcgcatcaaacaggttgccagggacaccataaaacagtttgatgtcaggacagacggcatcgaccagctcaccagttccctgtcagggggcaaccaacagaagctgatcatcgggcgcacgctccttcaccagtccaacattattgtggctgcccagcccaccagaggcgtggatatcggagcaatcgaatacatccaccagcatctcatgcagatgagggactcaggttccgccatcctgctgatctccgctgacctggatgaggttataaagctggccgaccgcattgcggtgctctatgagggcagagtcgtggccgaaaaggagaccggcgcatttaccaaaacagaactgggctattatatgctgggaggcaatgcccggaaggaggcagcagacaatgattaaatatctgaaaagccgtaccatggcatttaccttgatttccttcctgatctccctggtattggcgggcatcatcatagcagccgcagggtattccccggtggaagcttactccgccatgctgggaggcgcgttcggcagcacctataacctggcccaaactgccggcacagccattcccctgatatttgcaggactggccatggcagtggcgtccaaggccggtatcttcaatatcggtatagaagggcagattctggcgggcgccctgcctgctgccctggcaggcacttatatcacgggactgcccgccgtcctgcacatacctgtatgtattctggtggctgccatcttcggcggcatatgggccatgctggcggctgtgattaagaataagctgcagataagcgaagtcatcatcaccatcatgctgaactatgtggctctgtacctggtggaatacctggtgaacaatccctttaaatcagagggaatggtggtaaggacagaggagatacaagacagcgcaaggctggtatccctggtagcccataccaggctgaacacaggcatcttcattgccctccttgccgtattcctgttttgggtccttttctacaagacaaagctgggatatgagatgcgggcgacaggggacagcccatttgccgcggaatcagccggcatcaacaataagaaaaacctgctggcagccatgttcatttccggcgccctggcaggcattggcggcgcctgcgaagttatgggcgtacaaggttattacatatccggcatgaccacaggatacggcttcagcggtatcgccattgcggtcatgggacacaaccagcccctgggaaccctggcctcggccctgttgttcggagcccttaacgcaggtgcctccagcatgaaccgtatgacggacattcccggcgagttcatctccgttctccaggcccttatcatactgtttatctccacaccgggaatcgtaattgctattcaaaatctgtacaaaagaaggaaggcggtgacatcatgagcggacagattctttccctgttagccggcatggtccgggtggccatacccatttcctttgccgccctggccggtatgctgtcagagcgggccggagtcatcaatatggggctggagggcatcatgctcatcggaagcttcttcggagtggtgggctcctatgtgacaggcagcgcctggatgggccttctctttgccgccctctccggtattctcatgggtctggttctggtgactctgaccgtgggctttaaatgcgagcatgtattggcaggcgtgggcatcaacatctttgcctccggcattaccattgtcctgctggaaatgatatggggcaccaagggcaagtccagcatggtggcgggactgggcatgctgcgtgtgcctgtgatttcaaaaattcctgtcattggggatatcattggtaccatttcccccctgttctacatcctggttctctgcgtctttcttctctggttcctcttatacaggacaccggccggtctgagaatcctggtcatcggagaaaaccccgagatggcgggcaccatgggagtcaacgtatataaaatgcagtatctctgcgtcatggccagcggcatgcttgccgccataggcggcgcctacctgtccatcggggatatcaacatgttcagcaaagacatggtatcaggaagaggttatatcgccctgtccatggtgatacttggaaactggaagccgctgtgggtggcgctgggaggcctggtgtacggatttgcccaaagcctccagttcagactgcagggagtcaacattcctccccagctggtacagatgctgccctatatactaacccttgtggtgctgctgtttgccaggaagaaaagctccgcaccagctgcgtcgggaaaacattattaccaaaaaggagagtaaccgtgggtaaaattcagatagacacagagcacgccagaaagatggctgatgattattcctatgtgatgcgttcctttgcggacgcatacgcagcccagaaaaagggggtgaaaatccgtccccgcctgggcgaccatatgccctttaattatatgagagaacgtcagacccttaccttcctgttttacccggaactgaaggaggctgcctatgaaatatcccgtatcataggagaaagtatcacctcggaccaaatcaggggaaagacactgccggaaatcatggaaagcaaccagcccattgcccagagggacggatacgcctttgaggaagtggtggaagctgatgaaacccacgcagtctacaggcattatgaatgcgcggactgttatggccttcccaatatacattccaaaatatgcgtgtacgaggcaggtacggctgcgggcatgttctccaccgcc

SEQ ID NO: 3223 - DNA, 26071 bp, Unknown
  gut microbiota DNA sequence
gtttttttgaaatatgtttgttagtgatatacttcatatttagttaccctcgttttcatatgtgctttggtttttaagatacagtcaatatacagtcaatatatagttaatatagttcagtcaatccagtattttctgacccgctacaagtaagagcttgtcctggtcatgtctgtcaccaaatccgggttatcctgcttcatacgttccagcagaagttcaatgttcgctgtttttccctgaatgttcttaaattcctgttccgtaatacctaccagctggataaactccgtctttccatagacagaatcctgagacaccgcctctgtgtccatggtggttatcagtgccgtgatagctgaatccgtccctacatgaagggatgtgccgttacctgctatatactggctggggagaaaaaactgattttgggtataggtgtagcgggcaagatttgagagcatatcaattgcccagagacaatcttccggctcattttccctaagcttgatggtcatctcataaccccacttattccattctccgccaaaggactcctcatctgcataaagctccgtcattccaaatgtcacaatatgcttatatcccttgggagaatcatagatggaatagccgtccaggtagcagtcgccgccaaatatggccctggccatcatgtttgtgccatagtgccggggctcctgtcccgggtagagccgctcaaattcctgttcaatggtttcccagcccggcgcccattcttcgttttcttttacgcgttttaaaaattcttcttttgtcatttgatttcctcacatgagtttttatataaccgtggatgcaaaatatatcatcaggaatatatcatccgcggattctatgaattgcaggaaggaccgcaatgtgatacaataccacacgggacgtttgacggaccgtttaaaggggaccgtatatgtaaaaaaatgtatgtattggaggcttagtttttatgaaaaagtgggaaacgatcagggagttcatcatgattacctttgccaccgtcattgtggcggcagctgtctttttcttcctgatgccaagccatgtatcggtgggaagtatatccggtctggcaattgttctgggaaactttgttccccttaagatttcagcaatcacctttatcctcaatatgctccttctggttctgggcttcctgctcatcggaagggaattcggggcaaagactgtttacacctcgttcctgctgcctgtggtcctggctgtttttgagacggcatttccggaaaatgcttccatcaccaacgatgcgtttctggatatgatatgctatatctttgtggtaagcatcggactggccatgctgtttaacaggaatgcgtcatcaggcggcctggatatcgtggcaaagcttttgaacaaatacctgcatatggaacttggccgggccatgtccatgtcaggcatgtgtgtggcactgtccgcggccctggtctatgacaagaaaattgtggtgctcagtgtccttggcacctatctcaacggaatcgtcctggaccatttcatctttggctttaacataaaaaagagggtgtgcatcatttcccagcgggaggaagaaatcagggagtttattctgcatcatctccacagcggcgccacgatttatgaagccatcggagcctatgacggccagccaaggagggagatcatcaccattgttgataaaaacgagtatgtaaccctgatgaattatgtgctgaaaacagataaggatgcttttgtcaccgtgtatacggtaaatgaaatcatttacaggcccaagcattaactgcagcccggacatagttttatttccatttccatcttctgtctgatgttgcccgcattctcatgttgcaaaggacctttcactgctctacctggcggaaatcagatactttacaatataatggtatgcacccactgtaaaagcaggtatgaggattatgtaagacagaatattgagcatggtaaaattatagacattggatgcctctccatattcaagaacatatctgcacaccatgcccagaatggtcataaggagggtcagaggatagacagccctctcttttgccttcccgtaaaggcctgcaaatccccaacctatgattccgtaagagcaaatcagcagataagctttggtgaaatccaggggaaagggctggcttcttatgggaaatgtaaaacagcctgcaaaggcaatataaaataaaagcagaccctttaccatgacaggatggcgcataagaaaatgatttatggattgggccgtcctgtttccgtttgtccggttttctgcatttggattttttgccgccctgttctccgccattctgcgccctgacaaaaaacacaggatgcttatgattaaaattacgatgatgaaagataggatactgaccatacacgtcctcctcccctgctgctggttaccatgacagaactgaatgacagacagcatcacggcgcccatgaaagaaggcgctccactgcactggcagacatataatagcattcattgatacttctcatatcgttggcaatattatagacaaagggggctgtccagatgactgctgtctcctccttttgataacacgatataaacacatccatgccttccttcctgtaaactgacagtaccgcgtcagggggacctggcggcggttcccggtccggaagaaaggtccagttcctgccggtcatatcagcaaataactggtccatcaccggattggaggtggtgaaaaaatgattccggtttttaaactgtacttccactgtgtctccggacgggcgtgaaatgcaaagcaggggaataccttctgccgccatccagtttttttgcgacatgtattcaatggtttcccgcccgttccattttcccgttacattccatgaatctgtaaagaaggaatcgtcatggtccagggtaaccggacgttccggggtgctgtatgccaggcgcccctgatcggtgcttaccagcaaaagactgctctttatgtagccctctgccgtatccatgaatgctgcaagggcgtccgggtctccgaaaaagcctgtcctgtcctcctgctggagtgcgaaatctgctgtgtgggagtgcgcttccactgtttttttatccggacctatgtaaaagatacgaatgctgtatgcgccatatccctggttcatataaggtgaatattccatgagataatccgccccgttttctctgtagagatacagcatggtccagcctgcatgggccacactgtagtcatgctcccagatgaccggggaatcagccgattctcccgccaatactttaagggaggcatattgtcctcctgatgcctggaaatcagccagtccggcagtgatgcgctccggttctccatcatggtccagatctgcaaagaatataacgtccgcgtccgttccgtattccatggggcagagggttccggcgtccgtcagcagctccggttttactgtgatttcaggcagtgattctgacgctgtttccggcgccggcgcctcggacaggtattccatgccttccggcagggcaggctcacgcgccatgctgctggctgcagtgggagatattgtgccgccgcatccgcagaggagaacagtcacagcaagtattgtcacgattggggaccatatcatttctttccatcctttctctgcgcgtttcatttttatactaaaagtatactataagtgtgggcagagaactcttaattttcccttgcaaaattcctaatatcagcggttctgcgtatgcctgccggacgttttgcccgaaaacatgaacagaatcagggtgatgaataaaagaatgccgattattaccagcgcaacggattggacgaaggaacatgtttcatggtattgtctcatctcgtctccctctatccagccgctgtacaggtccagggcatttcccaggcagttatcttccagcacatcacggtctgttatgcggtatgcctttttttccttatcagtcagaaagcgggcggccccctcgtcccagtaatatcccacaggaagggccaccctgccttttgcaggtattctggtgattgcgttgtccaccagagcccaggttctggttccgtccttaaaagtaatcaggtaatactgggcataatccgcatacggcctcatccagaaggtggtccaccggctccgtgtaatggcgggggcagtgaccccgtaggttgggctgcggctgctgtaatagccgcgctgcgttgacggccgggttctgtggctgatttgtttatagataccggttgcttgaaagagagaggcatctgcctcccatgcgccgatatagtttttctgtaaatccgatacagaggtcatgtacccggtcggctccgtacaggggtaacctgccccgtatttcagctcaaaactgccgttatcatcttttgacagcacttcctctggggttacgggcacggcggaccggtacagaagtccctcagcattcagccgcggagcaatggcaaggaagaaaataaacaggaccacctctgccgcaagcatccataaaagtccataccccttatcctttttcatacctttcgttcctcctgtcatcactggctgtatgcccggatcaaggtgtatcggatcctgaggcatgtattgtcatttgtattataccatacaaataaaatccaggacataaaaaggaaccccgcggttttgatgatgtgatgctgcatcaccgccactgcggggttctgttatgctatgccgggtttatccttcaatggagatatatttcttttcttctgccagtggtttcgcttccttttttggaatggacagtctcaggataccgtgcttgaattcgccctttatatcatcttccgtcatatcttcgcccacataaaagcttctttcgcaggcgccggcataacgctcctgacggatatatctgccgctcgtattctcctgctcgtccttatccagtcctttggcagcactgatggtcaggtatccgtccctgagggatgccctgatttcgtcctttctaaatcccggcagatccatttccagttcatatcctgtatctgtttcacggatatcggttttcatcaggtttttgcctctgcgtccatataatttcttctccagcttcttcatatccctgctgtcaaaaaatggatccctgaaaaattcatcaaacatattttcaccaaaaatactgggcattaacatacgtcattcctcctctgttttttgtggggctcccggaaacagttccgggagccatgtatggtcaggtctgtacgtcatatttgagtttaaccttcgattgcaatatactttttctcctccacggccggtttggcttctttcttgggaaccagcatcttcagggtgccgtcctcgaatttggccttgatgtcctcctgggtcactgcgtcacctacataaaaacttctgctgcaggatccgcagtagcgctccctgcggatgtaggttccgttggaatccttttcatccctgctggaatctgttgtggcctgtatggtcagatagccgtccttgagttccgcctttacatcctctttcctgacacccggcatgttcatggttatctcatagccattctcagtatccctgatatcggtattcatcatatcgaatgtcttgtggctgccgaatgagtaatcaaaaaagtcatccaataagttttctccaaaaatactaggcatcaacatatgtcatctctcctttatttaataatctatgaggttgttatattgtactggaaccgcataggaaggaaactgtaaaacttatctcatctcctcttacattcccttctctatctgttctatatgtaatataacacgcgttattagcaaagtcaagagtcgagtgctaatttcacacttttttcacatttcgtattcatttgggctgtttttttcacttttgcagatttcccggtacgtatttacacattgggcctgacgggttctgccagggatttaaaaccttcctcatgaaatctttatagttacctcatgatttggatatggaatctttaaaccgtatggtgctactatcatgtcatccaaagaagtaattcgatatataaaggaggcgtattgatatgaagaaggaattctggagtgatatggcgggtttgggaattatgttattagtcatgttgggagcggctgcactccgggcgtatatctggctgtaacccatgctattgccgtttgacggagtatgtatttaacatcaatttatcattttacatcctgtgttttccttaaatcagtcaaaaaacgtgaaatattacaggaaatccaaagatcttaccatggaaaaatccatgcagggctcctatacttataacaacaccatatgacaaatccggcaggaaacagaagccggtgatatgcaaaggagtgtaagattatgacaagtatgttagttaagtttgaacagccggaacaggtggtagattttgtgaatacgctgagccattatgactgtgatgcagatatcaaatatggcagccgtatggtagacgccaagtccgttctgggagttctttacctggcggtatcccgcacagtggagctgattcttcacattgatgaggatggctccggggatataaaaaacagacttgcgaaatttgcagtatagaaatttgcagtataaacagaacaggattcaaaaaagcagccggttatgacttagccggctgcttttgactatctgattataactgtaatattacaactgtaacggcggcggcgaacacggctgtataggccagccccagaattgccagacgccaatattcttttataattttaaatgatttcataccgcatgcctcccggattttattttatgcttttattatataaaatccatgtaaattcaaagaggcacatttagtaaattctttgtaaaacagtgtctggatattaggttttaccttgcagctatctgttccagtacagtatctcgccgtcatattccatggtcagatattctgtgtcatcctccgttatcaggtggagcgtcagactgttttgactgttcccatggtcctcatagggcgtgatggaggcagtaatggaactgcctgtttcagtggatccgcctgtctccgtacactgcccctctccgccggttccgatgccgatataatactcaatctctccgttatcgctgatttccaggctgttgcccatatgcaggccggttccaaacatttccagcagagagccatgctgccgtagtccggcatctgttttcggcccgttcagggtccaggaaccggcggcctgacggatgatttcctcagaaacaacacgggtctcacttatgctctcttttgccggtggttccgctgcttttaagctgtccagttccacgtcaaaagattggtcctggatgatgctgccgccgtttgcagccgggaccgtttcatcaccggcagaatccccggcccgggtgtcggaataaatatgaatctcctggtccgtcccgttaccgtccgtcttatcctcatccgccctgccctcatccgctccggcagactctgttccttctgcctcaacagcagctccatccgccccggtccccgcagcaggctctgacttcaggccgcagccggacagaaccagcagccccagcagacttgcgatgcaaagtatttttcctgaattcctcaatttaaaatcctccctcatgtaatccatataaaatccgtcatctccaacggttatgtctggttttattgtaaacaaaaaggatgtaagtatcaacttaacatccctttcatatatcttaatttttccgaagtatatttggaagtggaaacctccggtcatcaggacaacggcccggatgaaagaagaaagttgacataaaaatattatgtcgaccaccgagggggtttacagcccaatccccccggcctgcgcctaacaataccactattcaataggcgcctgataaaatccgccgtaaaagttttccgttttaatcatattgacaatgacatggggatcctgctcccgcatgagatgcacaatgtcgttcacctcataggaggacaccacggtgtgaagcagatacattttcttgtgactgtaacctcccaccgcgtccacacaggatatgccgtgtctgtactgtttgacgtactggtttatgatttccggcgccttggtggtggtaatctgcagtgtaacccgttcatacctgtgatggaaggcagagatggctttggtggatacgaactggaacaggatggaatatcctgcgtacagccatccaaacatgtatccgaagatgcagagaatcacgcagttgcctgcaaatacatattcccatatggaccttcctgtcttattggaaacatacagggcaatgaagtccgtgccgcctgtggaggcatttccccttaaggcaatggcaatggacagcccgtacagaaaaccgccgaaaaccacatccagcagcacgtcattgaacaggggctgaaagctgcatattttcagaaaaaagctggccaggaacacctgcagcatggaataaaaggtaaaacgcatgcttatgctcctgctgcagaggatggccaccggtatattgaggaccagcattcccagggaggtggaaatattgtgcccgtagagggaggcaatcctgtcaatgaggatagccacaccggtaaatccgctggacagaaggttggccggccgtataaatgcctggattacataggtctgcagcagggcggacgccacgacagccaggatggttatgagccttctcaccagtatgttctttttgtattttgctatcatggcctatctccccaactccccaaggctgtctagaagcttacggaccagtgcctctgacaccacgtcatagcagttttcatggggcggctctgcaaagccgtaggtcaccccgtgggaagtggtggtagggtctgtcatccagtccttgcaggagctgtgaacctgccttattccggtctcttccatgagcgttctggcattggaggcattgatgccgcttccggccaggatttctatgctgtttccataagacgactgaagagcaccaagcagagcctttccctcgacagcctttggtttcagtccgctggtcaaaagacggtccgcacccagctcaatcagtgtctcaatggactcataggggttggaggtgcagtcaaaggcccggtggaatacagcttcctttccatggctgtggataatggaaatcattcgggcattcctctccctgtcaatagaggcatcttccctcagacagccaaaggcaatgccgtccgctccgtggcggaccagatgttcgcattccctgagcatcacattaaaatcctcttcactgtaacagaatccgccacctctgggccggaccatggcaattaccttcacattgcagtgctccttcaccagttccagggatgccagggagggcgtaagcccgcccaggtgcagggcacagttcagttcaatccgtccggctcctccggacgcagcctgcatggcatcatagtagctgccgcagcatatctccaacatataaaaacctctccttcttcctgtccgccggcacagtaccggcaaaaagcctaaagctgtgccagtcggtacagagccagtgcatatatttttgcgttggttaccaggtcgtccacggtcatccactcatttggattgtggctgattcccttttggcccggaaagctgggaccgaatgggacgataccgggcatggccttggcataggttccgccggtggtggttacgggagtgccgtttatgccggtgacccgctcatagctgtcctgcatggcttttaccataggcgtatccttggcaaaaaccacaggatcataattttgtaccagctctgccttcagaccgcagctctcagccttttccgttatgggcttcatgatttcccggatggtgataccgcccggatagcttaaggtggcctcaaagtataccgtgtttgccgcgtttccgtttccggcacttacttctgtgtttttgtttccggcatttacacggcggatgttcccttgaccggccttccagacgggatctaatcccagtctgtaaccgcgcatctccatcataccatattcttcatggtaatagtcaatacccaatcggtcgcctgtattgcctgctccgataaaatatttgtttacaaagtcgaaaaatgtacccaggcattcccttgtgccggtgatgcgcaccactgcccttccccgctcgctgtatactacaggatatttgcagtccggcgtaaatccgtaaacaggaggcttttcttttgacagatagtatctgagatcctcaaaacccgtttcctcgtcacatccgaagatgatgcgcaccggatgcctgaggggaagccccagcgccctgaccgcggccaggccgtagaggcatgccatgactggccctttattgtccaatactcccctgctgtatatgactccgttttccatatggccgttaaaaggaggctccttccagccctctccggccggcaccacatccacatgtcccatggcgcagacatagtcttctcccctgccatagaatgcgtatccgatgtatccgtccaaatccacagtctcaaagcccatatccctgctgatggatagcgccaggtccagggccttctttacaccgggaccaaagggagccccatcccgggcctccctttccacgctgtcaatacgcaccatctgacgaacatgctccaccagctggtcccggttttcatcgatatagtccagaagcattctgtcaatctgattctgttcatccatattcctattcctcaatgggcgccatgcgcgtcttcatatagttttccatccactcatccgatgccttttcgtaggtacagcggccgtcctcctggcgggtcaccagatacacggttggttccagggcctctgtgacaacggcaaaggaaaatccctctatgttggtggctacgccccactccccctttgggttcatggctataagggataaatcccccgcctcgcccctgcgttccttaagctctgcgtccaggcgggccacggcggtctcacaggctttttggggatgcataccctccccgatgagacggacgatttcataggaaatacagcccttcatcaggtcctcgcccaggcccgtggcactggcagcgccttttttgctgtcagcatagaaaccggatccggatatgggagagtctcctactctgccttttttcttcataaagagaccgctggtggaggtggcggctgtcattttgccgctcatgtccaggcaggccatgcccacggtatcgtggcctgagtatggcttaagctttccggaggcttcctggagggccgcctggtcggacatttcctttaaacgctttctgtaatgggcctttgcccggtccgtcagcatatttttgcgctcaaatccctccttatgggcgaatttttcagcaccctccgccaccagcaggctgttgaccttttcacggctcagacgcctggcaatggacacaggattggcaaagtccctgatggccgcaacagcgcctatatccagggtattgccgtccataaaggcggcatccatctccacctccatctcctcgtttggaagcccgccgtagcccacagatttatagtaaggaaaatcctccacttcccggatagcagactcgacggcatctcctgcgtccccgccgtccttcagcatttcggcgcccttagtaattccttccactgccatgcgccaggttgcaatcataccccacatcctatatatcctcctctatttgaaacagaatttatgttccagttccgctgtatcgctgccgtcagccagtgcctttgccagtgtgcacatgttcttaagcgcgtcgtttagtcccattccgcccttctttggagtttccacaatggccaccttatccttgtaggcggcgatggtatccttgttctcaacagacatggctgcaaatgcctttgcctttgtggtagcgttgatgtcgcatgccaccttggcgcacatgcccgcatagtcagcgaagttaaaggcagggccgcacataaccacatccggctgcagcttgtttaccatggcgcagagcttgcggctgacctcctccgggtcagctaagaaggttccgttgccgcagcacaggcaggctgtcacatggccgtccaccttatttaagaagggctccatcataactgcgggaccaataggctcctttttgcctgttaggggaaccattgtgtcatcttttgttccaagaccggactgtatctggtcgtatatcataataattttcattatcttcacctcatattcttgtatccccacagggattgtcaaaggatggacggaccgtcaaaggcagccggcctacaggtcgtcaaaggaaaggtcgtcaaagtcaatgtcatcgtcatctgatttgtcagaagccttggcctcatcttccagatactgcttatccatcatcttaataaacggcatatagatgaatactcccagtatgagaagaagcagctgcagtacagctccctgccatcctgttgccaggaatccggacagtaccacgggcatggtccatggaatggcgacgcctgtacagaggggaaccagaccaatgctcatgcagaaataggaaattacgatgtttatagtgggcaccagcatgaagggaatgagaatcattgggttcagcacaatgggaaggccgaatacaagaggttcattgatgccgaatacgccggggataaacgccagtttgcctaattccttgatacgtttggagtggcagaataaaagcattgcaatgagcagcgacaatgtagaaccgcatcctccaaaggttgcgaacaaatcctggaactgctgggaaataatattgggcagcggctggcctgcctggaatgcagccaggttgtcggcggacagtgtctgaaggatgggattgaacacagcgcctacaacggaaccgccgttcactccaaagaaccagaagaagtgaaggaatatatatgcgattaccatggccggaagtgtattgcccaattttaaaagcggtgtctgtaaaattgtaaagatgaagttaaatgcgtttttataaggcgtcattgcaaacacgatattcatgataaagaataccagtatagacacacctgcaggaatcagggccgagaatgactttgataccgtaggaggaacgccgtcaggcattttgataacccagccctttttgtttacccatgcataaatatggactgacaggaaggccacgatgattcccacgaaaatacccttggaccccacccagtttaacggaattccggtgacgctggaaccgccgtccacaagaatctcatagggcatgatgaggaaccagcttaccagggcaatggctgctccgaacagcttatctacgttcatctgctccgcgaaggaatagccaatgcctataacggccagcactgccatgatggagaaggtggcgtcagtgggctttgaaaaataggatgcccagttgtccccgaaaaaccgcgcccagaaatccgtccatcccggtattgggaagttggcaaccagcaggaaaaaggaccctacgattaacagcggcatggacagcaggaagccgtcacggatggcaatgagatatttattttttccgattttctctgccagcggcatgagtacggactctaacttatttagcatgattcatgttcccccatttcaactatgattgttttagcacaggcgggctaagatgctgcgccggactgttattttgctgctttcatgagcttgatcgctgatttcagtactttctcaccgttcatcataccgtaatccgtctgatcgataacctgaatcggaatgcccttgtcgccgtacttttcaacaatctcgccatagcggtatttgacctggggccctaagagaatcacatccgggtgcttctcatcaataatctggccaatctttccgtccgggaatgcctctacttcaatgggaaggtcatgggaattggctacgtcctgcatcttgcttgccagcatactggtggacattcctgcgctgcaaaataaatatactcgtttcatgattaaatcctccttgatatctatatagtttccttttattgttcctgttttataccgatgggtaaaatacggtgtatgaattaacggttttccagctttttttccagttcagcgattcgctcgtagctggcaatcatctcttccgcgatgattttaaagccttccgcactcatgagctggtcttccgcatgaaccagaatcatggagccgcctacctgctctccctgtgcttccttctgaatcagttcaaagtgggcctcatgtccaaccaggaacatctcctggcctgcctttatacattccctggctccctcaaagtctccctgctttgctttctggattgcttcgatgtagctggaacgcgcgcctcccacattggagataatcttgaagcaaatcatttctaatccctctaccattttgctgcctccttattgtttttgaaacgagaaaatgcaacaaaaccattctgtttgctgcatttcttattaagttgccttaattataaggcagttattcactttttttcattaaagacatttcctagctgttaggaaattcaacccataattctgtcaataaattcctcatagctgcatggagccactaattttgccagctcctccggctggtttaccacattggatacccagtcaaagaaaattttaatcattctggcatccccttcgttgatggcgaaaagcatgaccagacgcacctcaaaggctccccatttcaccggattcttaagctgtgccacggcaatggtggaatttctggcaaaggcgccaaaggcatggggaatggcaaatgtgttcacaaaggaggtaggcgacatctgctccctctttaagaccacttccgtgaattccggttccacgatgccctctttttccaggcccgcgcacagcatacggatgatttcttccggctggtccatgtctacctgggagtgataatgctcttttcgtatcaggttcccgatatgggatgtaaactccagacggaagccttttttatccagccggttaatggcctggagaatctttgactctgtttccgagtccacaaacaggttaatggaaacagtctccacatccagtccgtgctccagtggaaaggtgctgagaagtaaatccgggtccagggccgatacctcatcctcctcaaaatagccgaatgcctttaccacttccatacgttcgcggaacatgtcggatatcttcttcacgcacatgtcggaaaaagactggttgtggggcagaatcatcacagccctgtactttctcacggaattcatgcgctcactggcagctcccaggtgaagggcaatgtaacagctttccacatctgatatgggccgttccagccgctgctccagaaactccagcacatagattcccatttcaaaaacaaggggatatttgcgcttgatttcctccacaaacacatcctccatccgcacctggttcttgacacgttcgatgagtccgtgaaaatgcattttaagccctgccaccaaatctgcgtcctgcctgaaatccaggccgaacagggcatagacctgttccagggcttcagccaccagcttcttggtattcatccattttccgttgtaattgacaaaatcgctggtatagttggaagcccgcctgcccatgattaccagggcgaacatgcccacctcgccgtcgtggaccgttatgtgcagccgcttggaaatgcggtcaaagaaggtctgggctatctggtactcaatggtatcctccagcccctgcattccctcctccatattgatgtaattggcgcagttcatccgttcaatgctggtccccgcatggagaatcagcatgggaaacatggactcatggatggaatagtcgtattcctccagcacatccacaaagatatccttgacctcaatcaggttaaaacttctgtagagatgggccagggtgttcagattaagaaagttctcctgcacctcagctaccaataaatcccggtaaaaacggcgcttgctggcctcgtctccctttaaggagatgcattccttgttccgcaccagcttcaggccgctgtatggctccagcatctttcgtatgcgctttaaatcattgtcaatggaataaccgctgacatagatctggctctggagcatggtaaggttcagctcctttacctcaaacagcagcttttgtatcatgtatgcacagcgggcgccaggagtctggggaatgtctgcctcccttgtctctgcccctgacgccagggcaggccgtgcctcctcgcacagcctgtatccctgacgcacattggactcaatgggcggcgggtccgtgtgcttattgatggcctccacatcggaacggatggtccggtccgacacctgcagaaggccggccagctgccggctggtcatccagtccctccgctctgataatatggcaagcagctgttcctgtcttttattctgcatggttaaactccttctcttacagtcttatacaatacggaatgcgaacaccttccagggctcgatatagtctaatagtacatgttcatactcaggcagatgtccaatcacgttcttgcggccgtcattgggcatatcctttgtgacgatgtggagctctcctttgtatttcaggtaaccgtcattgagaatgaccacatcgcccggccgtaagtccctggtgttgccagccggaatggactggtctgcaaatgttaccctgggccaggtggatcggatcatgtattcgctcatatcccctctcaccatatgctttggctcatagtccaggatctgtttctctgtgtccgtcagctccttttccagttcaatgccgaaggtaaggatgctgggattgactgctgcgcaggcatggagctcctcgtccgttgcataggcattggcaatcagcacatcatctaccatgccggtggcaaacatatggcgcacctggaaatccagaggaaggccgcggtgcatttccagggtgcagagtccttcgtttaaaggccatggaccgtaagctccgggcgcattgctggatacaaaggcagccaccttaagacccagtgacttcatcttgtcattgcacctgttaaaatgcttcaggctcagtcctgtgtatgcctgcggataaaagttatggcaggtaattaacttctcacggtccggatggtgatccatgatgttttccacatagaccagcttggtgctggcattcagctccagcttcagcccctgcggattataggtcataaggctttccttcataccgtcaaaaccctcgtccagccggatgccgtccacatgcatttcccggaacacagacaggtcctcataggagattcccaaccttgaaaatacggaggggcttacatccggaatgatttccataccgcaggcatgggcttcgtcagccagacggcggaactgtccgatgatttcctcaccgctcttttcaccaacacttaaaagacaggtaaaaatcctcttataacccagtttacctgcctttctgatatacgctatatcctgttcttctgtggaatgctccggataaatagaaatacctaatcttgccataataataacccctctttccagatttgaactgcaaagcagttctttgatattaactatagcctgtcaagaggggattttgcggtaaatccgtttcctagctgttaggaaacggatttattatatcatagccgcctgtcagagcgtatttataaaatggtgcgtatgagtccttttaggaaaccggaggcctggccctcgtcaggtccttccaccgtaagctccaggctttctccctggtgtgcgcccaggctcatgagagcaaggacattcttacagtccgctgtacccttttggcttttaagggttatacggctctcatattccgcggccgccctgctcagactcatagcattggtagcatgaagcccctgcttgtcagatactacatatttataacttatcatttcatcatcacccttaatttattctccccccattttaacatagttaacttttcttgacaaccaggtgtgttgacaggtagaatagaaaaagccgtgcagcattccggtaaagataaaataccgaaggcgctgaaacggcagagaaagaaaagaccaaaaagaaaagaccagaaaggattggttggaacccacatgaaattacagcgtcttctgagcctgacacgccaggctcttgatacatacgggctgattcaggacggtgaccgtatcgccataggagtgtccggcggaaaggacagcctgacattgctccatgcccttcatcatctgaggaggttttaccctgaaaaatatgaactgtgcgctattacggtggatttggggcttggcaatatggatttggaaccggtggcagctatgtgccgggaatttgagattccatatgaaatcatctccacagaaatcggcgcggtcctctttgatatccgcaaggaaaccaacccctgttctctttgtgccaagatgcgaaaaggcgctctcaatgaaaaggccaaggagatgggatgcaacaagattgcctatgctcatcacagggatgatgtgatcgagaccatgatgatgtcactgttctatgagggaaggttccactccttctcaccccttacctatctggaccgcatggatctgaccgtcatccgtcccatgatttttgtcacggaggcagatgtcataggattccggaacaaataccagcttcctgtatgcaaaaacccatgccccatggacggatacacaaagcggcagtatattaaggagctgatacacaggctgcaggaggacaatcctcatataaaagactgtatgttccgggcaatccttgacggcagcataaaaggatggccccaggcgttgaaataatgcctgaggccatccttttgcacttcccctgtgcttctattccggggcggtctttgatgccgggtactgcttcagataccggtactgctttagatgccgggtactgcttcagataccggaacctgctttagattcctggtccgccctcgtccgtaccgctttgggcctggccagggccgttgtcctggcttcctggtccagggctgctgccgccggaatcagattcggagccaggggaggaaccggagcccggcttctctgtctcaggggcctttgtgggatggctgccggaaggttctgcggcgccgctgccgcccgggccgctgcttcccggtccctgttcctcatccgtatgtttggtgctttcaggagcctttgtgggtttacctgatacgcccggccccacttcttcggtctcttctgtttcttcggtactctcctgggttgtctcctctgtctcttccgtctccccggtactctcctgcgttgtctccacaggcgctgttgtttcgggcggaggtgtctctgccggtacattctgggcaggcgccttatctcctgatgaacttcctcctgaggagccgcctccggaaggagctgccttgccctcctcataaagccctgtttcttccgagatatgggcgctgattttacggacagcggaggatggactgtaggacgtctcctggccgtacaggaactgatgaagaaggactacattgctttccagggtggtgggcaccacgcagtccatctttccgattttcatggtctgccttgagaatgggaaaccggcagtctctccgatgtgatacttaccgatatcctttgccagaggcagtacatcgtctactcctacgctggtggaaatttcctgcaccatgtagcctgccagcgaggtcagagttgagaggtcagcctgctttgcttttgccagggcaagctctaccacctttctctggcgctccgttctctggaaatccgtatccatgagacgcagacggctgtaggccacagcctggacgccgtctaaatggttcatcccggcctgctccagctgataggaaccaatacctgttgaattgacggtttctgtaatgaagccgttgatatacttaaattccgcaggcgtgatttccaggtctatgccgcccagaatgttgatggcctcagccactgacttccagttaaaggtggcatagtcatcaatcttgatatccaggttttcctccagggctgacactgcctgcttatgtccacccttaaagtatgcttcattaattttatgataggttccctctgaattgattttcaggtatgtatccctgtaaacgctgacaaggcggatttcccctgtagctctgtcaatgctgcatatcatctgaacatctgccagtgcgttttttgtattgccatctctgctgtccactccaaaaacagctatattccagtagcctgtaggtttgtgaaggaacagccaggctccataccctatgaatgcaaccagaaggagcaaaagaatccccttccatctgccttttttacgtcgttttgccatttgtccctgctgccgtccggcagatgtcctgcccctttccatagtatcctgctgcctttttgcggtgcgcccctgatttcttgaaacggacggtgctgttctggcccggtcctgattagaggaggcacttcccggctgacgggatttcctgccctgggcatttctgtttcccgcggactgcgcctgacgccgtccttcggcagaaccagacgaaccataagaggatctaagccggcgggcgggcatgggaggttcgtcgtccagatagtcctccatgggaaaatcaatctgcctgtcctcttctgcgtcgtattcctcaccgtaatagtactcctcgtcatactcctcgcggccgtcataggattgtctggcacttctgcgctcaccggctggctgtacaggcctcggatatgccctgctgctctgtctgccgccttcctgcctgccgctgcctcttctggcacgtgccctcatgcgttccagctcatcatcattttctctgttattcatgattatactcctctttatctatttggttcttatgcggaaatcattccagaatacgccggtaactctcccagttacttgtaacggttcccacttccacattattggaattgcctgtggtctcctggatacagagcatattcccctctgctgtccagcccaggaatattaccacatgggccatgggattaaaccggatacagatgtctcccggcagcagttcatccctggctaccggtgaaccgcagcccaaaagtgtaccggtactctgggcccccagcccttttccggtgaccgaccagtatacccagttgatccagccggaacaatccagtccctttaaaagcctgccgtcctcatccggaacagtcagtgagccgaagccatttccggtataaccaggtgctgatggtttgcctccccagtagtaaggaatcttacctaccgatgtaagggcataccgcacgaaatctttacgctgccggctggcgtcttccggaaccagactcatgtataattcaatctcctgggaattcaaaagtccttttaccggatagtcaactgtataaagaccatattcctgggaccaatcctgggccagcagcgcgcctgccatgtttctggtatccgcattccagcctgtccagccggaagccttgacagcttccagtgtatctgctgcctggaatagactgtctgcctcggcagtgcctttgaccacggccagtaccgtacagtccacatggcccggacaggtccgggagccgtctgccggacctgtatcagaatccccggatccgacggatgacgcatcagaaaaactggccacggctgctgtctcagcttctgcttctgcactggctgccattgagccaactggttctcccacagctgctcctgactcaactgcatcagttccagttgctgctgttccaacggtttctgcgccagctactgcttcaactgcttcagcaccagttgtttccgacccagctactgttgcttcaactgcttcagcaccagctgtttgcgacccagctactactgcgccagctgtttcacctccagctgcttccgacccagctactgctgccccaactgcttcagctccagctgcttccgacccagctactgctgccccaactgcttcagctccagctgcttccgacccagctattactgcgtcagctggttcaacaccagctgtttgtgccccagctgcttccgtcccggattcctccgcgtcccttcgcccgtctgctacttcgtccaggcagctgccgtcacaataataaattccgcctatgcgcacagagtacttgtgtgaagcgttccacagcttgtccgcacagtcctccattgttttcatatctttaagtatgccgaagtaatgcagggtattgataatagaaataatttcccttgcattggaagtgcttccggtttcctgttgttcgctgtttacaaagtgcacggatatgttccggaactccggtatgatgccggacggtgaagtgacggctgtctccggaagtcccagcagggctgcaagctgctggggcgtataattgtacaggtcatatagacccgatatccacgaagcgtcctttaaagccagcagatcatagagccggcccgcatagctgtcagccggatccgtggaatctgccccatcctcatagagataggccagattaagtacctgggaatccatcatgtccgcattggagggagttgcatcccggcaggccgcacctggcggaaagagaaaggaaggcgaacccggagccagatctatgtattgtgaggtggtttctacggcccctccctcagagctgccggcagcgggagcattcagtctcccgctgtaacgccccgccatataggacattgcgcaggcgcacactacagtcacggccagggccgaacactgcagaatctctcgtttgtatttttttatcacctgtatgtaatcgctttttttcatgtcgtgcgtcctgttgtgattcataaatcatataattgcaccgcccctcattatatcacacaggcaggtgaatgaatagaacaaaagtcttaaagaatctttaaaatcgcgcataaaacagggattatgccgggcaccggcagggcggctcacccaaaatatggttgacgcataaaatagagtgagctataatattcacaatctgtcacaggagggacagagacacatagcaaagctaagcgccatgcaccttttagcgggtacgtgaacagcaggaacgtctgctgccgtttataaggttaacgaggtggagagagaatcgagaaattcggcgggtgctctcccatgctgtccgggcgtgttgcatactggaaaatatgcgggtaactgcaaaacaaagccagtgtgaccggatgtatgatatcagtaaaatggataaaaaatggaatgctgaaaactgcctgtataagacagcttagttttttgctgtctttttcaggaacaacaattgcagttaaaataactgtaactaacaaagaaaggcagaacaaattatgtgtggaataattggatatacaggccctttggaggccaaagatgtattgttaaagggactcgcaggactggaatacagaggatatgacagcgccggtattgcttacttcaaccaggattcccaggtcaggagcattaaaaaggtgggcaaggtagccgcccttagggaatgtgtaaaatcaacctgcgagatatcccactgcggaatcggccatacccgctgggccactcacggaggtgtaacggacgccaatgcccatccccacagcttcggacaggtaaccctgattcacaatggaatcatcgaaaattaccgccagctaacgcaggaatatggcttggaaggccgtcttgcctcccagaccgacagcgaggtagctgcggctgttctggattctgcttacaggggatgcggccaggatccgctgaaggctatcgcagcctttacaggtatgcttgaaggctcctatggtttttgtatcctttttgcggaccgtcccggtgagatatatgccgtaaggaaggtaagcccccttgttgcttcctacacccactcaggagcgcttgtagcctcggatcttacggccctgatttcttataccagggagtattttgtggtcccggagggctgtattgtgcgcctgacgccatacaaagtccgtgtatatgatatggactttaaccgtgtggagccggaaacactggaggtcagctggaacatggacgcggccatgaagaacggatacccccacttcatgctcaaggaaatccacgaacagccggaagcccttaaaaataccattcttccaaggatgttggaccgtctgccggattttagagatgacggtattccggactccttattcgcagagtgttcccaggtgcggattattgcctgcggtacagccatgcatgcgggaatggtggcaaaagcactgatggagcccatgctccgtatacccgtcaccgtgtccattgcatctgaattccggtacgaggatccgctgattgattccagcaccctggtcatagtcatatcacagtcaggagagaccattgacacactggccgccatgaacctggctaaaagtcttggctctgtcaccctctccattgtcaatgtaaagggttccaccattgccagggaaagcgattacgtattatatacacatgcaggccctgagattgctgttgccagtacaaaggcttattccgtgcaactggctgccctctacatgattggctgccgcatggccctggtccgcggggcctttggccaggatgaggcacgggaatttatgacggatctgctggatgtcataccggctatggaaaccgttattggacagtctgaatttatccagtcctttgtgcgccacctgattcgtgagagagacaccttttttattggaagaggtctggattacgccttttctctggagggggcccttaagcttaaggaaatctcctatatccacgcggaggcatatgccgccggtgaactgaagcacggaaccattgccctgatttatgacaatgtgcctgtcatagcaatagcaactcaggaccatgtatttgccaagaccatttccaatatccgggaggtaaaggctagaggcgcttacgtcatccttctggccaagaaacagtctgtggtggaggatggagtggctgatatagaacttcggataccggacctggaagaccgcttcaccgtgtttcccattgcagtggccctgcagctgattgcctattatgcttccatcggcaaacatctggatgtggatcagccccgcaacctggccaaatctgttacggtggagtgacagctcacagctcatctttttctggaatggattcctgacatgaatttccggaatacagcatttttagatgtggtttagagaactatacggtatgatacataccataacggttattcaaagaatactgcatctgaaaaataaaaggagatacgagccatgaaaagaaagattgctttactgctgatcacagggatttgtctggcaaacaccgtgccctgctttgcgtccccgtcaatgaaggtaagtgtttcaagttccgaagaaaatcaatattccacgcttcctgacggggataccctgcaaaaggatgtgggattcaggccaaaggcgcctgcaagcctggctggcggttatctgtttggcagtggaaatattacggaatcatttgatcttgattcaaatggcgctcctgtcaacaaacaaaaaggtataagctttaaatatataaaaaaggacaataatacctc

SEQ ID NO: 3224 - DNA, 41448 bp, Unknown
  gut microbiota DNA sequence
accagcgtcaggccagtccctttcaagcaatgcgtctgttataaaatatggggagacagacttgtattatagtacggcagaagccaattccctggcctggattgacggggacgtacgctacattcttatggacatcaataagattgtgaccagggatgaaatggtggccatggctgaggatatgattgatttgggtaaagatttacactgacatcaaaacagatgcagcaataccggcttttgccggcgttgctgcatctgctgttttagatgcttatgttgacatatctccatgcaattcgatgaaactacttctgtttcctccacgtctgcttcacttttgcaaaattcaggatgacatccactgcgccctccggtcctgtgacactgctgttaagacacagatcatagctgcgcgggtcgctccatttcttgttggagtaataattatagtagctggcgcgctgtttgtctgtcttaatcatgatgtcctttgccttggacgcgtctaccttgtacaggtcctgaaggcgttttatcttgtcatcgtcgttggctgtgatgaatacgctgaccacattggggtagtcctccagggcgtaatccgcacaccgtccaaccatgacgcaggaggcctcttccgccagctttttgatggtgtcaaactgagcaaggaatatcttatggttaataggcatatcggaatatcccgatgccgtatagcccatggaataggaatccataaccagtgagtagaggaaactgctggtgggccgttcatcgtgtttctcaaacagctcctcgcaaagtccgctgtgttttgcagccatggataacaattccttgtcgtagcacttaacacccatcttttctgccagtaattcgccgatcatcttgccgccgctgccacactgcctgccaatggtgataattagattatttgtcattctacattcccctttctgcactgtctgtcctgtaggtcataagtcatattttatctattaagtattataactcaaaaattcagaaaagtatatagaaatgtacaaaaaagtaaaaaatagtattaagctttgcgacaaaagtgacaacttgtctattaaagtatgtttttactgcgctttttcatcctggtttcagcttaaggtgcgaaggagtttctcaaagtaatccggcaggggcgctgaaaattccatatattctccggtcctggggtgaatgaaccccaggatgccggcatgaagtgtctgtccgcagagaccgcttataggacacctggcaggcccgtacacagcatcccccaaaagaggatggcggatactggccatgtggacgcgaatctgatgggtgcggcctgtctccagcctgcactccacatgggtgtactgcctgaaacggttcagaaccctgtaatgggttactgcattcttgccgttctggtaattgatgctcattttcttgcgctccactggatggcggccaatgggcgcgtccactgtcccctcatcctctgcaatgacgccatggacaatagcctggtacctgcgggtgatggagtgttccttgagctgggcagcgatggagctgtgggccatatcatttttacacgctatgatgaccccggtggtatccatgtcgatccggtgcacgatgcccggccgcatgacgccgttaatgccggacagctggtccttgcaatggtacatgaggccgtttacaagggtatggctgtaatgtccggcagccggatggaccaccattcctttaggcttgttgatgaggatgaggtcctggtcctcatagagaatatccaggtccatgggctctgcgtcgatttccggctccacggcctccggcacttccagctcaatcctgtcgtcttcctccacgatatagcttacctttacgccctggccgttaaccaggacctgccctgatttaaggagcttctggatgtaggagcggcttaaatcagggcaggcttcagcaaggtatttatcaatacgcacatggtcctccatatccgttggataaaattcctgtttcaaaggggtgtctcctcctgtctgatgtatgatgctactgttttttcaatgagaaacatgccatgtcctcgtccttataataaaacatgattaaaaacacaaggcaggcagcgccgatggttacatagcagtcggccacattaaaaataggaaaattaatcagtttaaaatacaggaaatccaccacatatccctgactgacccgatcaatcatattgcccacagcgcctgcgcttatcatcatcaggcagacagccaggggacggtattttccgtctgacggcatcttatatatgaggtaagccacggctcccagcacaaggaccgcaatgagaaagaagaaaagctgcttttcctgcatcattccgaaggcagcgcccctgttttccgaataatagaattcaaataccccattccagatgacaaagggcttctggccttttaaggattgtaccaccagtcccttggtccactggtccaggcccacaaggatggcgaaaccaatgaggaagctggcaatcagggattgcttttgttttgtcattatgcctgtcctcctatcacatcaaaaccagccctcatctcatcagccgtaacagtcgtatccacatacgcctgtccaatggccttaagcagcacaaaacggatgacgccggcgtcaacctttttatcgctctgggtggttttaaggacctgatcccacacaagacccggcgcagcgtcaggaattccaaaggaaaggaaggtatttctgatgtccgccatctcctcctctgtaagcatgcctctgagctgggagatacgggcagccccaatgcagcccagccccacgcagtggccgtggtgcatggtgaaattctccagcttctcaaccgcatggcccagggtatggccgaaattcaaaagagctctttctccctgttccgtgggatcctcttccaccacacgcttcttaatcatacagctctcataaaccatggcctggcacagatccaggttcctggcagcaatgccctcatgattgtccttcagccactgataatactcccggttcttaatcaggccgtgtttcaccacctcgcccatgcctgaggagaactgttcctcaggaagggttaaaagggtgcgcaggttggcataaaccagcctgggcatatgaaatgcgcccaccatgttcttataggcgtcaaaatccacgccggtcttgccgcctatgctggaatccacctgtgaaagcagggtggttggaatctgaataaagtcaactcccctgagataagtggcggctgcgaaaccgcataaatcgcccaccacaccgccgcccagggcagccagcatatcctttctgtcaaaatgctccagaatcaggtgctcatacaggtttcgcaccgtatccagatgtttattttcctccccggccgggaaggtaaaaaccgaaacagccttgcagcatccggccagaacagcgcgcacctcctccagatacaggggcgccacattggaatccgtcacaatgcaaattttgtgttccttaacaggaaggcaggatactgcctcctttaaaccgtcaaaggattgggtcagtacgatatcgtagatagccttcccatccctgcatacatttatcctgtcagccatgccagtgtcctcctgattttatacaacaaatcggcagacacaccaggtctgccgcatacttgtcccctgtacaggggcttctttttccttgtcaactacaaatggatattgagtcctgagacatccatgcccatggcgctgcctgcggccaggatgtcctggaaatccccggacagttccactgaatcaggtgttgcgatgaagatataattagatatcttctgcagattgccgttcatggaataggtagctcctgaggtgaaatctatgattctctgagccacttctgtatgtataccctccatattcagtaccaccgccttgcctgccagaaggtaatcacagatgtctctggaatcctccatggatgtgggtttaatcatcgtcacttccatgctgcgtctcataggtactactttgggattggatcttcctaaaaaccggggcttgtcctgctcctcttcttcatcatattccgtattcttctttgagaacagtcccttgcgcggggcctcctcttcaaagtcatcgtccaggtagtaatcatcctcttcctcatcaggatttaatctcatggtatccattaacttacctaacagactcatcttacactctccaatctctatatgaagtgcttactgggggaaacaccttatcgtgaaccgaaaataccggtaccgaccctgaccatggtcgctccttcttcaatggcaacctcgtaatccccagtcattcccattgagagcacactcatagtaacattatcaatgtttttgccacctatgtcaacagcaaattcaaataattttttaaaaattccacgattttcttctggattatctacaaaaggcgcaattgtcataagtcccttaatatgcacatgggggaaatccttaatctgcataatggcatcctccacttcctccataaggaacccgtatttactctcctctcgggccacattgacctccaaaagaatgtccacatccagtccgagctttgccgcgtcgtcctcaatctgctgggccaggcgcagggaatccacagagtgaatcagcacggccttgtcaatgacctggtgaactttgttgcgctgcagatgaccaatcatatgccatcggatatcctccggaagctccggttttttgttcagtatttcctgtaccttgttctcaccgaaatccctggccccggcatcataagcctccataagcatgggaacgggttttgttttgctgacagcgatgagagtcacttcctcaggatttcttcccgccctgcggcaggcatcttcaatatgctttcttacttcttccagctgtttttttatcatattgctttcctcccttattggtacagcagctgtccttcctccaccatggaggcatccagcacgatgtggtcgtacacggacaagccgtatttcatgttcttccgcacagtataatattcactgttggaatccagtatatcaatttgtttgaaaatagtatagcctttattaatattgtaaacacccttcagggaagcagtcctcccaatctggtaacggtccgaggattcgggcctgaccacataatcccctgccttgaagccgttttcctctcccatgtccacgtaatagaattcctcgtccgaatagtagaccgtagtgggcacgaatacaatggatgtgccgttttccgtataaacttccttataaaaaccgtcctccgaggaatcgccgccctgggtcatgtactccagcggtatgaggtaaaaattcttgtccgtcactgcgctgacaggaattttaaggccgtcagccttatccacttttatctcaaaatccacgaatcggtctgagataaactgttccatatattttgaaaaatccagtttcccgtaggcagctccatccttgcccgtaaaggtggaataggcggccggtgtgctgagggaatagtcgcggaatacgacccgaaggacagtcttgtcattataaagggccgcgtcctcttcgctcagcggaaatacaatggaccatttttccgaagtaacaattttataggccggagagccgctgtcaatcaaatccccggatttatgtactgtcttgacgtaggtgcttcggtcaaaggaagctgcctccacgtctgacgttgtcatggattcaaaggagtcaattccgtaagataccactcccgatacatcggatcggacctgttcaaagacagccccggactgttccgccagcttgtctaactggtccagggtgctgaagctggaatattccatcactgaggcgtccagggaaattctggcgtcatagatggttccgaaatcctggttctgaaaggacaggacaaaggatgtaagctgctttttaaggtccgacaggctgtcatcggaaagagaactgccctcctcggcattctcttttaacagcgcctccaggttcccagtctcgtccagagaataaatacggcttcccacagaagcacgttttccctcacgcagataataattgatatagccggagcggtctgctgtccgcacctgctcctcacggagaatcaacccgttgtagattcggttattgacgattccgccgtccactacctcatagaactgaatcttctcccgtttcagatacgtataaacgctgaataccaggtaaataaaaatgataaagaagataatcattcccacgttgatgttgagaggcctgcggtaacgtacgacttttttgtttttctttttggccataaatccggcctccttttacaaaatacacatcacttcacaaaaagctgccctccataccaggcattttaatcccagcaggttggcagcctataagtcctgtctgtattttatcacagaaaatgtatcattacaatgaaataatcacatcgcccttagcacactcaggaagctccgcagcgtccatggaaatacttaacacaaaggttatatggtatttttcaccgatatttttcaatgtcatatatgtatcagaaatgtctgctccctccaggcatgacagctttaaaaagctatccaggtacatagtctccaaatcgtgatcctgagagataataccacagataaatcctaaaaatccatcgctgtttgtaagtgggaattcattgacattaatgagacgaattttgttgtttaactcatacatatgctgggcacttttatccagatatacgacagtgccgttggcccccttgattgctgcattggccatatctaacagatgtttggtcttgcctttacctttttttcctgcaataatctgaaccataccaatctcctccttgagttatatatgttgtataaaaaatcaattaagattactctaattatagtataaattcatagaaagcgcaatcactatttgacgattttagaaattatatttgtcatgttatcatataggccggggcggctgtctgatttcagtacaacagatatatattccttatcattctggtccctggtagccatgatgagacaatagccggctgcgttggtagtgcctgtctttcccccgaatacggtcaggccttccggcgtctcccgctcccttgtcatgaaccagtttccgcctttccatgtcttggtgacggcctggctgtccttgtcgtggtagttggccgtataggatgtggtacccacaatctgccggaataccggatatttgagggcctcattgaaaatgagatacaggtcataggccgtggtataatggtccggatcgttaagcccgtgagggtttacaaaatgagttccggtggctcccagactggcagcctcctggttcatcatatccgcaaacttgtcaatgctgcccgcaatgtgcaccgcgattgcagcgcctgcgtcattgcccgaaggaagcataagcccgtataaaagctgttccaatgtcagggtatctcccggttcaatgccgcacagggttgccccggattccgtgataacagcatcatccgtcacaactacccgggcgtttaaatcgccgtttttaatggctaccagggcggtcataaccttggtgatactggccggatacagccgttcaaaggcttccttgctgtagagtgtttccctgtcgctgacatcaaaaagggcagctgcctccgatgtcacataattttcgtcaaagctgccttcatcctccactacacataaatccgaagcaaaaccgtctgcatagcgcacggtccgggacaggctgtcctccatgaccgggattcgctcttccaggctgtagggttccttaatgcctgaaagacagcccgtggtggaaagggcgacagcccccagaagaagcgcacacagaaagctgcgcgtccgcactgccttcattacctgactacctctcgccattccatatcgcccctgtcaagcgccttgatgagcagttcggcagatgccagattggtggcaaggggaatgttgtagatatcacacaggcggaccacatcgtttacatccggctcatgtgatttgggattctgcgggtcacgtaaaaagatgaccagatccatctcattgtgctcaatctgagcagccatctgctgcattccgcccagatgccctgccagatatttgtgaatattaaggttagccacctcttctatcaggcggcctgtggtacctgttgcatacagtgtgttcttgctgagtattcccctgtatgcgatgcagaagttctgcatcagtttcttttttgcgtcatgtgcaatcaaaccaattgtcatattaaattaaccctccttggattagatatgtcttgtttctctctgaagccccacattgagcaccagccctattcccataaaaatactgattaaagaactgcttccgaaactgatgaacggaaggggaagtcctgtattgggaaagatgcctgtggcaacagcgatgttggcaaatgcctggaacgcaatcagtgttgccatgcccacacagataaggcggccggataaatccctggcccgtgcagccatcataagacattcataaattattaataaaaataaggcgatgaccaccacacagccgatgaagcccagctcctcgccgatcacggcaaagatgaagtccgtctgctcctctgacaggaaattaccattcttgacagacgctatggtggtgttgaaaagccctttgccttttagctggcctgaaccgatggcaatgatggagttgttctgctgataacgggcctctccgtactggtccggataaaaccaggccaggatacgtcctgcctgataatcctttatgaatggaatcataccgtgaagcagcaggtagacaaaggtggccattacgggaatggtaacagccagggttcctgcaatccacttatagcttatgccgcttgcaaatacgattcccagtaccattaccataattacaagacaggtagacagattcggctgttcaaagatcaatgccgccggaatggcaaacagtacggctgctatggccacagtgctgacctgattaatcttttcctggtatttcatgaaataccaggaaaaggttatgataaggcctatcttaacaaactctgatggctgaagctggccgatggccggaacctcaatccagcgcctggcgttgttcaccacattgccccaaatcagtacggccacaaggcttgcaatacacaggccgtatatgagggtactgaagttcaggattttgtggtaatccaccagggaaagaccaatggccacagccagtcctatgaacactcctaaaagctgcttgttgactgcatccgcgttcatattcgtagcgctgcggataaccagcacgccgatgacgttgagtacaatcatataaaatatcagccgaaaattaaaatgtctgaaatcataatccaaaaacatatttaatatagccccttgttcgatatggaacgaatcggtatgttggcatgaagcacaggcagtgtccggcagccgcccttttggggactgccctctgtatccatctgtatctggactttgtccttttctatctccatatatttggaaatggcgtgtatcacgtcatcttttatcatcagtatcatctccggtgagcagcctgccttatcggataccagcaaaagctttagccgcatcttagctgtctctccggaacgcctggtttgaaacccctggaaccatctcaccttgacaccatcccttctatgctctcttaagtattccgcgcagcctggcaaaaaaggtttccgtctcaccgggatttgtcataggtatgctctctcccagtatcctgcggcagatatcaagataagcctgtccggccgtagagcccagtcccaccagaggttctccctggttggtggaaatgacgatgttctcgtcatcgggcactgctccgatgatgtttactgccagaatgtccgtcacatcgcttaaagacatcatgtctcccctgcggaccatgtcggcccggatccggttgacaatcaagtcaatctcgtctatctccgcatgttccagcagcccgatgatacggtctgcatcgcggatagccgaaacctccggcgtcgtgactaccagtgccctgtcagcaccggctatggcattgtaaaatccctgttcaatgcctgcgggacaatctaacagtatgtagtcaaattcttccctcaggtcatcaaccagctttatcatctgctccggattcacggatgtcttgtcccgtgtctgggccgaaggcagaaggtataggttcgggtatcttttgtctcttatcagggcctgcttcatacggcagttgccttccaccacgtctacaagattgtagacaatgcggttttccagtcccatgaccacgtccaggttgcgcaggccgatatctgtatcaatcagcactacccgcttacccaggatagccagtcctgttcccacattggcagaagtagtcgtcttgcctaccccgccttttccagaagtaatcacaatgacctcgctcatgatgaaatcctcctgaaaattactttaccttcctattgtacattaaatttcgtaaatttaccagtatttttttggcattaagcaaaatttaacatattgtttaggaatgacttttttaaagaccgcataacaatggccccatcttccgccagggctatcatgggtccccgccccagacgcttgtttctctcgttgaaacggctgctcatatccccgatgcggatttgcaggggggccatgtcaagggccatgacaacggcctggggattgccggacacaccggctgtcactgtacctttaagttctcccagtacaatgacattgcccttggccgtcacccttgctccgtgatccacatttcctatgatcacgatgctggcctcggattccaggcagtctccgcgcttcagtgttccccggtagaactgccctgtctgggagttcagttccatcagcttatcattcagtgctttctcacagcgttcaatccgttccgcatccgtgtccagaagacagaggacttcaatctgtgagttcttcgtaatcgtatcgacaattgcaaattcctgggccgcagtcagatcccggccctccagggtcagggtcatctggaccgaaccccagaaacgggcgctctcactgaactttttcccgatggcgtccaaaagctcgccaaagggcagttcagggtccaggatgacagtcattcctgccttgctgctcttgattacaactgcattgcgcatacaatcacctcttttgctggtttagtcaccaatatttacatttgatacacctaatgcaccggagctttctatctgctccagggtggtatatttataataatactcgtacacctttttgccaagggttgcggcgttagttcccgcatatccgtaaggaatatttacagtcacggcaatttccggatggctgtaaggcgcaaaggaaacgaagaaggcatggttggaacggctcttgtcctcctgggctgttccggttttgcctgccacctccacagggaggtcggagaaaatactcttggcggagctgtccgtgattacccggcgcataccggtctggaccgcgtcccaggtactgtcagccgcgtccacatgggagctgatggcaggggtatagtccttaatcaggttgccgtcagagtcggtaagtttatctaaaagactcagctcaaatacatttccgcggttggcaagagctgccacatagcgggaaagctggacattggtgtaggaatgggtgccctgtcccatggcggaacgctccgggtcctccgatgatatctggggctcgttctcggaaatctccacacccgaggtgtgatccagaccgaaaagggtggcgtatttgcgcagggtggcaagaccctggtccggcgaataggtgccgtccggcttcatacagagcctgtgggccagctcggcgaagaagtagttgcaggagttctgtatgccttcctcgatgttctcgctgttatggcgtccgggccagatccagcacttgatgggcttggaaatctgatcgtatataccggtacactcgatggtgtcctgaagtcctatcacgccctcttccagggctgccacagccgtgatgggcttaaaggtggaaccgggggccttctgggcctgcgtggcgttgttgtaaaggggtctggacatgtcgtcctggagctggctgaagtaagccgcgtccacgctgcccgacatcaggttattgtcatagctgggatatgtgaccagggcccggacttcacctgtttttacgtccgtcaccaccactcctgccgtacacgggtcaagagccagctgcgccggcgtcagctccaggttggatatcttttccttgataaactggtaggtgtaggtggaatcccccatctggagggcggctatggcctgggcgtcatatgccagcacgccctgggcataaagggccagacagagctcacggcctgttatgacctcatcgttaatcaggtaacggaacatgcgctttgtaaatttgttgtcgctgcgcagggattcgatgacatggtccaccagctgggtgaatatatcgtctgcatcggagtatttactggtcacgtccagacgggtggtgtccacccagtttcccgcgattccgctgtaaatataatccctcaggctgatagtgccatcccgccacgcctggtattccggcgaggactggtcaatcttatccttctgtatgatccccacggacccgtcagacagataagcatagatataattcatataggtagccatgtccttgggaagatcgttcatggccagggcatgggagctgagaagctcgttgcgtatcgccccaagtatctgatccctggatgtctcgtatttgctgtaaatctgtttttcaatgtcggacgccccttcctgggacatatccatcagggacagcacattgttgttaatcagctggtaataggcgtcctttacaggaatgggtattttggaagggtcataagtcttgtcggggtccaaatcatcgtactggagatggtagctgatgataccggccagctgctgctctatcagcttgtaaatagcaatctgcagatccctgtcaatggtcaggtacacatcatccccggccttggcgtccgtcttttcaatgatttcacggggacgccccatgttgtccacatacatcctggagtagcccttttctccctgaagctccagctccatggatttctcgattccgatacggcccacaatatcgttgagatcgtacttgtccggagcgtcttccggcaggccggccgcctcatcggactggtgccactgctcgttcagggcggacagctgatcctcctgaaccttgccggtatagccgatgataggggcaaaatagatgctgtcctcatacttgcgcacataggactgctccaccgcaactccctttaagtccgcggcgttctcattgatttccaccatggtctcattgctgatattggtggccacggtggtggtctcgtacttctggtattcggtcagcttcatggtatagataatattgatcatgcccagggctatgttgtccggtatgaccaggggattgcctttttcatccttcatcttatccagctcataatccaccttcttgcgctcaaaggcctccctggccgtgatgttggtgggatatttgccctttgggtcatttaggcttgcggtggaggaaagaccgtaaaaattcaggaagaaacgggttctggccgaatcagagctggatgtgaagaacatctcaccgttctgatcaagggcaatctcgaattttccctccacagtctcaccgcggcggtccagtatccgtaccaggcggtacagcatctggttgcgtgagctgggcctgggataatcccccaaatcctgtatggtgacggaataagccagctcattataagccagcctgttgccgtttctgtcatagatgttgcccctggaccccggtgtggtgacgtttttttccgtcctctgcatataggtttcctggtattcgcttccgtccagaatctgcatctggaacagcttgcctaacagcccggcaaacatgacggtaaacatcacggaaagggcaaagagccgtgagctgaacagcttcttgaaaaattcttttacaatttctaacagttcgtcaaacaagttttgtgtctctcctttttcctatatcctccacacgtctgctggcggaaaggaacagcctgtaaatcaaaagagtggtaactgcagtaaatataatctccggaagcatgatgttcctgaaataataaggaagattcagacgtccgcggattaagaagcggaatatatatatatacatgctgtaccagattccgttgaaaatactgagtatcagcggaagggtgatgtagtcttcgtaatagtacttggtaaaaatgccgttggcatagccgatataaatatagataagggtataaaagccaaaaggcccgctgtagaaaaggtccagtaaaaggcctgaaagaacgccgtaaaacatccccgcattcttcccatggataaagccgaaggaaaacgtaaggattaaaagcagattgggcgttgccgacaaaaacgggagcaggggaaatacacagttctgcaccgtaaatgccagcacgataaacaatatattgatgagtacctgttttatctttgcttgaatcactgggcagccgcctctcctgtatctttgatatctgtaataatcagcacctcctgcagattattaaaatcagccaccggaatcagatagcctgactgggtcaggtggtccgggtcaatggagacatccgcagcatatccaaccaggatgcccggaaggaacttggtgctgatgttggaggtgacgatctgatcgccgtccctgagaaccgcatcctttgaaaaatccgtaagcttaagacgcccctcctcatagagggtcaaatctcctgccacaatacagttataggaggaatccagcttcatggctcccacacggctggaatcgtcaatgatggaacgcaccgtggcgtaattggcgcccacatccgtcacaatgcccaccaggccgccgtcggcaaccacgttcatgtccacggccactccgtcggcagaacccttgttgatgcggaatacctggaaccatttttctgaatcacgggcaatgaccctggccccgattttatcatactgcatgtaatcctggtcaagctcatagagcttccttaagcggtccagttcaaactgctctgcctgcagacggttattgtcctctgtgagctgtacaatctgggtcttcagttcctcattttcccgcagcgcgtcttttaggctgccgtaatcctttaattcgttatagatgccggttcccactgcgttgactcctgtctgtatgggaatcagaaaataacccacaccggtgcgcaggggttccatgatgccgtccttcagggatgtgatgcagatgagcagtacgcacagcaccgtaagtcctgccagaatatatttactgtgtttggtttccatggataaacttcctcttacattaaattctcttcgcggaaactgagataccgcctgtctccgatgacaatgtgatcgatcagtgtgattcccaccaggtctcccgcttctttcaggcgtttggtgagcagtatgtctgctctgctgggggtggggtctccgctgggatggttgtgaaccagcaccatggacacggcccggcacctgaggccttcgatgagtacctcacggggtgtcatgacagatgcatttactgtccctctggccataatctgatcacgaaccatggcctgcttggtattcagaaacatgacccggatttcctcctgctccagatggcgcatatcttccatataatagtccgatatttcctccggacggccaaagtaaagagtatgctcgctggccttccgcttccagatgcgttttgacagctctcctatacaaagcagctggaccccctttaccttaccaactcccttgattcgtgtaaaatcatccagggaatggtgcaaaaggcccagcaggccgtctccggggcttcccagagccagcaggctgtctgccagatccagggagtttccttccctgcttccggtgcgcaggatgactgccagaagctctgtatcggacaggctgtccggacccagactcagacatttttcataggggcggtccttgtggggcagatccttaattcttattctttccatctctctcctaactacgcacctctccaagcacaaagtcaggaaaattatatataccggtaaatgatgagggccactgccacgccgatgatactggccatggtaatcttgatggtcagtccgaaggtgatgaccaggatgccgaaattaattaccagaggcgaatccagcccaaaggattgtccgaaattcagccagttcagccaggaaatcccttctgccagctgtcccataaagcctcccaggacaatgcctgccagcagcatgattaaaagtatccagaaattcttgtaatgcatgtgtcttaccctccggtcagtcaggccaaacccctgggccgcaggacctgggttcagcctaattagtatatattaccataagtttcctggggtgtcatcttaagattttcaaaaccccgtcatccaacagctgctgcaatgacttgagtattcccagctttgcatggtaccaggtcagtcctccctggaaatatacggcatagggcggcttaatggggccgtcagccgagagctcgatggacgatccctggacaaaagcgcctgctgccataataacagggctgtcgtatccaggcatatcccatggctcgggtgtcacatagctgtccacaggcgcggctgcctgtattcccttgcagaaggatatgacgccctccggcgtgccgaaggtgatggcctggatgatgtcgtgacgggattcactgccgtctggcaccacgccgtagcccaggcgctcataaatattggccgcgaatatggcgccctttaaggctcctgacaccacaacaggggaaagaaaaagcccctggtacagctgctggtttaaccccaggctggcgcctacctccttgcccagtccgggagcgcttaagcggtaggacgcccgttcaatacagtcctttctgcccacgatatagccgccgatgggagccagtccgccgccgggatttttgatcagggaacctacaatcatatccgcccccacatcggttggctccagggtttccacaaactcaccgtagcagttgtccaccatgcagataacgtccggttttatgttctttatgaaggaaatcaattccccaatccgcttcacagacaatgtgggacgggtggcgtaccctttggaacgctgtatggtcaccagttttgtcctttcatttatggctgccgcgatgccctcatagtcaaaggaaccgtcctcaaacaggtccacctggcggtagaccaccccatattccttaagggaacccacagaatccctgattcctatgacttcctccagggtgtcatagggcttgcccacaggcgacaaaagctcgtcccctggacgcaggttgcctgacagggccacatgaagggcatgtgtgccgctcatgagctgaggacgcacaagggcgctctcaccgtggaatacgctggcatacacatcctccagcgtatcgcgtcccaggtcattgtaaccgtaacctgtggtagctgcaaagtggatgtcgctgacacggttgtcctgcattcccttgataaccttcatctgattgtattccgccaccgcatcaatggcctcaaagcgttccctcagcgctttttccgtctcagccgcaaactccctgacttcccggctgatgccaaggctttcgtacatctggttcattccatttatatccattggtttataatcctccgttttccggtttgttattgtagcacgattccctgctttgcgcaatcctctaatatccgttccaggacgtttgagacatcccctccgaaatcaggcagattcaaaaagcgcacatccctttcccgtttgaaccaggtcagctggcgttttgcaaaatgtcttgtatcgcgtttcagtatatatacagcctcatccaggctgcatctgccttccagatagtccagaatctccttatatcccagcccctgcatggaggtatggcctctccggcagcccatatcctttaatgcctttacttcctccaccagtccctgttccatcatcaggtccaccctgcggtcaattctctcatagagcagggcccggtccgtgttcagaacataatagaggaaattgtagggggattccttctccctctcctgctggttatggagggaaatcttctcccctgtctggcggaagtattcaatggcccggatgacacgttttatattgttggcatggatttgggcggctgcctccgggtccacctggcggagcatggcatgaaggagctggggagccctctctccctccctctcagccagggcttccagttccctgcggacagggctgctgtcctcattttctttaaaatcaatgtcgtacagcagggcctgtatataaaagccggttccgccggcaatgacaggaatgcggccgtggctgtaaatctccctcagggcctcctttgccatctgctggaaggtgaccacattaaaggagtcccggggatccagcacgtcaatgagataatggggaaccccgtccatttccccgggagtcaccttggcagagccgatatccatatgcctgtatacctgcatggaatccgcgctgacgatctccccgccaatggcctttgccagccggatggaaagggcggtctttcccactgccgtgggtcctgtgaggacaatgagcggctgcttcatatgttaaaagctcctttcagacaatgcgtttgaattttttctccagctcatacttgctcatggagatgatggtaggcctgccgtgagggcaggcataggggttttccaggtccagaagctggtcaatgagcacattggcctcctggaaggacatggtatgatgtcctttgacagctgccttgcaggacatggaggccaccttttcatagatgatgtccgggttatgtacagacatatcctccgaaagcccgtcgatcatctctgtcagcagttccttcttggcaatggaaaacaggttggcaggcacgccgcgcaccgcgtattccctgccgccaaagggttctatctcaaaaccgattcccgtgaaataatccatatatttctccaggagaagttcttcgttcatgttcagtgtaaggataatgggcgggtccaccatctgcatgtcgtactgccttgtctttaaggacttgatggtattctcatagagcaccttttcatgggcagcatgctggtcaatgatgaacagctgttcattgtactccaccatccagtaggtgtcaaacagctggccgataagcttgtgcttcagcctggccttggggtccaaaagcttgccgtcaaacaggtccagctgttccggcccggcggtgcagccggctgttccggctcctgtatggacagaagcggtaccggttgtgtctgaattcccggtcataccgggttccggatgactggggactgtctggccggagtctgactgaccgggcgctgtctggccgtgggctgtctggctggaaattgtttggccggagcctgtctgaccggagcctgtctgaccggagcctgtctgaccggaagctgtctgaccaggtgccgtctggccggaaactgtctggccggaagctgacccgccggccccaatatccttcccggcagaaaccgtgttttccgtttgatggggattaactgcggccgaggagactgaacgtttttcctgttcctttcttctctccttcagccagtcaggcatcagctcattgacaaaggatggcctgggcggggctgactgggcgtaaactgaaccggcgccggaggccgggccgccgttctgtacctggacggggctgccagaggttttctggcttaggttctcccgcctgcgcacctcgaacggctccgggcggggagccagtttttctgccagctgtctggcctccttttcctgttttgcttccaggctgacctgggggatcagctccttgtgggccagggcattgctgacagcccttaacactgcatggtacaccttttccccgtcggcaaagcgcagttccatcttggtgggatgcacatttacgtccagggtgtccggctcaatatggaaatgcagcatggtaaagggatacttgtgctgcatcatatagggtttatatgcctcctcaatggccttggatataatggaactcttgatgtaacggccattgatgaaataattttcataattccggttggatctggctatgaccggcttgcctgtaaatccggtgactgtaatccagtcctcattgatttccaccgggagaaggtttcccgcaatctcccgtccgaatacagtatatatcaggtccttcaggttgtggtttcctgaggtgtagagcttattttgattgttctgtatgaagcggatggaaatatccgggtgggaaagggcaatcttctccaccagggccgccacatgggcgccctctgtcatgggtgtcttaaggaatttcttcctcgcaggcgtgttgtaaaacaggtttcgggcaatgatggtggtaccatcaggggcgcctatttcctccagccccttctcaaccccgccttcaatctggtaccgggaaccggtaaggctgtcccccgtctttgtaatcagctccacctgggccacggccgctatgctggccagggcctcgccgcggaaacccagggaggaaatggtgaataaatcctccactgtcttgattttgcttgtggcgtggcgcaggaatgccaggggtatttcctcctttgggatgccccatccgttgtcggtgacgcgaatcatggaacagccgccgtccttgatttccacggttacggcggtggcatgggcgtcaacggcattttccagcagctccttcactacggaagcaggccgctcaatgacctcgccggctgcaattttgttgatggtgctttggtctaaaacagttatgttggccatgtttaagttcctttctgtctgtattcagccaaaaagtatctctaaaagccggccccaatctcagatgccagggccggctttatcagttgctttttacaggtatataatccctgacctgtatctactttaccgacttgccggaacgttcggaaaggaacgtgcgcaggccgtttatgcagacagcgcccatctgtctcttatccagaagatagccgccatggtccatggtatataacaccaggcactgctgtgtctcgcatatgtgggatatctggctgtatgcgtgtactgccctgcatccggttggaacagtctgaattaaagaggccgctgcggataaagcccggccccatggtgcggaccagatacgccagaatcaggaagagggtcttcagttatcatatcagattccttttccttgctgcaccggcggccttccgccccaatactgcattacatgatgcagcacggtttatcccctctctttatatacaacaaaaccagataaaacacaagccctttttacagacccatgggcctttgaaccatgggtcttaccaggttatgggcactacaaatccataagtccctccagaacatggacctccatgcgtccctgctccaggtccacattcagaatacagtcaccgatggcgggaagcatcagttcctttccgtccttcatggcaaccacatatacatcattggcccctgtttccagcacatccttaagggttcccagctccgcgccctggtccgataccacagtaagtccaatcaggtccgtgataaagtattcatcgggctccaggtccacggcctgatccctggttatcagcaggtccctggatttatatttttctatttcatttatattgtcatatcccctgaatttaaggatgaccatgttcttgaagaatttcacatgttcgatttccatgggaatatgctcttttcctgtgtcaaggatgacttccttcagctctttgaaacgcttggcgtcatctgtggtggggaatacctttacttcccctttgattccgtgggcggaggttatgactcccactctcagcatgttttccatacacctgtcacctttctgtgataagtaattttacggataaatgttccgggacaatattcccgggcaataaatgaaccgccagccctgcggccagcggtccttcattgtctgcgtactgaatcctgcttactgaatctcaacgattactttcttgtcttccttggatgcagcggccttgacaacggaacggattgcctttgcaatcctgccctgcttgccgatgaccttgcccatgtcggcaggagacaccttaagctcaatcagggtgtcctcgcccttcattgattcggtaacaacaacttcttctgggttatcgaccagtgctttcgcaatcacttcgactaattccttcatcttaacacctcattgtcaactactgaatgccggcgatttttaagagctttcctacggtctcagttggctgtgcacctgttgctaaccacttcttagctgcttcctcgtcaaatttgatgacacttggttccctggttgggtcataagtgccgatttccgcgatgaatttgccatcccttggggatctggaatcagcaactacgattctatagaaaggagccttcttctgtcccattcttcttaatctcatctttactgccatgtgatttcacctccttgtgaattgttcttatattagacatacaggagtattcctgtttgactagcctggtctgcggattgtggtatcagcattctgtgtcctaaaagggcatcttcatcttgccgcccagcagtcctcccagaccgccgaatccgccttttcgcttgccgccgcccataagacccggcatctgcttcatcattttcttcatctggtcaaactgttttaccagacggttgacctcgctgacctccacaccggcgccttttgcaatgcgctgtttcctggaagggtttatgaggtttggattggccctctcctcctttgtcatggagaggatgatggactctactctgtgcatggatttttcaccttcatccatatccacaccggacagctggtttcccatacccggcatcatggaaagaatacttcccataccgcccatctttttaatctgctgcatctgggtcagaaaatcattgtaatcaaattccgccttgcgcagcttctggctcagctccttggcctgttcctcatccacctcggcagccgctttctcaatcagggactggatatcgcccattcccaggattctggaagccattctgtccgggtagaactgttccagatcagacagcttctcgcccataccaacatatagaatcggtttacctgtgactgcgcggatggaaagggccgcaccgcctctggtatcgccatccagctttgtgaggatgacaccgtcaatacctatcttatcgttaaatgtacctgccacattcactgcatcctggccggtcatggcgtccaccaccaatatggtctggcagacatccagattgtcctttatctctaccagctcatccatcatggtctcatcaatgtggagacgtcccgctgtatccaggataaccacgttaagtccgttcttggatgcgtgttccagtgccgccttggcaatgtccacaggcttgtttttgttgcccatggagaacaccggaatacctacccggtcgccgttaatctgcagctgctctatggcagccggccggtagatgtcgcaggcagctaacaggggcttacgtccctttgccttcatctttgctgcaatcttggccgtggtcgtggtcttacccgcgccctggagaccagccatcatgataatgctgatttcgttggagggctttaaggaaatctctgttgtctcggaacccatgagctttaccagctcctcggtcacgattttgatgacagtctgtcccggtgtcaggcttccgaatacatcctcgcccaccgcccgttcctgaacggacccgataaactgtttaaccacacggaagcttacatctgcttccagaagcgccatcttgacttcctttaacgcggcttttacatcggcttctgaaagacggcctttaccgcgaaggttcttgaatacattttgtaatttatcggataagctttcaaaagccatgaaataatcctcctaagactgcactgcattcaatgaatcacacatcaaagcgtgctggtgatttctgcggacaaccgcctaatctggtcaatgagtgccatatccctggtgcgtatgcattcatcagagagacgctccagctcgccggctatctccttgactttaatgaacttggctaccagatgaagcttggcctcataatcctttagtatcttgtcgcatctttttatcaaatcgtggacaccctgacggctgattccctgctctcccgctatctcgctgggggaaaggtcaccgaacaccacgtcctcgtatatcctgcgctgatgttctgtcagcagttctccataaaaatcatataacaaaccctgttccacaatcttttccatttcaaccacctgtgctatcatacacgatagaaaaaggattgtcaagcattttcacttgacaatcccaaaaattattgatagtaaacatttttgtttacagatatcagcagtatggcagcaataaagcatcctataataagaattcggtatattccggaaaaacgggcgccaacctggctgtcaatgagacagaacaggatactgccaaacatcaggatggtgggaagcagcacaaaaaacatgtattttcccttggaaacactgcggggaggcggtgtgcaccgcaccagcttcacaagaggaatcctgccaaggcggaaacagggaccgaaggtaaaggaagcctgataggcgattccttccagccggaccagggcataggtgaattccagccggatcgtctcatagtccagattccttctggccgcgtaaagagctgtctcccgcgcaaagtcctccggcgtcaggatttccccctcaggttcaaaatagatgtactgggagtggagttccttctgaaacatcttccagtctttcctgatatcctccagccaggtggtattgccatcttcacggctgaattcctccagacagctttccacgatggaaggtttcagcgtctgctgttcttccagtctggaacatatctgttcaagcttctttaactgtgacatttccccgtcaatccggtccagacgcatgcgcatcagatcgcttacgctcagccgcccctcaaaatatccgcggatatcccggatgggaatacccagctgccgcagaaaacggatttccagcagacgctgtatatcttcctcgctgtaatccctgtaccggtttccttctgtgcgccggggcgctaaaagttcctcgctttcataataacgtatatttttccggtccaggccggtacgggcctcggcttctttcattttcataaactcatctcctttctgtttctgatttgattataaggtatccaccaactgtacagtcaagggaaatgagtgaattttatttgttttatattggcactccctgaatcccggaaggaattaacacaatcaaaaagggaaaacaattcagttttccctttcaaaaacaatggcataattgctgttgcttgtcaatacccttttttcgctggatgggcttataatctggaccagccgccatccctgggcagattccttcctgataatatctttacacttctcaattgtttcagcattaccacttttcaaatccccgtcaaatggaacttccacaaaattatattcatattttcccatatccgcaactctttctcttttgatatttgcacttattatagcgccggatatcataaagatactatgggaatttataaagggcatataaagattatatatagattcaggaatagttcctattatcggtcacagaggggtttgtaattctcttccttcataatgcttgtataggcagggcggataatcttatccatattaatcaattcctcaatacggtgcgcgctccatcccacgattctggcgattgcaaagatgggcgtgaacatttcttccggaatatccagcatgctgtatacaaatccgctgtagaagtccacattggcgctgacgcccttgtagattctgcgttcctcggtgataaccttggggcccagctcctcaatcatggaatagagggcaaattcctccatacggcccttttcctctgaaagctggcgcacaaagcgtttgaaaatctcggcacgcggatctgacttggaatacactgcatggcccattccatagataaggcctttgcggtcaaatgcctctttgtgaagcagtttcttcagataggattccacctcatccctgtcagtgacatcctttacctcactccttaaatcctgcatcatttccactaccttgatgttggccccgccgtgcttgggtccctttaaggaggccagggctgcggagatgacagaatatgtatctgtgccagaggaggtaaccacatgggtggtaaaggtagagttgttgccgccgccatgctccatatgcaggattaacgccaaatccagaacatgggcttccacctgcgagtacttcatgtcgggcctcagaaggcggagcagattctctgcagtagagagattttcgtccgggcggtgtatgtacatgctgccgtccctctcataatggttataggcatggtagccgtacacagccagcatgggcattacgctgatgagcatcatgcactgtctgagtacattgggaaccgtaatatcccaggccttctcgtcataggaagccagggtgagaatactcttgctcagggatatcatcatatcttttgtcggtgctttcattactacgtcacggacaaaatttgtgggaagtgtacggctgaatgccaggctttctttaaattttgtaagctgatctgcattaggaagttctccgaacagaagcaggtatgcaatttcttcaaaaccatatcggttttctctcactacaccgccaatcaaatcatagatattataacctctgtaaaatagttttccttcgcaggggacctttactccatccactactttgttggcttcgattttggacaccttcgtcagacccgctaccacgccgtttccgtttttatcacggagcccccgcttcacgtcgtacttttcatacagttccaaatcaatcctctcatcgctcagacaaatgtctgaccactggctcaagttgtccataaattcctttgtttcaatcatgcaaaacctctcctttcgactgtttgattttctcttataaaattcctcctgtaaaagtggtatttttactattttattccattttaagattttttgcaaactttttttacttttttgtataaataaaagttcaaaacaggaaggattcctgctctatcacctgtttttcagcgcagattttgtctatgaggggctgaaggagcggttcggctgtccgctggagtttttccagtttactggtttctataggttcaccgtaggccatatactgatcatacgtttgtgtatccataaggtatggatacagtttcgggaaaatgcgtttcttaatatattgaaatatcttaactccaccataatccaagtcgcctgtgtggagataggccgtcccacaggaagtatgaatgccggacaaaacccgttccagctgaatcagaaacgcacgctcatccggagaaaagtatccgtgtgaatatatgattagagtcccttcctcatagggcatgctttcataattcgctttattttccactgtaatcacctttgaaatggactgctccggtgggatagatgcgcttctgagcgtctgattattaaagacaaatccacagggaaacagggaaagatttatcttgtttcctgccagttcaataatcaggtttcctttcacggctaactcttgggcatagccgttaatcatcagctgatccagtacctgccggtcatccatgtcatcatttaccgtgtccagataagccctcgcagcagataagactttggattgcagatgtttttcaaatgccttggatttacccagatattttttactaaaaatccttttgtagactggttcctgtagacaatctatggccttgaaacaagtaaacagcagttcccgttttggggtatccagtgctttgggaacatctcctttatccagactttggagaaaggattggtaatagctgcgtatccactggctttgtatcaaagcaagctgttggtccacctcttctttcagtttattgatacgcttgaacttcggtatttttcccagtcgttggtatatagtctccatctgttccaggctgtaccacgccttctccgcttcgataccgtactgataccatttgaccttcaccagcccttccatttccagttccataagctggttcataaagtcccgttttcctgtctctttaaaatcctgttccctgaatatgacagagcgttttccgctcatacctttcttccagtccacagtactcttctcgtatttttggataatacattccagcggtgcattcataaacagcttcccctccctttttataatgacggttattataacgtatccgcaaattcatccccatcttctatatcctgcatcagctcaacaaagcgctcccgttcaaattcctggatggatatggactttttgttggggtttgcaaagacaaaggtcttgtccacgttttccacgtagttctggattttgtcattggtggcgctgatgatggcctggaacccaaggccgcggatgagttcaatacagctggccaccttctccccatccatcttggaaaatgcttcgtccagcaccaccagacgtatggttggattgcgctccaccttggagggcagattgatgcggtaggcctgggcaaagctggccagaagagccacatacagcgggttctgtccttctccgcctgaattcttcttaatcattttgctcagccgtattttgattacctcgtcttcattctgtataagctgctgcatgtcaaaggacaggtaggtgcggtaatctgaatacttatccatattccgcctggcctcgtccatctgctccggggtggcgttttccgggggaatgaaaatactgatgagttcattcatcaaatccccatactgtttttcatgctctatggtaaacaggtccatctggttttcataggaataattgaggtcggccggattgatgtccagtgaatcatccataaacatatcgtagaaacgcccgtcaggtcctttgttgcggccgataacaaactggtatttgtcctttccgaaatccaggcggctgatgatgcggttcagctcatccttgcgtatcagggcctcccggattgcgctgcggattttatacataaagtcatcccggaaatgttccaccgcggatttggcctgctgcgtggctttctgcttgtattcttccagattatcgcatttcaggtcgcttaaaaggcggtcataggcagcattatctctggcgtttaccgtaaaattgcggttggggtaagtcctgatatagctggtcctgacggccagaagctcctgaaaagctgcttccctggcctcagacagtttgctgcacctggcaatgaaggtttccttttccctgtcatagcgcaccgtatccctggagggcagataggctgacagttcgttgtcatagtcaggattctgctttaactcccgttcctttgacgtgagaagggactggctgtcaatggacttattccggcacccttctatctcccgctctttgtcacggatcagcacattcaggctgtccctctccctctttttgccgtcgcagagcgtgataaccgcctggcggtcccgttctaactggtctacattttgctcctttaaaagctccagcttctgtatcagttttttcttttcacgctccttggctttgtagctgtttatgtcattcagccagtccatgtattccgtgggttcggctgagagccaggggagggccaggattctaagggactccctggccgtttcctccaaaggctttttcttttcctccaggctcgccagttcctgctccagaagacggatacgcctcctgacgctgtccttgccgatataggcaaatttagtgtagttatccgggttgatgtgctgcaggcggaaggtgtggtagagcatgcagccgctggtgatgccgatacggcattcccttaattcatctatggtattgcacttgatgacctttccaagcagcagatctgtataaggttttaagtaggactccctcacagtcacttcctctgagagggcgcctttttgtacctggggctggttctgggatgccttttccgtatccagcacagccacattgaagtattcctttttatccagttccccgtagatttccagggcggctctggcgtatttaggagataccaccagatttaatttattgtttcccagatagccctccaccgcgttgcgccactcatctctctttacgtccagcagatcggccagcacatgcacatccacgctcttaccagttttctccagaaggcggcgctggatgtagctcctggcattttccaggtatttgggataggctttgctgccagaacgaagtttttccagttcatctcttgtctgcttttcctgctttttgagctctctgacaccggcagcagcttcctgatgctgtttttccgtatctgtacgcatggataccatgttttttttcagtcgttccaatgtctccaggtcaatggtgcggttttcaaattcctccatatcccaaagggtctggttggaggtgatgtcctcttcctcccagcgctttaaggcggttgcggtctgctgccacctggcttcgctttttcccagctgttccaacagttcattcaggctcttaagctggcttttcagctcctcataccctgtggaggcaatacggcgcagcagctcgtcgctctgccgggtcagctcgccaatctgttcgtccactgagcttctggcctgaacctgctttttcaggtcctctcctgccagctttgccctgtcagccagggtacggacctctgactgaagctgcagaatctccagtttctgcacaaagtaggaacatttttcgatctgctgttccttgtcagcataggttaggaatctgtcctcaatctgttttaaggattggatttccgcacatgtgtcctctattttctttctcatgcggccgtactgcataacactttcctgcatgtcctcgatatggatgtcctgctccatgcagatatattcttttacaaaatcctccagtttgatgttcattctgaatgggatggcccgcttgaagagaagggggaatttttcagagtccaggccccccaggtaggaatcgtagagtatgcggcggaatcgctcgttgtgggaggtcaggaaataatcctcccggctgtaattcgcctgaagatagtcttctatttccacgatggacatggtccgtttcccgcccctgtagccattgtcccacatgggtcctttgtgccagaagaaacggcgggatatctcattggtggctgtctccacatcaaagacaattcccacgcactggcactggcccgtatcgcttcgtttcagttccaacacaatggtagaggaaaaattctggttgcgcagataggaaaactcgttgttttcaccgatatttaccatacctcttaagtattcaatcaggctgcggtcagagtcatcggcagccgccttgttgaagaagcccctgccgtccgtattggcatagagcacaatctgcatggcgtctataaccgtggacttgccgctgcccgaatgtccggtaaaaaaattaatttcatcattaaaggacagggtccttttggttatatagtgccagttattcaaacatatcctggaaagggcgagaaaacgatcgtttgctattttctgttccatggttctccttcctcagatgccatttcatcctctgtcatttcatcctctgtcatttcatcctgcgtcatctcatcctccgccatttcgtcctccgccatttcgtcctccgccattccgtcctccgtcattccgtccgtggcgtccggttcttcctcctccaaatcagctttcaactggactccgctttcatccgaatcatcctcaaaggaggaaagaaggcagcgcacatcgtctcccatgagcaccacgttgatgcagggatatataatcatgcggctttcgctttttaagtcctccagcagatccaaaggttctataacctggtattttttcaggagggtcactgcccggcggatttccgtgggagcgggctgcttcttgaacagcctgtaattgcccagcttttcgtggatttcccgcagagatgtatagacattgacactggtggaaacgctttccatctgttcatcgtatatcagcttcagcaccagcagatacagggtggccaggcggggcagcttgtctcccaccacagtttcaccctggatgtacatgacgcccatctggctgttttcgcgcagctccactccgctgatggcaaaataattcttcataaattccaggtgtttgctgcatacccggtaatctctgttgtactggaatcttccggtgcgcttgtcatatttgtgttccagtataaaggtctggcgccacaggagacggatgatttccgtcacttccatctgctccgactgcatcagattgtcgtagtaaggaacgccgtttccggtgtatccggccgccggcgcgatgtctgtcatgctgttttccaattccatgttttccactatcttgccctcctgacaaataccagccgcggataggtatagcctttgcagtgcaccatttccgaatcttcctcttccaccttataaggactctttctcctggtggaatagtcataggccagtatcagtttttcaaagtcctggtccgaatgtatggtttgttcgtccaccaccatttttccctctgtcatgctgccttctataaaggcttcaatctccttctggctgtaacggttcctgaccttgttcaggttcagaacttcctccatggacagttcctcggattcttcctcatcctttaactgttctgtaaagtctgccttggtcttacgccgtttgtacagggatttttctgacaatatggtcatctgggacaggttcatcctggcgcttacagatgtcagctcctcttccgggcagccgtattccgaaagatggtttaaaagcctgattacaagccccttcatgttgtcctcctggtttaacaggtagttgaggcgtgtgacggttgccttgacataacgggagtgctccttgtccatgttggagatgcggtgttctatatcatcgaacccgcgctccagctggtccagcttctccacaatatcgtattctgtcaggggggactttttctggcctctggctgaagccgcgctttttgcgcacattttatttatccaggaactgtcctcccgcatggcggctatccaggatttaatatctgtcttgtagagataaaaattgtccgaggtctttaatatatgatattttttattgacgatttccgtcacgtatccttccaggtgctcctttaacagggtcccgtaatttttttgttccagcaggctgccaaagaacttatccatattgtgcagcatgtcctgaagggacttgttcagttttttcgtgtttatgagagccgtatttagcaggctgacgctggagcgggggtcgtttttcagagaaaatagaatggcatagacattctggatataaacctgggtctcatcctcatcatcgcctaataaacgtgaaaatgcctcaatcatcaccgcggcgtaatccggaatgacgatgttgaccgtcatgctggcgtaatcatccaccttgcggagccagccggtcctcaggagccagttaagaaccctggtggcaggcggttccagttcatcccagtcatcctcggtctcgtcctgccatatgacatattttttctgggagaaatattcacttaaaagctggatgcagacttccctgctgagaaagtaattgctgtactcatactcctcgttgattttaagaagtgcctctatgtaagtagaccggttgacagagcggaacaggctccagaaccggtctggtatttcattcatcagtatcatttacaaacctccgtatttccctatcattataacaggaaacaccggaagtgacaatcagaaatcattggccccgccatctcctgactcccggagccaggctttcagatatccgagaaggacaggctggatgtcaggataagtccagttggcgggcggttccctaaacagtgcggtgcgggctatctcatacccctccggtatggggcccagctctgtaatgtcgccgtaatagagcattccgtagcttatcccaggcgtatcaggggctccagcggtctcacggaccgaatatgcgcttaacggcgtcagggtgaagcccactgcaccggtctcttcgtataattccctgcgggccgtgtgttctatcttttcccctgcttccctgcggcctccgggacactcgtaggtatcccgatccctgtgctggcagaacagccatttcccctggtatctggacaggatgactgcaaacttcagcagggaatcatccactgtgttgtgaaattcgacgcttatcatgtggtatcctccttatcaggaatgtacggcgtgtgtgattgggattgttataatgcttaaacagccagtctcccggcaaaggttttcattcgttatcatggtccagtccaaggtaaagaagcagtcctatggaaaaaaacaggatatgggggataacggaaaaggacatgcgccaaatccacaggggggctcccgggaataacggaagggggacaaacagccacagcatacagagcatgtagagtgcagctgtcagccctcccactacaaggagttttttctcatgccggattcagctatccgtacagtgcctgccacattcagcacatgcatcaggctgacagcaaatcccacacttataagaggcatgacggatgtctgcagcaggatataaggcatggaattgtatgtcctggtttttagcacatccagatgccgtcctaacgctgtcagaatgaggtatgaggccagggtcaggatgccccagaacacggcctttttcaggtgacgctttctgacggcagacctggtctcctcatctgcaccggctggcatctgaccgtatatgactacaagaatatcggttccgaaggcacttgccagggtttccaacatatccagatccggctggctcctgcctgtttcccaattggatacggcctgccgggtgacgtgaatcttttgggccagctgttcctgggacatcccctgttcctttctcaattttacaatattctttcctactgtatttttcatagcggtacctccgggaaccattttataatagtctttgttctgaattcatattatctgctcttggttccggtgtcacgcaataatctgttgcacccttataatataaggctttttccatacccggttgaatactattttaaatgctcctcgtatgacagcatccgttcctcgtagccgtccagtttccagtccagccttgccaggacttggttcagttcattgattcgggccgcaatctgttcccgctgttccagaaggagattctttctggcctggatggtggaagctccctgatggaacaatgtcacatattccagcaatgtctccacggaaacccctgcgctgcgcatgcacttgatatactccacccaatggcagtcatcctcggaataattgcggatgccgccggacgtgcggcccacatggggaagaaggccgatccgttcatagtagcgcagtgtatcggccgatatgtcatattgtctgctgacttctgcaatagtcaaaccttcatcaactcctttaccctgtaatcttgtatgaatcaatttttgtatgaatcaatacatctgagctcatatctgcggctgccaaggccaagagaatgggctgcctccaccgtgtgtatcccgttccgggattctatgcgctctataagggcagcctttccgtcatcctcagaagcgtatactgcatccacacacgcctggtccagggccacaggatctgcggatgcgaaaataccgatgtcccccatctccgggtcatggggatgggcgtcgcagtcgcagtccacggacagacggttggccacattgatgtacactatattttcacggcccatgtagtccatgacggagcgatccgcgtccgccatggattccaggaatgaatcgtggtccgctgtaaatacatcctcaaaccgggtgctggtgccggaagagtgaatccatattttgccgtaagaggatgcaagcccaatggacatgttctttaaagccccgccaaagcctcccatggcatggcctttgaaatgagaaagcatgagcatggaatcatagttttgaagatgggatcccacataattttccgtcagatgatgaccgcctgttaccggaaggggcatatggccctcctcgtccaggatatcacagggagcaatggctgtgaacccatggtcccgcatggtctcccagtgagctttggaagtgttccttcttccctcataggcagtattgcactccacaatggtgcccttaagttcctgtacaaggttcctgataagctccggctgcaggaaattgcggccgcccggctcccctgtggagatctttaccgctgcgctgccgggtagtgagacacccaatgcgcggtaaatccggaccaggctttccggcgtgatttcccttgtcatgtaaacaatagacatattgattgtcctccttgaaatgttgttgttaagctgtaatgagagtctacaacttaaagtcaactccaagtcaagagaaaatgaggaaaattgacctaaaatgtaatattaacttcttgtttcaccaactaaattcgtgattgacgatttcagtcttacacagaatgtgatatgattctcttggtaagtggattcctccattaggaggattattatgcctaagaaaaaagaatatgatcacaagcacctttcaaccagccagcgcattcacatcgaaaaaggattaaatgacggtttgtcctttgctgctattgcaagaaaactagataagcatcccagcaccattgcaaaggaagttaaaaaataccggacgcttcagcctcgcgagaaagacccgaagaagccggccaggtgtgccctcttcaaagagtgcaccctgcgtttcctttgcgataaaaaagactgtgtaaagatgtgtaagagctgctatgatgtaaagctgcaggtttcaaaatgcagctatctgtgttctgaataccgggagcctcaatgtgcctctatatctaaagcaccttttgtgtgcaatcactgcgcaaggcagcggacctgcaataaggaaaaagcctactacattgcccagaatgcagatcaatcctctcaggagctgcttgtatcatgcaggcaggggattaaccaggctcctgccgatattgcaatgcttgatacgcttatctcaccattgcttgcccagggacagtcactggcgcacatttatgcctttcacggacacgagattccttgttccagaaagacgctctacaattatatcgatcagggtgtttttactgctaaaaacatcgatttacgccgcaaggtacgttacaaatgcaagccaagaaaaactggtacaagggtcagcctggctgcaaaagaattccgtataggacgaacctacgagaattttcaaaaattcattcaggaaaatcctgatattccagttgtcgaacttgataccgtagaaggcggccgggataacagcacgcaggctttccttaccatctttttcaggaactgttccctgtaatcttgactgataatggtgtggaatttcaatttccagaacgattggagtgtgataaaaatggtgaaattcgcaccaaaatcttttactgcaatccgaactcttcctggcaaaaaggacgtatcgagaaaaatcatgaatacatccgatatgtgattcccaaaagccagagtctggatcactataagcagagagatgcctgcgtacttatgaatcatatcaacagtgaagccagagacagcctgaacggctgcactccattcaggctgtctaagatgcttttaaataacaggttacacagacttttatgtctccaggaaatacctggcgaccaagtccacttaaaaccatcgttacttaaaaaatagaattagaatcaagacggaatccactgccgaatttaatcctacaaaaatttggcatgtggaatttagtcttgcacacttacccagatgcctgtttgccatgcttgcacacatgaaaacaggcccctgtaaggtcattgtaactctatttttgtcactcgtaaaccgaaatgaagcgaattaggtgctgcaaaatcaatgttttgtagaaatcacgaattcactctgtaattttaccatgaggaaaattgacaaaattaagcgtaaaatgctgttatatatccaaaatattctcaaatgccgtgaagagcaatcgaatccaacaatcatcccccgcccttttcaatgtccctgatatggaatctcaccacatctgctccgctggaatccgaatcgcgtatgacatcaatggctgcttccagacggacatcctgctccaggtattgaggggttgtcattccttctattataaaaccaggagtaaatgccattgtcacgggctgattcggattaaaggccacaaaatccatataaatgacatcccggatgcggctgctgtccaggtcctctaagggtaaggatacgattttttccgactcatcgtagaatgtgaccatgtttttctccttgtcgagtttataggacaggcgccggtccagctgtttttcatagtcctcttcccggaattcatatggttccagatgtcctgtgtcatatcgcagaaaggcataaaactgctctctggacagggaagtgccagtcatggtatgaaaggaggctttcaatatgccgttctcctggtcccatcccattttaggaagaatcaaccggggagaagtatagggaatggagggaaatgaattcatgttgccctcccagtccgtgatgtaaataccgtcgtaatgtcctgccggccctgcatagccgtagagacggaatttgttctgggaaagggctgataaaaatactattccctgcgcatcaggcgcctttccaagttcttctaaggatacaggctgaatctccttctgcgcaaaggcttcctctgttttccagaatccttcctccgccctgcctgtcactgcggctgtatccctgtcctctgttttaccggttttatcctgtccctgtccagacaaggtgccggaaacttcatggggtttacctgatgcttccgtctcccctcctgttgtttccgatgatttcccgctgccggttaccaccctgatgccatagatacggttatcataatcactcatatggacgaaaccgtcaatgggatccatggctgtgatatcgagagtatccttttccgtacccgtaagcataatccagtgcacggccccgcttttacgctttacctttacaatgggatacattttttcatccagcaggcggttgatgctctcgctggtggtaccgcagtccaggcggactctggcatagggcaatgcctgttccagttccttccacacaatggctccgcggtcattataaaccttattttcattgaaaatctgattcagttcccccggcgaaaaactgtgcactccctgagcggtcagggatgcagcgatgcagctggtcagacatccggaacttcccatggtgtcctttgaactgcccagaggattgctgctccagcgcgtatcatgctgggaatacgaggtatagattttattatccacagcagcttcgtggtaatccatcccggctataacgctgccggtctccctgtgccttgtcatgaatacagccaggacggcagctaaaaccagaatgccggccagggctgacacaatcatgtatctgccctttcccggcttatgaggtttgttgctgtttggttctgtatcctgtctgtcctcctggttttgtccgtttttttcttctgttgttggttccatataaaatgtttgctcctccttacctgcccctttatctgtttccaaaccgggataatcccgccaacggcctttgtcaaaagtatagcaggagaagcaagaaaagtctttgggcactccttacgatttattacgattcccgtaccagttttcccactgttcacggctcccgcaatacacattcatatcaatgaatgtctcctctccctcatatcccccaagacgctggcggttggtatactgccacagcagccatggttccccctcggtgcggggctttgtttttacgttgcgaatccagagcggataccggtcaaaccttccgcggatgtacaggttccaggattcctccgtggcatagattacagggactatcccatactgtgcttccagtccttccagcaaggccccaagctcctgctccacgtccgccggatttggaggattggcagccttgtcaccgtaaaactccacatcaactgccggcggaagcatcccttccctgtcaggcagacattggatgaaatgcgccagctggtccttcccgctgctgtcaaaactgaaaaaatggtatgctcccacagccaggccggacagggccgactcagaccaattctgaaaaaatttctcatccacatgggagctgccctctgtggctttgatgtaagcaaaatcaatatcctgctgtcccagcacattccagtcaatttcgccctggtaatg

SEQ ID NO: 3225 - DNA, 74879 bp, Unknown
  gut microbiota DNA sequence
ccggcagcaaaaaccgtcatgacaacgagagcggccagtatgcggagccatttgtatctgtgtttcatgtgaagtcctgctttcctgaacccgaatccgtattgctgaagctgtttcagtaagatatcagagggttcatcttttatcattatgcattacctgtcctggcttttcaagtaaaatgaacatagaaattgaacggttttccaaaaaatccgctgccggcatcttcggatgggttctgtttaaaacacaataaaaggatgcatgttctctttacagagtttgcatccttttattgcagataaacaatgcggcggtcacaccctctacgcagtcacacccttgcccggagctgccttatctgcctctgtatccttatccaaaagcttgcggatgccctcaaaggcaacaatcacgcccagaatcagaagaagaactgcgaacaccagctgaagcgcgttgccgaatacaaactggcttgacagggccgatataaggtccttgattttaaggctcagggccgtaaaggtgacgccaagcatgataaccatgggcccccagagcatgacgccctgtctgtgtgtttttttcaggaatacggcgcaggcaatcagggccagcgcggaaagcagctggttggcagagccgaacagaggccagatgctcgcgtaacctgccctggataatgcgtagcagagagccagggtcagtatggtggagaaatatttgttagtcagcaccttgttcagggaactctgctttgatgggtcaatatcgtcgttggtaaaaaattcctggaaagcaatacgtcccacgcgcgccacggaatccaggctggtcagggcaaaggctgaaatggacagcgtgatcagtgtatagctgatggaatcaggcattcccaatgtggtaagaaacatggcaatggccttggcaaatacctgtggaggtgttccggttggaaggccttcactggtagccagcgcaccgacagcaatcagcgcggtaatggccaaaagactttctaacagcatggcgccaaaggataccggcagcatgttcttttcatttttaatctgcttgctggctgttccggaggataccagcgcatggaagccggatacggcaccgcaggcaattgtaacgaacagggttggaaacaaataggaaatatttccctttgcatctgtaaacacaaatgatgtaaaggagggaaggttgatggccggattataaacacatattcccagaaccgcaccgataatcatggccagcagcaggtagctgttcagataatccctgggctgaagcagagcccatacaggagtcacgcaggcaacaatcacatacaggaatacgaaaatgagccatgcgctctggggcacatagacgggaaatgccagtccaagggcgacagccagcacaagaagtccgatggcaaccagggtatttatcagcttgctgcattttccatacttcaggaagcatcccagtaccactgcaaatgcaatgaataaaagagatgtggtggcaacggctccgttagcagcgattctctcgcctgtggctgcatcaaaaccattgaatgtgcctgccacaatgtcagcaaaggccgccactaccaggatggagaacagccaggtgaataaaaggaacagccttttgccgagcttgccgatataaacctcgattatgtagccaatggaacgtcccttgttcttgacggaagcatacatggcggcaaagtcctgaaccgcgccgaagaatacgcctcccagaagaatccacagcataacgggcagccagccaaacatagcggcctggatggggccgttgatggggcctgctcctgcaatggaggcaaactggtggccgaataccacgttggtatcagccggcacatagtccacaccgtcctccatctcataggccggggtctttgcatcggggtcaacgccccatttctttgccagatatctgccgtaaatcagataggcaccgcctaataccactacggctaaaagcatcataactaaaccattcatcatcaagtctcctcacgtatataaagtaggtttcaaagagtttgtccgggaaatgcctctgcatcctgcttaagccccctgcactgaaaagaacaataaccggccctgtaaaaagaaaaggtccctgcaccttgcgatgcagagacgaatcaatccgcgttaccactctgtttgccgccccgtaaaaggacagccccttaagttcctgctgctctcagtcagccggaatctttgttaacggaaagaaacccgtccatccctactggcctttctctcgggaaaggggttcagaacagaagctgttgggtgaggccatgattcctctcgcgcgcccttccaccagccgggctgctctctgtgccggaatctgaaaccatgacatgtcccagtcattgcttttctcaagtatcaaactcttgatgtcaagaagtttaccactttaacacagagaaatcaatgatattttaacactttttttatactttatttatatatttttcataactacaggttatacggatgcagaaccatccgcttcgcgggatatggcgtcatctgcaatggcctgcaccagcccctgtatatggtatgttccggcagtgatatctgcctttattccatgtttttttaactcccctgccgttatgtctccgatgcataccagcctggtctgtcctgtcctttgtccgggatttatattcaggccgcttgaaagataagcccttacaccggacgcgctggcaaaggtgatatagtcaaatccctcttccgcctgcctctgttcactcacctgcctgccctccacctggtaaagaacaatgtcatcgtaaacaagtccggctttttccagtatactggtcagtacaggtgatccgcctttggagcgggcaatgaggatgcggtcgctgtctgtaaggatggatgacagtccccgggccagtgcctcggcacagaaggaatccggcatatagtctgcatggaaaccgaagtttgccagttccctgcctgtgccgtcgccgataacggcaaattttatatgacccagcaagcggtaatccatgccggagtgctgcatttcctggaagaacaggcgcacaccattggcgctggtgaatatcagccaggtgtatgcagccaggtttcggtaggcttcctgcatggcagggcattttgtatgggatatcactttcatctccaggattggtgagacaaccgctccctcctgtttaagggcatgtccaagactgtctgtaaaatgccgtgtgccaaccataccgattctgtatccggccaggggaccaaaagaacggcatttcaaatcgcatttcatatcaaaggaggctgtttcgcccacaacaataatggccggagtgccgatccccgcctccattaccttggcgtgaatcccggaaagcggcgcccggactgccctctggtccggcagggtgccattttcaatgacagccgcaggtgtgtccggagccattcctccctcaatcagcctggctgtaatggccggaagctgtcccagtcccattaagaataccagggtgcccggcagggaaccgtatgtttcaaactcaggagggagacaatcctctccgtcccgggtgtggcctgtaattacatggaagcttctgcttaccccgcggtgggttacgggaattccggcgcattccgggaccgctatggcggatgttacgccaggaacggtttcgtagggaatcccgtgggcctccagtgcctggatttcctcgccgccccgcccgaacacaaagggatcccctccctttagccggaccaccgtaagccctgaaagggccagttccaccagaacggcgtttatctcatcctgtttcatggagtgatgtccggcctgtttgcccacatagattttacggcaggcggagggcacccattccaggaattgtctggatgccagatgatcatagacaagggcgccgcaggagctaagaagcgcctggcctttcagggtcatcagggccgggtcccccggacctgcgcccaccaaatataccattcccttattctccatatcacatcaatcctttccatgcttctgacgccagtttttctatatccctccgggatgtaccgccggtcaggtgaatccgctttacctctcccctgaggctgctgatgccccatacctctaactgcccgttttgaaggacagagtagatgccgatgggctcatgacatcccgcatccagctgtttaaggacgcttctctccagatccaggcacagccgtccctgggcatggtccatggcctgggcgagactgtgggccgcggttcctgcttttgcctccaccgccatcagtccctggcctcctgccggtatgaattcttccggagccagaaacgtatattcgtaggtatcctgttccagcagtcccagcctttttaatccggcagccgccaggatgataccgtcaaagttctcctcttccagtttcctgagccgggtgtgaacatttcccctgagagtgctgcattctgccccggcagcctccggccacagtgttttgcacatcaaccgggcctgaagctgccgccttggactggaggtgccgatacggaccacgctctccggccggatcctatggcctctcatggtgaccagcacatcccttgggtcttcccgcccggataccgctgcaatggtcagtccttgggccagctccatgggaaggtccttggcgctgtggaccgcaaggtctatgacgccttcctgtatggcctgctcaaactcagatacaaagacacccttgcccccgaattcctgtaagggcttgtccagtatccggtcccccagggtatcctttgttacgatttccacctgtatgccaggacagacctgccttaattcatcagctacaagctgtgtctgaatcagcgccagtgcgctttttcttgttccaatgcggatgatatcattcatgttcctgttccagctttctgtttattataatttgcgcctgttcccgtgtgagacagccgttatggctgagtccttcctccgccagctcgtaaaacaagtctgaacggacccggggcgagtcagggaacaggtctttgaccgtctctctgtaagctcccagccgggttgtcagctctcccaggctgtccggcattacggaccggattctggccttcaggtacctggctatgacagggctcatgccgccggtggaaattcccaccaccacaggtccgtcccgtacaatggacgggaagataaaggagcattcctcctttacatccaccacatttacaggaatcctttttgacctgcacagtacggatattctgctgttaaggccgggctcagacgtggccgcaatgacaaagtcggctctatccaggtccctgtcctcgaactctcttctggtcagcttgagagtgtccgtgtatgcgatgtcttgcgccatctcatccaggccaggggacatgtccggggatactacctcgatgaccgctccatagggaagcagatcatgcacctttctcagggccacgcttccaccgcccgcaatcagccatctcattccctcaatatctgcaaaaaacggaaaatatgccatgaagttcgctcctcccattctatccccggacagagccgtccgggcgaacgtaccgaaaaagacgcagacagccattcacaaaacctcctgtctgcgtctctttcctgctgtttttttctgccacatgaggagaatcagcgcatgtcgtgctgctttcttcgttcatctaacagacgttcaaaatcctcttccgtataacctatgtccgccagacgctgtctgcgcttttccctgaggatacgctggcgttcccgctccgctgcctgccgtcttttaaaccagaatactccgccgccggcaatcagcgccaagaccaggacagccccgccgcctatgagaactgcccttggaagcttaaggccggtttttccgtcctgtccgtccttttcgggctggctttcctggggcgtatcctcaccaggctcggagggagttgcgttaacagcctggaccctggagctgtaaatccatgcatctccaactctccgctcattataggtgtagaccagcctggccacggcctcctggggatggtcctcaggcaaatccgtctccagcgccttgtccgcatctgtaaactgtgcgtcattaggtatggtgataaccgccccgctttcaatggatagttccgatggatcatatgtctccccggcaatggttacaggcgtgtctcctgtgacatattcgatttcattgtcggctatgttcacattcttgaattttgcaaagcagaaatccagaatggtctttgtatctgaataatgggttttctgggtactcttaagggtaactgctatctggcctctgccctcccgtctggcataggtgacaagggtctgtcctgcctgggatgtccagccggtcttacctgcaatggcatcgggataatagttggaatcatccgacagcagcattttatgctcaatggaaaaagtccgcccattggggttgttggcagtggctggtatagtagaagtcctggctgaggcaatctccagcacagtggggttctggaagcaggccctggctatgatggccatgtcgtaggccgtggtgcgctgggtgtcgtcgttcaaaccggatggattggcaaaatggctttcattacagccaagctccgcaatccgctggttcatcatatccacaaaagcctgtctgcttcccgccacatactctgccagagcattggccgactggttggacgactggaggagcatggcgtagagacactggcggacgcttaatacatccccttcctccaggttgaacttgttgccggccccggattccacattgtatatggcgtcatgggaaaatgtgaccggcgcgtccaggtcattggtattttcaatgaccacaagggctgtcagcagcttggtgatgctggccggaatcttctgctcatgtatgttctgggcaaacagcacggccccggaatccatatccatgacaatgccggcctctgactgaatccctgtgtctatgggccagtccggttttgcgaaggcggtgatggtggccattgaaaagaccatgattagacttgtgattatgtaggatatacgacgcataattacctcttcttttttatcaaaataaaacagcctacccatgattatattttaataaagggccgctgtcaatgaattaaaattactaattgtatctcgttgagaaacgaatcagccatgcagtgggaattgcggtatactttaaatggcatatcctggaagcagtgccattattttatacatcactggaggtaaaaaagagcatccttctgaatccctgtatcatcaccgtatacctgggcattgtccgctggatgtccggatttccggttccggatttatagacacagccattgccaatacaggagacgtcacggtacgcctcataacattggcaacggcggccttctggctgccaaagacggggccatgaggattatgcgctgtattgtcaccaccgccatcatgtccctggcagccattccggttctgatgctgtctttatagggatacatacgttgttacaatatatccccggaagattttgcaggctcagaagattcagaattcccgtcttccgctgcctcccccggaatatattcaatatggtatttattctttccgtttgcctttgcttgatacaaagcgtggtcagccatcccaaacatctcctcataggatatattgccggtcctgcccactgcaatgcccatgctgcaggtggcattgaaatcagggttatccattaaagccctatagacacggtccgcaaaccgtgtcagctggtccgcatctttaatcccgcccatgaacagcatgaactcgtccccgccaatgcggccggccacatcatcctggcgcacacatctgtgtatggtatcaccaaaggccctgagtaccacatcaccggcctgatgccccctctcgtcattgatgtgtttaaagtcatccaggtccaggataaacagggcacatatgtccccttgtgcatgttccagacaggctcggcacagctcctccgtggtgcttttgtttttcaatccggtcagggcatcagtctgtgccttgcgcctaagcagggtctgcatggcaatagcagccttcagctcctcattcttcttctggagaatcagattctgcagtttctgatggcgggcatcgtaacgcatgaacaggattcccactcccagcagtgaaaccgctataaccccaaaggcaaaatataagggataagtctgtatgaagtagctgaagtccttgttttccttgcctgaaagcagggttgcatacacagcctcatccatagccccctctcccgcctttgcaatggatttggagaggacctgggccagcaggggattggcactttccgagactcctatgtaaacaggtgaaacagccgtactgccgtccaccaccacaagattcatgcccagaagattccggtccgccgacagcttgatggaggataccatggcacagtcggcatttccgttttccaccgctgtgagacagtctttaggggtatcataggtaacaatttcccatttgggatacttgtcttccaatacctcctgcaggccgtccactttttctaccattgcaatccgctggtaggaggaaagattcagaggctcatcctttttacctaccaggctaaaactgcagttatagtaggggatggtatatttaagactgccggacattccgcttcttttctgcttaaatacacttaaacgaatctgggcattttctcggaacaatttatctgctgaagcctcttccggttccagtggaatgaactcaaaattcaatccgctcaccttggaaaggtgcctcatatagtccacgtaagcgcccttgcatgttttttccttctcgtcataccattcaaaaggatagtcggaccgggctaccagcactgataccggcccggtctgtttcacaaactggctctcctcccgggtaaactctgcaaactgccggtccatctcatggtaatatttttcataaagtcctgccgagtaatagggattatctatgaaaatctgcttcaatgccttgttcagccgcaccatcagcccgggcttatccaccgacgtgatgaagtaagccggcatatagtcaatcttggccagaagcttctggttcatgttatattccatattgccgttgataatggcatccacatcctcacgctccagggcctccagtatctgggtgccggtatcatagtatacggcttcataggaaaatccatgattctctgcatattcgtcaaataaatcatttaggaagttacccttaatcatgcctacccgtattccctggaacccgtggtaatcatcataatacagacgttcgtccgacttgcgcccaaccagggcggcaaaatcaaaacagcactcgtagctgctgaaaaggaaatcctctgcccgctcctcgctgtattcagcagggagcagtaaatccagttcccctctgcgcagcatatccaggcactccccccagggcgcctggatatactcatattcccatcccgtatattctgctattttattcagataatccgccccatatcctattgcatagccgtcctggtctatctggatgaaatccccgatatccacacagcctacccgcaccttctccgctgcctgcacaggcaaggctaaaaaaaggcacagaaggaatgatgacacaatcaggaaaatcctgtatttagccgccgccaacttcttcatcccatcacccacaggttataatttgtttgttctaacaatatattgattataacatgcaactatggaggattccagtagttcggcttaaattaagcattgatttctttcaacttccggaatatgtcttccagcctgacatatgcgtcacggtatacttccataacctttatagcgcaaaaaaaggcagaaggccgaaaggcctgtctgccggttaaggaagtacataatggattaatagatcaggatcaggttattacaacagtttaaaaaagcacaaatcagtccagacgcgccttcaaaagctccagccctgccagtatcacaccgcccagtaagaaaaacagaatgctgaaggtggacggactcatgggcgccctgggcacatccagggtggttggccccatggtgatggcatagagggaacccgtcatcaggccgatgatggtgtaaatggtctgggaacggtaccgctccaggcacatcttgatgattttaatgattcccacaatccctgtgacgacgcccagaccaaataccatcaggatggggaaatagtccatattcatgtgcaggaattccttcacagcacctatgatgggcacatagagcccgaatatgagaagaagtgtggaacctgagatgcccggcagcaccatggccgtaatggcaatcatggctgtgaagaatacatacaccaccagccccagtgacagatgctccaccgatacactgatcccctcgccgccggagggattaaaataggtgatgcaaaataccagcagaactcctataagggtgaatacaatatttccgtacctgtctttaagaacttctttttcctcacggatcaccatgggaatggcgaataaagtcagtccaagaaacagggagctgatccggtagatgtgaacctcaaaaaggctggacagaatcagaaccgacatgcagaagccgatgacccatcccactcccagctttaccagaaacaaaaaggcagccttccttctgccgttgtcccggcccataaggtcgttcagggattcaataaatgtatcataaaaacccagtaaaaaagcaatggttcctccggatacccccggaacgctgtccgccagagccatgcagaaacctcttattccatttaaaagcacgtatctttcctcctgtcattttactgccttccggccgcaccggatgtcagcatgtttttctctgaatcattatacaggaattgacagaaaattcaagcacggtttttcattgacgtttctgtgatcttatattttcttccttccctttaatttgttcctgtggtatcatagtaataatttaaattgtgaaaggaagggaaatcccatgtatgaattgattcaggccggtcccagaagtttctatattaacagtccggtcaaaataggtgtgtatctcattgatgatgagaaagtctgtctgattgacagcggcaatgataaggatgccggacgcaaggtgcgccagattctggaacgggaggaatggtcgctccacgccatcatcaacacccattccaatgcggaccacatcggcggcaataaatatctgatgcagcagaccggatgcaggatttatgccagcagcatggaagctgcgtttaccagacatcccatactggaaccggcctttctctacggcggctatccgtttaaagacctgcgccataagttcctgatggcacaggaaagcgatgtcagcgatgtgtcccggctgtcagaggaccagctgctaaaagacctggaactgattccccttcccggccattttttccagatgataggcattcgcaccccggatgacaccgtgttcctggccgactgtctcagcagccgcgccaccctggaaaaatacagggtctcctttatctacgatgtggcagcctatctggaaaccttggataaggtggcatccatgaaggcaaacctgtttgtaccggcccacgcggaagtctcttacaacgtggcagccctggcttcctataacagggactgcgtcatggagataaaggaactgcttctggagctgtgccgcgtccccaggacctttgaaacacttcttaaggaagtctttgaccactatgggctggtcatgaccttccagcagcatgtgctggtgggaagtacgatacgttcctacctgtcctggcttaaggatatgggtgaaatggaggcttacatagaagaaaactgcctgtattggagaagctgacaggcagccccggtttcacaggtactcctagtatcacaggcaggctctatataaggtccatgaagctcagctgctctcccgctcccttgtcctcgaatttctgaagataggcaaagagcttattgatatcagtttccatctgccgttctctgcaaaggcgcttaaaaaacgccataagctcttttttgcgggggcttcccacctcataggcatttccgtacatatccatgtactgttttttcaggcccggataatgttcatccagcctgctgtaaaaatattgtctgtctccatcccgtaaggtcactccaatgtcaaaggccaggatgccgtggaccctggccctctccccgtactcgatgataccctgaatgttttcctcggtgtcgttgatgaagggaaggatgggacacatccagataatggcgggaatcccctcatcccgcatgatctccagcacctgggccctgcggctggtggtgcatacatggggttcaattatcctgcactggtcttcatcgcaggtggtcagggtcatctggaccacgcaccttgtcttttggttgattcgcttaagcaggtccagatcccgcagaatcaggtctgatttcgtcaatatagagactccgaacccataatgttcaatgatttccagacatttcctggtaagccccaggctgcgttccgccggcatatatgggtcgcacatggcccctgtgccaatcatacaccgctttctcctgcgtcttaaggcctgctccagcagctccgggccgtttatctttacctcaatgtcctcaaatgcatggtccatgccgtagcaggtgcttctggaatcacagtaaatgcatccgtggctgcacccccggtagagattcatcccattcctggccgacaatatggatttggcttttacttcatgcatttttgcattcctctccctgatgtcaccacactgtgaccagtccgatttgttcctgtatcagttcctttgcacggttgaaacgctccagatatgtgccttcaatacagtggtactccaccctgtaccggtctaacagttctttaatccgaaggctgcatccctccctgtcctgccgtatcttttcattgcgtgtcccgtcctggataaattccacatccggttccagaaacagcacaagatcccagcggtctgtctcatgaatggcttcagccagcttcgtacacaccgttaactccttttgcttatctcctaaaagaaaatgactgtaaaacaaggtggttacagcgtctgtgtccacaaacaggattcggttgctgtgtttggcagcctccatcacattgattttctggcgcagcaggttttcgtacagatcctccgctatcatcagatcttccccgcccgcataatcgcaggtatccctgccggcctcactgacatagttggtattataggccagggccagattccggaccagggtgctctttcccgtgctctcgctccccagaaccagcacacgccgggcatagtaatcccggcacacagagggaatgtaatcccagtgtcccagcgcccaggcgcggatgtccgtggagcacaccggcacctcgctccggtcaaagtaaatcacctggctctcaggtccgtacagagcctcgaaccggcctgttcccagataatctgtcccgcagaacacagcgtcaataggctttcctatgactgcctttatatccctggctccctgttcccagtaccccggtgtatcatattcctccttggtaagggcctggtcctccaccatccgtatcattacattgggaagatgtctggtactgtttaaaatccaccggtagcgcatctcctttgaggtggactcccgtccccggcaccagctgataaccacatagagctccctgcacatggcggctgcccggatgatatcgtggatatgtcctgtgtgcagggggtcaaaggatcccccgaacattcccgtcttatacttcattgacatgttccccgctttccctgaaccattttacaaacataaacatggcgtttaacagatagatgcaccacatcagtaaggtggcgatatcggtcccgcccttctgataatccgcaaaccacatgaatacagtcaccacatccaccacaatccatactatccactgctccataaggcgcctgacgctgagaagcatggccagcacagacaggcaggtgctcatgctgtcgataaaggggaggtttccgcctaatcgtttcaataccagcccgtagccgcagatggagacagcggacaaaaccagaagtagtatctgtcttgaaacggtaagcctggttttctccacttcctttgtcttaccgtccatgtgttttttccacatgaaccatcccacaaactgcatagggacatagtagcaggcattcagcatgacttctccgtaatatctggccccaaatgcaatccaggcatagagaactgtattcaccagtccgaacagatagcagctcatcttgccctttccggtcagtatgacgcagatcacaccggtgagggccatggtaatgcccagaacgtcgtcaccccagtgtatggacagggccgtgatgatggtgcaggcagctgccagccatataatctcccaggccttccagcctgacaactcatgtttcagaaatcttcccatccccgttccccttcttgtatgtttttagcggccgcagccctttacaggccacgcatcctatatagatcagtcccatatatcccacaaagggataaaatacattgattaagcggctgaatggaagcattcccagcaggaacgcaaatacagtcaccgccgctgcggccatcctgtttctgccgggcgcagagaatgagaaacggctgcagaccgtccacatcatggtggagcaggaggaaaacatacccaggacaaggacaacggaaaaaacagcgcccagcacattggaaatatgtctggccagatacagagtgggaaccgccagggacgcggcatcctttgagtgaagcaggatggcggtattcatgatggcaatggccagtatcatagttaaggcgccccatacagccccccatttggcttccttcctgctgcgggccgtcatccccagagccgtaaaataggtgctgccgctgagaaagttcagggatatgtaaaggacagagctgataagccagttaggcgctgaccgtgacgcccccagcacagtctcatactggcggatatgggagagatttgcggcgccgcggattacggttgctaaccccaccataagggtgaacgcgattatgacaggaccgatggtggatacaatacgtaccattttttcaaatccggtcagatacgcacacaggaccatgaccgccattatcatggaacccagatatctgtttattccgtaatactctgaaatcgtggcccctgctcctgaaatcagtacagccataatcatgagcagcgtgactggaatcagccatgaataaaaccttcccacattttttccgcagaaaaaagtgaagtgattaaaattcacctcttccctgtgggcatatcctgtggtaagcaatacctggcccaaaaataaaaagccaaggagattcagcagcaccacaccataactgtagtatccgtaactggtaaagaactgaagtatctcctgacctgtagcaaagcctgaaccgataatccaggcaataaaagctcctgcaaacgtaaccacatttcggatgctgcacctgctgccctttcccttcattcctgttccccctgtatccgcacctgattttgttatattatagcagaaggcacataaaaaatatagcattgaataccataattcatattcaatgccatatttatctactatttcatctcagattataatttctgttcttttactctccctggagcgcgtcatacccctgctctccggtacggaccttcactacattttccacttcgtacacaaaaatcttcccgtctccgatattgcctgtgtaaagagctttcctggctgtctctaatacatcctccaccggtatcttactcaccaccacttccagcttcatcttcggaagaagggctgcttcctccacctttatgccgcggtagtaatttacatggcctttttgcgttccgcagcccatgacctgcgtgatggtcataccggtaactcccagctccgtcagcgcatccttaagggcggtgaacctggactggttgaataccaccaccaccttggacagcttgacactagcggataccggctttgccgaagggtaatgctccaccggaactgccttttcaacagggacacctgtatctgctgctccttcctttgcttttcccataaataccattggcatgaaatccgcataggagctggccagattgtgttccgttacatccagtccctttgtctcctcctcttcgctggccctgagaccaatggtatgcttcagcacacgaaaggtgataatcatggtcacgcttacccaaaggataacggaaacaacacctaaaagctgtattcccaggaaggagaaaccgcctccgtatgcaaggcctccatccaccgcaaagacgccggtgagaagggtgcctgcggccccgcacatgccatggaccccgatggcacctaccggatcgtctatcttacacaccttatcaatgaattcaatgccgaataccaccacaaaggctgctatgagtccgataaaaaacgcgcccgccggactgaccatatcacagccggctgtgattgccaccagaccggccagggaaccgttcaatgtcatggagatgtccggctttctatagcgcagccaggtgataatcatggtggctacggtggctgtggcagccgccaggttggtggttacaaagatattgccggcagaatatacggccgcgtcactgtccatggctacggtggagcatccgttaaaaccgaaccagcagaaccacaggatgaacacgccaagggcgccaagggtaaggctgtggcccagaatcgcgtttggctttccgtcctcagtgtactttcccatacgcggtcccagtaccctggctccaatcagggccgcagccccgccgcacatatggacggctgtggagcccgcgaaatcgtgaaatcccatccgggccagccaaccgccgccccaaatccagtgtcccgacacaggataaaccactgcgctgatgacagcgctgtagatacagtaagaaataaatttggtgcgctccgccatggcacctgatacgatggttgctgccgtggcacagaacacagtctggaaaatcagataggcgggaaggggaacgccggccggaaggattccggaataatctccccgcaccagcggatcaaatcctccaataaaagcccccgctcctccgaacatgatgccgaagcctgtaagccagaacaaaggggtaccaatggcaaaatccatcaggttcttcatgataatgttgcctgcgttcttcgctcttgtaaagccggtttccaccatggcaaagcctgcctgcatgaagaaaaccagggccgcgcctaacaggacccaaattgtgtttaccgctgaaaattccatcatacattcctccttgaggttttattttggttgggaatgcgcattcatgggggaatacgcaaaaagaggtgcattgcccgcccggtacctggctgcggcaatacacctctttgtgtatctgttatctgcgcagaaaatagagaaagcgccggatgtctaagcaccggcgcttttctttatgtggcttattatagtttacactttacgaaaagtcaatgactaatcagatttatttttaaccccggctcacagccttccatctggctttctggccttcaaactgctcgttcagccagtccactccctttgcaatgccgtccgcgtcaaaggacaggatttgctgttccttttcttcttccggagtagcatcatagccatagggctcaggccaaatggtaacacccaggcgggggccgtcctcaccttccaaatccagcttctccatacgaaaacgcatgccgttgtggcttcctgtaaacttctcctttttcaggaaattaaccggcataaaatcccttaactccagcatatgctatcctcttttaaactacttttcatactggctcagctccaccaggttcatggtcagatccgtgatggtttcatcgtccacctgggctgccgtatagagtgtgtacttggtgcttccccactcccatgaagccaggcggccgccgctgtccgtggtcttaatcaggacctccaggctggtttcaccgtaatcatagttctgtgcaatagcctcatccttaaatcgctcgaaaattcccgcaaagtcctctgccgtatccgaggccctgtaggtgtatgccacaccgtccaaagtgaactgggcatccgctacctcctggttgataatgaaaaagctggtatcctcagccccctccggcagcaccatatggacgccaatggcctcaaaggccaggacatcctctacctccaccatgggattgggcagttcctggttcccggcttccggctctgttgctgtttctgccggagcggatgtctctgcctcagacgtcttagcaggctcctttttgctcccgcatcctgcggccagcagggccgtaagcgctattgccagcagaataccctttctgcccataaaccttttgattcgattcatgtaattcctccttccatccgtccatgcacaggtcactgccctttctgcatgggagccaccgtctcacaatattcctgcagcgccttgtgaagctgcccctgtgaagtctcgtcgcacagcaccactatcttgtcacctgccctgagcacggtatctcctctgggcacaaactcggcctccccgcgcataagggataccaccagagaggtccttggccaggcaatggctgaaaccttctttccctcagctgcgcttccgtggtaaatcataccttccaccagcaccttttcccctgtgagcgtgacctttttgtccgggttctgctttgccagaaggcggtgcagaagctggtcgtacaccggtgcgcagtgaaccatatccggaaccagataggctgccagtgaaaccatggacaaggtcagcagatgagaaaaagatcctgtcatctcactaatcagtatgatgcctgtaatcggtgcccgcacaatggcggagaaatagcccgccatgcccaggataatgaaattccccaccaggccgctcagagaggggctgacaagaagggccgcattgtaatatatgcttcctatgatggcccccatcaccagcaggggcaggaagatgcctcccggtgctccggatccgaagcttatcatgctgaaggtgaatttgaccaccagcagcagacacagcgccccaagcgccatctcacccgtggacagctcctccaccagggcatggcctccgcccagcacgctgcggtatgtaaacccaaacacacctgccagcagaaaggggatcagaagcttcaccgtgccccaggggatttttccgtacaagtcctgggttttagacagggtggtattataaaccacgcccatggctcccatgagcacacccagaaccagcacatgtccgtaggtgccaaggggcatcatatgggtgatgtgaaaggaaaataccggcgtaaggccgaatacattcctggatacaaaatccgaagtaatggatgccgccatggaggaaaggagaagctccggtgaaaagtgcttatgtacctcctccaaagaaaacagtatgcctgcaatgggcgcattaaaggcggccgacaatccggcgctggctccgcaggtaatcagaagtttttcctctgttttcacacgcttggcggctcttgagaacccctttgctgtcatggctcccagctgaatgctggggccctcgcgtcccagggacaatccgcatcccagggatataatgcccccgcccagcttggcaagcagcacacgccaccatttttcgtcaatttccccgatgatttctccttcaatctggggaatgccgctgcctgatatcagggaatcccatttaaggagaagggacaccacacacgcggcaacggccagaatcagaatccataccggcacaaaccaggtatggctcttaccatagtccagtatcatgttcagcagtatatccgcggaaccgatgagatagcggaaggccaccaccacggcgcctgccagggctcccaccactaccccctctaaaatcaactcataacgaaaactccggtaacggttaatggtatgagtaaccgtatgttcttccggctgcataacgtttccccctgtatccttctggcctgatgcctacatctcactgtaggtgcccttgaattttacaagcttgggacggtagcccgcgctggtaagggcagatacaatctgattcttatgttctgtgccgaacgcctccatggtgatgcgcagctccacggcagcatttcggttgatgctgatgaactggttgtgctccagcttgatgatattgccctgctcctttgcaagaagggcggataccctggccagctctcccggcttgtcaggaagcagcacggacacggtaaacacacggtccctctcaatcagaccgtgctgcacgatggaggacatggtgatgacgtccatattgccgccgcttaagatagatacaatcttctttttctgtacgttcagatgctttaaggccgccacggtcagaaggccggaattctccacaaccatcttgtggttttctaccatgtcaaggaaagccacaatcagctcgctgtcctcgatggtgatgatgctgtccacattttcctgtatgtaagggaacagcttttcgccgggacgcttcaccgccgtgccgtccgcaatggtgttcacctggggaagtcccaccacctttccctccttaagggatacctgcatgcagttggcgcctgccggctccacgccaataaccttaatcttcgggttcaaaagcttggccagtgtggaaacgccggtacagagaccgcctccgccgatgggaaccaggatatagtccaccgtgggaagctccttgatgatttccatggcaatggtgccctgtcccgtagccacgtccaggtcgtcaaaaggatgtacaaaggtatatccgaactcctccgccagcttataggcgtgatcgcaggcctcatcgaacacatccccctccagcaccacgtcggcgccgtagctcttggtgcggttcaccttcataagaggcgtggtggtgggcatgacaacagttgcctttacgccggccagcttggctgcgtaggccacgccctgggcatggttgccggctgatgcagtaatcagtcctttggacttctcctcctcggtcagggtgtgtatcttatagtaggctcccctcaccttataggcgcccgtgtactgcatgttctccggcttgaaaaataccttgtttcctgtctgggcagagaaatactcactgtataccagttttgtctctgtagtcacatctttcacaagctcggaggcctcttcaaatctttccagtgtcagttcttccatatcttggtccttctttcccttacttttatcctatactatagcacgtcaatgtattaaattcaagatggattctcctccgcctgcttctgcacatggaacagggcattgacaaagtcatctgcattgaatttctgcaaatcgtctatcttctccccgattccaatatattttacaggaattcccagttcggactgaatggccacagcaatgcctcctttggctgtgccgtccagcttggtcaggataatgcctgtgatgtcggcaacctccatgaactggcgggcctgggccagggcattctgtcccgtggtgccgtctaacaccaccagagtctctctgtaggcatccggatactccttgtcaatgatgcggttgattttcttaagctcttccatcagattctttttattgtgaagccttccggccgtatcacagataagcacgtccgccttcctggacttggctgccgccactgcgtcgtagataacagccgccgggtcggatccctcctgctgcgcaatcagctccacgccggcccttgatgcccattcggtcagctgctcaatggcagccgcccggaaggtatctgcagccgccagtatgaccctgcgcccgtcgtccttaagctgtccggccagcttgcccacagacgtggtcttgcccactccgttgacgccgataaccagaaccacggacttcctgtgctcaaattcgtatgcgttttcccctaagtccatctgctccttgatgctgttgatcaaaagctccttgcactcctccggttcccggatatgctgctccttcaccttcttgcgcaaatcctccacaatggacatggtggtctggattcccaaatctcccatgataagggtctcctctatctcctcatagaaatcatcgtcaatggcggaaaaaccactgaaaatggagtctatccctgacacgatattgctgcgggtcttggccaggccctctaccaggcgcccgaaaaagcccttccttccctctgccataaatcattctcctttttgtgtcttacatttaggtcttatatacaataaatatatatatgaatcatcatatcataactttcactatttatccagttgcactatttatccaggtcatccgcaatgaggttcacgctgaccagcgtggatacgcccttttcctgcatggtgatgccgtagaggcggtccgctgagaccatggtgcctcttctgtgggtgatgacaatgaactgggtattcctggtcagcttgtgaaggtatcccgcgaagcggtccacattggaatcatccagggccgcctcaatctcatccagaagacagaagggggacggctttaggttctggatggcaaacagcagggaaatggctgtaagggccttttcaccgcctgagagctgcatcatattctgcagcttcttaccggggggctgggcaatgatctgtatgcctgcctccaggatatcctcgtcctccatcagttccagtgtgccccgtccgcctccgaacaattccttaaagaccttgtcgaattcagcccggatttcaccgaacttttcttcaaactggcgccgcatcccggtatccagttcctcgatgattttctccagctcggcctgggcagtgaccaggtcctcatgctgggtgcgcataaactcgtagcgctccgatacctctttgtaatcctcgatggcgttgacattgatgttgcccagtccctttatcctggatttcaattcgtctatgagcttctttacctcagggacggactggtattcctctctcttaagctccagggccgtggaataagtcatctcatattcagaccacatataggcagtggacgcctccagtttttcctccagcttttccctctgggcctggatgcggaacatatccttgtccagctctgccaggcgggcggtcagttcctcccgctttgccagaaacgccttctgcctggaggacatctcctccttctcggactcatggccagccatcacctgttccagctccttcatatgcaccatggcattctgaatcagttctcccagatgggcaatctcccggcgtttgctctcaatcacctgttcggaatttcccgtgccttcggccagtgagtcaaactcctccgtaagcttctctatttctccggacacacggtctgcattttcgcggataaagtcctgtttctggcgcaggttggctgcctccatctgaagggccgacagggccgcagcgcaggtctcccgctcttttctggaggtctccagaagaaccgtcttgtcctcgatctcctggttggcctgggtgctcacctgctccagctccctggagtcctgggtgagggctgtgcggctctcattgatttcctttacctgctcttccagctggccgtgctcgcgcaccaggtccgtggatgactccgctatctccgctttcttgtcctccagctgggatatgttcatgcggatggtattctcccggatggccatggactgcatgtcggcgcgcagcttctccagttctccctttttctcctgggccatggattcttccaggttaagctccttttgaatcttctccacctggaccagggccttgctgcaggtattctctaactcctcaatctccctgcgccgccccagcaggttgctggaattcttaaaggcgccgcccgtcatggaaccgccggcgcttaagagctcgccctccagggtgacgatgcggagactgtatttatactttctggccagtgcaatggcattgtcgatggtatctgccaccaccacccggcctaacagatacctggccaggccttcataccgtgaatccacctggaccagatcgctggccagccccagaacccctttctccttcagggcggccggctgggaaaatgtctgtttgccgttaatgctggttaacggcaggaaggttgccctgccgtatttattcttcttcagatattcaatcagctgtttggccgttgcctctgaatccgtcacaatgttctggatgcttccgcccagggctgtctcgatggccgtctcatacttctggctggtggtgatgatatccgccaccaccccatgtatgccgtgtacccgatcgcgcacctccatgaccctgcggatgctgttgccgtagccgtcatagcgttccgccaggtttttaagagattccagcttcgtgtaggccatatggtattcctgctgggtatcgtttaaattccggttcaggcggtgtgattcctgctcagccttaagaagggcgtcctcggcttcctgagccgcgaactgttttttctccagctcctcattcagctggtccaacaaagcccgttccctgccgataagctcgtcctgcaccgactcgtcgctcttgaatctgagaagcttttgggatacctcgctgcgccgtaaattcacctgctccagcatagtctcatatcgctgctgtctggcagtcagggaggctctctcgttgagggcctgaatgatacttgcctttgccccttcaatggcttcctccagccggcggatggactcgtcctggtccccaagacgggctccggcttcctcctgacgctttacagcatccctcacctggtcgcccatggcctttcgttcttctctataggaggccagctgctgattcttggcagccagctcctccttaatcacgtcccgtctgtgctccagatgctcctggttcatctcctccgtatgtatctgttccttcagaacattaatctggccttccagattccccttcagcacagtgccctggctcagctcatcccggtcagctgccatgcggcgctccaggtccgccagagtctgctccagctcctcgtatccggccttcaggcgttcagactccctgcccgtgtcctccatatcgccggagagaacctgatggcgcttctccacttcctccagctgcttgcctgttccctctgtctccatgaggaagaggttggcatcgcaaatcttaaggctgtcctttaactgaagatactccctggctgccctggactgacgttccaggggacctacctgcttctccagctcagagaggatatcgcttacacgaaccaggtttgcctgctcgtcctccagcttcttctgggcaatggccttgcggcgcttaaatttaacgataccggcagcttcatcaaaaagctcccggcgttcttccggcttgccgcttaatattctgtcaatctgtccctgtccgatgatggagtatccctctttgccgatacccgtatcataaaacagctcgttgatatccttaagtctgcaggcgctgccgtttatcatatattcgctctcaccggaacggtagagtcggcgggataccgtcacctggtcatagtcaatgaccagctgatgatcgctgttgtccagggtaatggccacgtaggcaaacccctggggctttctcatctcggttcccgcaaagatgacgtcctgcatgctggcgccgcgcagctgcttgatgcgctgttcgcccagcacccagcgcacggcgtcggccacattgctctttccgctgccgttggggcccacgatgccggtgatgccgttatggaattcaaataccagcttattggcaaaagatttaaacccctgaatctcaatactttttaaatacatagtccacctgcttattcttctgctgcggcttcctgtgccttaagcttcagtatgccgttataggcagccacctgctctgctgccttcttggtacgtcccgcgccgcggcccacctcctcatccccgattttggcgcagacctcaaaggatttattgtgatccggcccttcctcacggatgatctcataggacaggggcgcctcctggcggctctgcaccatctcctgtaagatagtcttgctatcataaaagagctgcttgtgttcaatgtcgtttaagataaaacgatgaatgaactcttttgcattagcaaaaccaccgtccagataaatcgcgccaatcagggcctccatggcgtctgacaccacggaattgcggttcctgccgccggtggcgtcctcacccttgcccagatacaggtattggcccagctcaatgtcccctgcgcagtaagccagggtgggttcgcacacaatgctggccctgattttcgtcaaatctccctcaggcagcctttcatacttgcggtagaggaattcgctggtcacgatttccaggacagcatcccccaaaaactccaggcgctcattgcatctgctgtggtccagacggtgttcgttggcataggagctgtgggtcagggcctgggtaaacaggttcttgttcttaaactcgtatgcaatcctctcttccagttcttttaaatgactgttcatgatgatccttccttcttcaaatacactttggggcaggcctttaaaacaagcctcccaaacgcacaaaaagggctgtgcttacagcccctgtgcctgtccgttagtttaaagcgttcttaatctgctctactgcatcgcctactgtcacaatctgttctgcagcctcatttggaatctctatgtcgaattcctcttcaattcccatgataatctggaaaatgtccagtgaatccgcacccaggtcatctacgaatgtagctgccattgtcacttcctccggttcaatgttcaacacttctgcgataataccctgtaatttctcaaattccatctcttagctcctctttcttaaatcttgatttttacttcgtccttcggacttattcttcgttctgaacgttcaggcactgttggattttaccattgatatcctgttccttaaacgtcacacattgaataatggaattacgcacctccgtgcgctttgaattgccgtgggtcttgaccacaaggcctttcagacccagcaggggtgctccgccgtactggctgccgtcaaaggatttaagcgtttccttgagggccggcttcaccaaaagggcgccaatcttgctgcgcagggtggacatcataccgcccttcaccatactgatcaaggtggccccaaccccctcatacagcttcaggattacattgcccacaaatgcctcacagacaatgacatccgctccgccatggggaatttccctggcttcaatgcttccggtgaagttgatccccttacattcctttaacaggggaaatgtctccttcaccagcgcattgcctttttcttcctccgcaccgatattgacaatggccactcgcgggttctttattcccatcacatgctccatatagatggaacccatctgggcaaactgtaccagatgggacgctctggcatccacattggctccacagtcaatcaaaagtgatacgcccttctccgtaggaataagcggtgccagcgggggacgttccacacctttgctgcgccccactatcacctgtccgcctaccaggattgccccggaacttccggcggatacaaaggcgtcggcctccccctgttttacaaggtttaagcctaccacgatggaagagtctttcttcttacggatagcgtttaccggcggctcctcagtggcaatgacttctgtggcgttcacaacctgaatccggtccttgtcgtaggtgtgctttgacagttctgaaacaactgcctgctcctgccccacaagaagcacctgaatgccaggttttgcgttcacagcctccactgctccggctaccatctcgcccggcgcataatccccgcccatggcgtctaccgctactttaatcataatgactctcctttcggtcctgcatacaacttataatatactagatatcattctataaatcaatatattttttcaatggttttgggggaattaagaacccatgttcctgtccgctgcagacgtacaaacgttaaaaatatgcatacttctgcaactttgcaaagtcgttagacaatcggttcataacatggtaaaataagttctatagaccttgtgggggcatattatgaagcaatgcccctcccactccatttagcaggtgaataacatgacaaatgataaaacagatattctgggacaattcggatttgaactggatgcggctcttttttacgatgccatcgtaaagagtacggacgattatgtctatattgtcaatatgaaaaccgacacatccctgatatcggaaaacatggtcagggacttcgagcttccgggcagaatcgtgcccggactggtacctctctggggcagtctgattcacgaacgtgacagggctcgatatgatgaatccatcgaacaaatgttaagcggcctgacggatgtacacgatgtggagtatcaggtccgaaacagaaagaatgagtacgtctgggtcgtatgccgcggcgtcctccaaagggaccagcagggcagtcccgccatgtttgcgggcattgtgaccaatttaagccacaggggtaaggtggactatgtcaccggtctgtttatgcagcaggaatgcgaacgcgtggtggtggaatgcctgtccgaaggccagagtgggggaattctgctcctgggcctggatgatttctccggcatcaacaatttgaaaggacacatatacggcgattccgtcctgcgccagtttgcccagaacgtccagaggctcctgccagattacgccagcatataccgccatgacggggaccagtttgtcattgtgtgccagaatacgtcctacggcgagatagcgctgctctatgaagtcataaacagctacagcgactgccgccatgaggtggacggaatccagtactattgtacggtttccggcggaatcgccgtattctgccaggatggttccagctatacggagcttttgacctgtgcatccggtgccctggaaacctccaagcataagggcaagaacaagtgcaccctctatgacgaggagctgattcacaccagactgcgctccctggaaatcatggaccgtttaagaagcagcgtcatgaaccatatggaaggattttctgtggtctaccagcccattgtgcgttccagcgacacaaagattgccgaggccgaggcgctgctgcgctggtcctgtaaggacatgggcagtgtatctccccttgaattcatccctttgctggaatccagcggcctcattatcccagtggggaagtgggtgctggagcagtctgtccgccaatgctgcaaatggcttgcctgtgtaccggactttgtgatgaacgtcaactgctcctacctacagatgctggatgaggactttgtacaatccgtcaaagaaatcattaaccgttacagactggaccccagccatattgtgctggagctgacggagagccgctttgtcacggaccaggaccgcttaaacgatacatttaagcgtctgcgcagccttaacatacggctggccatggatgacttcggcacaggctactcgtccctgagctgcctgtcctgtacaccggccgacattgtaaagattgaccgtgaattcatcaggggaatctgcgaccagtcccactccttcaaccgttccttcatcgggtctgtgataaatctctgccatagcgtgggaatatccgtatgtgcagagggcgtggaggaaaaagacgagctggaaaccgtcctcagattgaaagctgattccgtacagggattttatttttcaaagccggttacacctgatgaatttgaaaaacagcatataaagcatcctgatatagggtaagcctgttttatattctctcaaattccgctatctccagaggcctgctgtaatagtagccctgaatggcggtacatccgaaggaagtcagcagttccagctgttcctggttttccaccccttctgccacacattccacctgcaggctgtggcacatatcaataatgcattttaccacagtctgattggtctggttttccaccaggtcatccatcagggatttatccagctttacctcgtcaaactgcatgatggaaagaatggacatattggcatagttggccccgaaatcatccagggagatacgaaatccagcttcccgaagttttgaaccaatggattcaatcaccttgcgctcaatgtcccctatgctttctgttatctcaatcatgaccaggcgggcggggatatggtatcttttctgcatatctgtcagcacccggaacaggtccctttcaagcagcgtaatccgcgaaaaattgaccgaaacaggaataagctccctgcctcgctccttccagtctgaaagcagtttaaatacctgctccagcatataaaaatccagataccgtataagctttgtcttctccagaaggggcacaaaattcagcggctgtgtggattcggtaccggctgcccgataacgcaccagtgcctcggcggaacacaccttaccggtcaggggattatactttggctggagacagagacggtaacagccctcttccatgtcctgtagcagacgattcaggtattccggcgaatagtgcttgcgttcctggctgctgtccttataataaatctgtttgttcacaagcatcagttcttccgcatggcgcatcagccggtcaaaatccgccaggtgttcttcccaggtacaccccagtgagacaccgtttggggtgcggctgtctaacatccattccattttcccgacccgctccatgaattcctcatatgctgattccaggctgacaataataaactcatccccgctgagccggaatatgctggcccctgcaaaagaggaggccatgacggatgccgcctctttgatggtcatatctccccggctttgcccataatcacggtttaactgctttaagtcattgatatccccggccacaattccgcaggataccgccttgccgcttctcatcaaatcattgcggaaatgcacaaagctttctctgttcagcaggccgctgaggctgtcatgggcagcttcatactccaggcgctcatagaggcgtctcttttttatctcattcgcaatattataggcaatggaatccagcagcttaatggtgtcctggttgatattgggattgtcgattccaatatatccgctgaaggcggattcgtcttcaaacggcacagcaaagaggctgtccgtgtttctggcggtcaggtaacggtactcgctggggtatgaatccctaagttccccggttctggagataatcaggtgctgcttcttgttaaaggtctcaaacaaatagggaatcccatccaggggcacctgctgcaaggctgccttttgggaaggaattccagcccggcaccattcataggtattacgggcaaatccctgtacacggtcaatttctatgatataggcccgctctccgccgtaaaaatcagctatcatttccagcgtacggttaatggcatcatccaggcagtccgcagtattcaggacccgcagcgtttccagcataacggtttccatatggtatttggatgtatggctgccgcgctccttcacgcggtctcccacatccactgcgatttccatgcgggcaggccttccctcccattccaccagcttatcctttacaatgaagttcttatttaagtggggattctcatattcccacacgtagaagccgtccttgctcagtttggcattggtgcagaagggacatggggtatccctgccctgaagtacacgatggcatttgctgtttcgcacgtcctcctgcttaagacctgtcagcgacctgccagcccggttaagataaagaaggctgtagtcccggatatcgctgacatagatgatttcctccagttcatctaaaagcggtgtttcatataagatcatatcctgctccatgattgtctccctttttactgtaccgtgtgatgttcctgttccgtgtccggccgggaagcccttcccgcttcatcttctatccggaaattatttttaccgctgtttttaacttcatagagcagggtgtccgccctctgataaagcgtggtatagtcgtcctccctgcggcttatagatataccgatgctgacagtcgcagcagggtatccggacgccctgcatttagcctgcagtgaatcaaacagtgcattgcagcattttgccagatggttttcccctgtatagggtacacagacgataaattcatctccgcccatacgggcagtgacagcctccccgcaaaaagattcccttagcgcttttgctgtatgaatcagcacctggtcccccgtataatggccgtaacggtcattgatttccttaaagccgtctaagtctatgacagccagagcaagggcgccggtatgcaggtttatcatccgggtgatctccatttttgctgccgctatattgtaaatccccgtcagagcgtcccgtttgctccgctgctccagtctctccctttccagcttgtcgccatggatattctgtaagcgtccgatggcagaatcagcctgattcccgtcgaaaatcacttttatgactgcacggtgccacttggtgtccccattcggcagcaccatcagaatctctgtatccacatcctgtctctgctccagcagataatacagagatgggagaccctcctcctgtccgctgcttccctgataccgcgaatactgcccgatgcttttatccgtgccgaagatttcaacgccctcccttgatagggtcagcacatcactgccatagtcatacgtaaaggtcacttccttcaatatgtctgagagatagcggtaacgggtattttccagttcaatctgccgcttcatcctcatctggcttctgtaatgggcataaatcagggccagcaggctggaagcagccaacagggtaaacaaaatgaagggaacggaattatccctgataaaggtcctgagagtcacttcctgtttctgctgcgcattgttgtagatgtatttttccagttcacccgtctctatggaacggattcctttattcaggatagccagtatctgtttatcatcctttctcaaaatacctatgctgtatttcacactgtcactgccggcctggggatagatagccacatgctcgtactggttgcggctcagataataagaggcagtgtaactgttgctgtatgtataatcgcactctcccctttcaactgcgttaagactttcctccagagaatcatagaaccgcacatccgtccggtcatcgtcgcttttgcgcatgcccatatacacagcctgtaccccgcccttcaggtttgtcatatcaaacccgtcacgggccaccagcacactctctgtctccagatatggattgcttaaaagaacatttctccgttggactgcatcataatcatacaggatagacagaatcacatcggctctgccttcatttaacgcctgttcaaattcactgtaatcattcgcgtaaacatactccagcgtccatccggccttttgggctatactgctgagcaggtctctggctacgccctgcacctgtccctttccatcgtagtactggatggggccaaacccgtcatggaccagtaccttaagtaccggatgttcctgtatgtattcccgttccttgctgttgaggtgcatctggcttccggaccgggaaaaatacttattatacaggttcatctgaagggtgggattattctcactgatataggagattgcccggttcagttcattgattattttggtattacccttggtggtggcaaaataaaaaggagtaggcgaaaatttagcaacaggacggaatcccggggacagggatacatcaacggacagcaatgcgtccgccttaccggaataaaccctctcctcctgctccccatccctctcgcaccaaacgatctcatactggatgccattgagcttcgcgtactggtaaaacttttcgttatggtaatctgcctgtttcaaaagcgctatgcgcagtcccttgaaatcagaaagattatattcatcaatgcggtcatcatcatcccggaccgcaatcacactgtacgcgttgccgtagttttcactgggaaaatcaaaaacagaggaagtctgcttgttgttattcatggctccaacaagatccagttccccccgttccagcatatccatcatttgaatcaactgttcatccatggatccttggggttccacaaactcataggtccatcctgtgtactgtccaatctctttcagataatcataggtataacccgcataattaccattttcatccttcatggtcagacccgactgcacgggaaatcccacccgaatcacagactctgcttctgctccataggaaacaaaactgtatggcagtatcaggcagtatattgcagacaaaaccatcctatattttttaatcaattggttcatggattctctcccggtcgtttatatctattattcatgtacataatatcccatccattatataacagcttgccgcatataacaatgtaaatcactccccatgccgttaagacagagagggggattcccccttatggaaaaatcccctttttgtttaccttggcaagccggttccgccgcaatgtttccagccaatgtatttccagcagttcttctgctttattatcccttgcttccgttctttctttgcggtccagtcctcattcccaaaaaacagaagaaataggataatcatgctatataaacatattgtaaccctaatatcttaaaacttcaatgtcaaattatttatgtttccagcaatgttccggcaaatgcgcctgcatcaagattcgcattgtgaaccggacgtcagcgtggtaaaatatactcagataaaaccgtgatactttcagaatatccaggagggatttttatgaattatgaaggacaaatctgccgcggtcccatggagcgttcgtcctatatgcttccggttgccgttggctgttcttacaaccagtgcaaattctgcaccctgttccggcatctgaaatacagggaacttcccatggagcaaattgaggcagaactggaaagagtccgcagcctgggcggcaatccaaagcatgtctttcttggggacggcaatgcctttggcctgggtacaaaacgtctgctggaaataacagacctgattcaccgttattttccggactgccaagccatcaatatggatgggaccatcaccaatattcaggccaagtcccaggaagagctgcgggcccttcgggaggcaggtatacgtcatctgtatctgggcattgaaagcggtctggacgatgtcctgcgttatatgggaaaggaccataatctggaccaggcataccgtcaaatcgaccgcatccaaagcgcagggtttatattcgatgcccatatcatgaccggaatcgcgggacatggaaggggactcgagaacggaactgccaccgcagaattctttaaccgcacccagccgcagcgcattataaatttctctctgttcctgtttcacagcgccccgctgtatcaggaagcgcaggccaaaaccttcatccctgccactgagctggagaacctgcaggaggaacggctgcttctggagcttctgaatacggatgggcctttgacttacgacgggtttcatgaccgtattgaattcagagtgcgcggtaccttgcctgatgacaagatgaaaatgttagacaggctggatctggccatcgaagggtacagggagcatgagcctgtcattgcagccgcagatgattcgcccggagattccatttaaaaacactaaaacaatcttgccttcatataatatcgtaactgaaacccttgtcctgacccatggattccaagcaaccgttttttcaggaatatggaagcgtattattgattggattctaaatcggacaaaccatgttcagtctgtaataaatatgagggagtgaatttaaatgagatatgattatgcgaacggtatgaaccgaggtgaatactcatatgatgagtcgaatgaatattccggatatgataacaggtacgcagagcccatgggcacaaagcccaattccttttaccacagatgctgccaaggtccaaccggtcccgctggtccgcctggttgtccgggtcagcccggtcccatggggccccggggctgcccaggccctcagggcatcaccggaccaaccggggcaatggggcctcagggctatgtaggccccaccggccctatgggtccaaccggccctgctggtcaggctggcgcagttgggcctacaggccctgccggttccaccggccctatgggtcccgccggaaccacgggagtgaccggagccaccggccctacaggtcctgctggtaatgagaattctgtcagctgccgctgtaaggagcaaatgaggaatataatccagcaaattattgcattatatccaaacaataatttattggtgactttgagtagcggtgatgcatcttttggacgccctggttctttgatattagggccggatggacgtaccggagtatttgaagtgataaatcctcaaaatcaactgcagtatttatctatatgcagcatagatacgattcaaatagacaatgcaacgtataatgatacaattgtttatttgccagagccgtttcccgctcccacagactgctgcgctgattgccaggcagccattcgttctcttttgcctgtgggaacagctggggttaatataataaccagcagccaaactccatccgtgggaaccgttattagaaatgaatatggcatgttagtactttccaatgaagccagaaccaatataacctttgtctcatcctgcagcattgatctgtttttgattaatacctgagacagttaggaaacaggtgtacacccgctttttccaatgcggtaaaacagcctccctgaaacgtgtataacacttgacagcatacccatgagtggctataatgactataatatgaagaggaaagggtgagtgcaatgttattcggtaagttctgcattgattatagctccggacaatttgatattttaaaacattgtacggagcctgaaaatacgaaaacaatagccggcagctattagattccaaattactggttttggagttttgttttcgtatgttccaataaacagcagtttgtttttttgcggcggtggacagtgttttgtctgccgccttttttgattgctggtgatgaatctgtctctttgagagcagagggcgtgcaggcttttgtacgccctctgcttttatatctggaaaggaacgataaagaatgaacgataaacaagacttaacaactggaactatttccaaaaagttaattgcctatgctctcccgctgctggccgcaaatctgctccagtcattttacagccttatggatatgctggtcgttggcagaatcgtgggagaaaccgggcttgccgcaatcagcaacgcctctatgctcagttttattatcaactctgtgtgtatcggcattacaatgggcggtacggtattagccgcccagtataaaggggcaaaggatgaacacggccagattgagataatcggaaccttattcacagttgcttttattgcggcagtccttgtcaccgcagccggtctggccgcctacaggccgcttttccggttgctgcatgtacctgcgcctgcaatggaggacgcctgcggatatatgaaaatcatctgttatggaaccatatttgtatttggctataacgcagtctgctccatcatgaagggattgggagattccaaaagcccgctttattttgtggcggttgcaacagtgatcaatcttgttttggatcttcttctggtaggtccttttggcatgggcaccgaaggcgccgcctgcgcaaccattttttcacaggggatttcctttgtaatctccgtgttccatttgaagcggaaagattctgttttcgactttcggctatctcacttttctataaaaaccgacaagctggcggccatcctgaaagtcggtcttcccacagcggtacaaatggcttccgtcaatctttcctatctcctgattacgggaatgctcaatcaatttggcgtatctgtggctgctgcatctggtgtgggattaaaaatcaatacgtttgccggtatgccctgctgggcaatcggtcaggcggtgacagccatggcaggccagaatatgggcgctggcaatataaaacgcgtgcaaaaaacaaccagtacagggctttgcctaaatcttcttattacacttattatggttttactggtacagatttttggaaagcagctcattctcctgtttaccccggcaagcccggaagtacttgaggaaggaatcctgtatttaagaatatgctgcagtgtaaacagcctggtatacgcggtcatgtatacctttgattcctttgccatcggtatcggatctgcaaatattgccatgttcaacgcactgttggatgcgggcattgtcaggcttccggtaagctggctgctggcattccccctcggtcttggttatccgggcatatatatcggtcaggccctctctccgtttcttcctgctgccgccggattactctattttaagagtaaaggatggaagaataaaagaatcctttaaagagaacacagctatacaaattatacaaaaaagcaaggaggctgatacagtcatgaaaggaacaaacatgaatctctcctttggattggaagtcatctatgaagatgcggattttcatatagacgctcacgacaaagcgggcattgtgggagtaaacggcgcaggaaaaacaaccctgttccatgttttgatgcatgaacaggaattagacagcggcaccgtatccaccggccatttacgaatcggatatcttccgcaggaaatcatccttgaggacgaatcctgcaccgtgcttgaatacctgcagagcggacggccgattcaaaaactggaaaacgaactgaaccagatttaccaacagttggaaagcgccgattcatcggagcacgcccaactgtttaagcagatggagaagcttcagtcccgcttggaatcgttagattattacgaggcagacagcattcttcttcatatcattgaccgtatgcaaattgatattgacttactgggcatgccccttggcaatctgtccggcgggcagaaatcgcagatagcctttgcccgtgttctgtatgcaaaatccgacattctgcttttagatgaaccgacaaatcatttagatgcggcagccaaagaattcgtaaccggatttctgaaaaattacaaaggtacggtgctgattatcagccatgatatcagctttctaaaccagattatcaataaaatcctgtttattaacaaagccacacacaaaatttccgtctatgacggcagctatgatacctacaaacagaagtatgcacaggaacagcgtttgcgggaacaggccattgtgcaggaggaaaaggagatcctggaactggaggaatttgtccgcagggcaaaccaggcaagccggaccaaccatgcgctcaagcgtatgggacaggaacgcgcccttcgcctggagaaaaagcgaagggcgaagcagacccgcgaccggatctacaaacgtataaaaatggacatccaccccttgcgtgagtgtgccgctattttgctggaagcagaacacctgtcctttcactatccaaaccagccgcccctataccgcgatttatcctttcaaataaatggaaaagaacggtttttagttgttggggaaaatggtgtcggaaagtctacgctgcttaaactgatcatgggaatcctttctcccgatgcgggaaatatccattttcatcccaaaaccgatgtggcttactatgcccaggagctggaacagcttgatctgcagaaaacagtactggaaaatgcctggacggatggatattcggtaaagcagcttcgctctgttttaagcaattttctcttttatgcagacgatatccataaaaaagcagaggtcctgtcccccggtgaaaaggcccgcattgcgctttgcaaggttctgcttcaacgggcgaacttcttagtactcgatgagcctacaaaccacctggatcctgaaacgcagagcatcatcggaggcaacttccatctttttgagggcacgattatggctgtcagccataacccctggtttgtagagcagctcggcattaaccgggtactgatcctgccatccggcagaattgtggattactcccgggaattgttagaatgctattatggattaaattcagaggaggagttataaaatggcagatacaaaaaaattatatcccagaaccggggataaacagactgtgtatttaaaaaacgtaattacagatccggctattactgttggagattatacgatgtacaatgattttgtcaatgacccggttggatttgagaaaaacaatgttttataccattatcccataaaccgcgaccgcctgatcataggaaaattttgttccatagcctgcggcgcaaagtttctcttcaacagcgcaaaccacaccctctcttctctctcaacctacccctttccccttttctttgaggaatggggactggaaaagagaaatgtggccgaatcctgggacaacaaaggagatattgtcctgggaaatgatgtatggataggatatgaggcagtcattatggcaggggttacgattggggacggagccataatcggagcccgggccgtggtgacaaaggatgtccctccatatacggttgccggcggcattcccgcaaaaccgattaaaaagcggtatccggaggaaaccatagccgccctgtcagaactgaagtggtgggactggccggagaatcggattgcgcaaaacctccatgcaatacaggctgggaaactgaatgaactgaaataaattcattacatgcctaaagaattatgatgtcctgcacggccagcatgcgtgtgctgctggccccgtaatgtaactcgcgccttagcccagggaagccctcaggctgtccgctgtcaatgttctggcgcagcgcagcatttccataggtgtgccggtaaataccacctggccgccgttcttcccaccgtccggcccaatatcaatgagccagtccgcctgcttcatcacatccaggttatgctcaatcaccaccagcgtattgccgcgggacacgattaagtcaaacagcttgagcagattttcaatgtcggacatatgcagtccggtggtgggctcatccatcacaataatactcccctttctgcccaggttcttcgccagcttgattcgctggcgctcccctccggacagggtgctgaggggctgtccaagggtcagatagcttaatcccacctgctccatcaccttaaggcgcctgcggatcttggcgtcctcaaacacctgaagggcctgggacgcagtcaggcccagcagctccacaatattctttcccttgtaggtgcaggcaagcgcttcctcattataccgcacaccgccgcaggcctcgcattcagtcactataggatccatgaaggccagttcggtgacaatgacgcccttaccgccgcataccgggcaggccccggcggagttaaagctgaacagactgtccggtctgccgctctctcctgctagaagccttcgtatttcatcgaaaaagcccaggtaagaggccggtgtggaacggttggtggctgtgatgggtccctggtccaccattacgatattgctctcatagagttttgcaaatacccgggagatcagggtactcttgcccgaaccggccacgccggtcaccacggtcataatacccaaggggatatccacatccacatgcttaaggttgtggagacaggctcccctgaccggcaggcttcccgcagcctgccgcggcgtctccttgatgggcagtacctgcctcattgcctttcctgtcagggtatcggccagaagcagctccggatagctgcccgcaaatacaatttctcctccgttttgtccggcccccggtcccacgtcaatcacatggtcggcaatggaaatcacatccttgtcatgctccaccaccagaaccgtgttgcctttgtcccggagctgccgcagcaaattgttcatccggtaaacgtccctgggatgcattccggcacttggttcatcaaagatataggtcaggccggtcaggctgctgcccatgtaccggaccagcttcaggcgctgggcttcgccgccggaaagggagggcgtttcacggttcaagtgaaggtagggaaggcctattccaatcagcctgtccagaccttcgatgatggtctgtaccaggacgtccaccctttggtcggtaatctcagccagaacttcccgaagtccggtcagctccatgcagcataaatcagcgatattgtacccctttattttgcagctcaaagccgccccattcagccgcttcccatggcagtcggtacactccatctcagcaaccagtgattgggatttctcccgggtgtgcctgctcttattactgatgtcccggttgagaagcgtctttgtgtacttgtggtacagcccggtcacctttgggttttccggttcgcctttgccgtcgcgggagccatataagagcaggttgtattcctcaccggaatacgctctgattggcttgtctaaatcgaagagaccggactgggcatactgtttccagtaccaggaaccggggcggtaaagggagtccttgacgcagccctcattccatgatttatccatatccagaacagcttccacatcgacctttgtaatctttcccaggccggagcaggtcctgcacattccgttgggatcattgaaggagaagtaagaagccgtacccgcatagggcttcccgatgcgtgaaaacagcagacggaggctggcgtacaggccgcttatagttcccaccgtggagcgggcatttccgcccaggggagactggtccaccaccactgaggccgtcaggttgtctatgcgctccgctgccggcttcggatatttcggcagtctggagcgcacgaaagccgggtaggcggcgttcatctgccgctgtgactcagcggcgatagtatcaaaaacaatactggacttgccggaaccggacacgccggtaaacaccgtaattttttcctttggaatacggaatgtgacgtgcttcagattgttctgggtcagcccatgcacaagaatatctgccattttttacctctttccatttacgttatcgtataccttatcaggtgttcatatgattatatgcccagggctccaaacgatctgccctggcctcattgtttggtccatttctcttttatcttatcatgccggaatcctgacacattccagactgcatcatatcaaatgggacttccccattcatgatattttttgcggagtttcattctttttttaataggagattgtctactcttccggttatccagacttcgtcattgatagtctctcatccatacactcacacccctatggctggttttcccattccgattcccttttcaagggcagaatcagtctccataataataaatcgcctttaaatatcccttttcatcgaacaccggctggcctccgccataaccagctgctccttgattggttatatcatcaaaccgcatcactctttcgccgctttccaaatacgctttatccgggaaactaaaatattgataccactcatgttccgctcctttgagcacatagaccgtacctttataaatatttttaaacaacgtatcgtcgctattcgcccacaacgtataatttcctgaataaggctcataggacaggaaatagtaatggggcgtatcctctcccgatgtttttcctgattctgtaccagaatcataaaaaagcatgcagtcgccataatcggaattgtccgtccttcttacagcagccgtctctttcgtcagctcattcacacaaatccgttcttctttaccctctttcatgaccgcttcatactgcttgggtgaaagaatgaccggtgtgtaaatcgtgccttctgcttcataatatatccctttatctgccctgtgctgaatatcagaatacaggcttactcccatttccgtatgggcagtaagaagagaagcatagggagccgttaaaagcccgtcataaatttttttcaccttgttgctcttttcttcgtcaaattcagcttctgctttctttaaaaatgcaatatttcttttttccagacccccaaacacggtctcgtcaaattcatcctctgttttatctcccagataccatgttttttcctgaaaataatctctcagctcctgcttttcaaatatctttccatgaacagcgtaatactggtttctcaggattttcatatcagccacagtcatgccaataagatctgtctcgttgagaggtctggagaaaaattccggcataaataaatcatccagaggaaaatagcttccctgcgcctccagctgtccgtaaagccctataaagccattctcagatggaacaatctggtattccttgatagttccatccgcctgataggcggcctgatccatactgctctgcatccggaacggatactccggatcatagtacatggaaagccggttaagaacggtgtagcctaacccatctttctttactacatctacattcagctgatttctgttcctgcgccctccgggcgtgattacgatctgataggaaaagtctcctgatttaaagtaggttctgcacagttttctggcttcgtccagaagcactgtatcgtaatctccctctacatccttacctgctccgttctctgtattgttttttgctccgtcctctgcacggttctctgctttgtttattgcactatcctctgcactgttcgctgcactatcctctgtactgtcttctgtacttttctctgttaaagacagtgcctgtgaaggacggtccgcttctccgctttctttttgggcttctgctccggcagaagacagattaaccctgcccctatgtaagaaaatatagccggctccgacaaatgttgaaattataaacactgcacttaataccagtattatttttttaatcataatcttctcctttcattcggctttcccgcttggggggtgtgggggtgtgggggtgtgggggtgtggaggtgtcaagcatccgccaagtccgtcatttaccgataaggcgctaattttcttgatttgcttacttctcaattgaaataaacggagggaaggtatcggagctatcgcggcgctgcatcgtattggcatccacgtcaaaacaccgtccatcgtattcataatgcagttttccgtcctcgcagtaaaaacgatgttccgcttgaaaagcaaccggcttataacgcccgtcctgtatcggctgatcccggtacaaaacctgggattccgataatttcagcacactgttttcaagacgcacatcataaattccacttacgacagcttctgccggcacatttttcccggaagcggaaataaaacgaaaacagcctgttatggcgttcgtacttttccgcatagccagttcaaagcgaaacatggataccgagctgaaatcctttcttagtttatcccgctgtccttccttatcaatcagccatattttctcgttggatacaataaacatatcaatctgaaatccgctttgggagtatttcagattagaaaaggatatctggtcagagtatacgccctgcaacgcgccattttccaattcgtaaaccaactcctttgtaaacagcgttctgccatccacattctcttccataaagtcaataatttttttcatctgaaaagactccttatctgctctgtttcaaataactccttcatttcatctatacttctggtttcataattttcgccggcagctcgtcccgcatcactgtcaacagaaggataaaactgggcaaatgtatcatttcccatgtccacctgctttccggcccaatccccgacgggctcataatacgtcttttcgccgtcagactgcggcgacacccagaggcagaaaacaatcttgtcacctgcttgatcaagcggtactccttgggtctgatccaaaaccatattacctgcatcttcaaccggtatgttctgcagcatcatattgcgcactgtctccctgtctgtctttgcgtaagaattgatataatcattgacagaaatatagcctgtttgctggataactgtaatttctgctcccggtaaaagccggcctttgtatgtctccagaacacgaacccgctctttcacccatgcggtgcctccatcagcgttaaagttctcaaccaactccacttcaccatatatgatatctgatgaatgatttacgatattcttgtaatcagataaatcaatcgccggttctgcagaaacagtctgcggtataatcacagaatccgtgtcaatggaaataacgtatgaattttccggtcccagcccggatcctgattcttcccatggctcatccgatgtctgcgccacattggctgagcagccgcctgttgacagcaatgccaatactataataacagcccgtatatttttcattttttcctcccaaacacgatatgaaaacacgatataaaagcatgatgtgataatatcattttatcacatccgaacggcctcttcttttaattttactttacatttcacgtacaataacatcatggaggcgcttcaaatagcagacgtatttccatccgctaaagccactaaacaaaaagggagtattgctttatcaaatgcaacactccctatcaattataacactattatattttctcctgaatgaatgcaagaatttccttacgctttgtcacagacagcttatagctctttccagacttaagagtcaccttgattccggtgggaataatctgaacaagcccgcccacattacataactgtaccgattcaatatcagcataggggatttccaatatggtggcaaaaccgcccctgaatacgattctttgatttgtaagccagtatttaccacgtttctggctataaaaacaaagtgttttctcccagtaatcagatttaaactccttttcaactacttcaccttcatgtaattctaatgcatctgccatgatttgttctccttttatgtatataattgaataatccctatatcatatttttgaaagcgttttatcaccggacctgggaaaaaatgccagctgcgcactctccgcttttggtacagaaacgggtacaaactgaatactgtcctccaacagaccggtaataaagtctttggtcagaaccatctctttataatgtctgtatcacttattttccctccaactccttcatgccgccaatcatcaccttcagggacaagtcaaagctctcctccactgacagagaatggccaaaggcattgttgttgaccagcagacaaaagccttccaaaaatgcccgaaaggtacggattagatgattgcagttttcctcagaaatgttcagggatgatgtgattgcaaagcaaatggaaaacagcttttccgtgacgccctgcgtctctttatcctggtatttattataccagagcatcgcgctgaacacaccggggttttcggtcgcatactgatagaatgcccggcagaccgcttcccacgcagcatacccgtcagcacctgctgccgcttccagcatacgttcttccacctgtttccagccataaatcatcagttcacgacgtaaatcatctaaccccctgatatggttgtaaagggacggcggctgtatactcagactttccgccagcgttttcaactgaatctggtcaattcccattttgtttgctaactgtgcagccttctctactacaacatttttatcaagtcctgcccgcgccataacctttcctttcatcatctgctaaatacatagtaactaatcggattagttttgtcaagcgctgcttttttctgcaacaaaaatattatatcatacctacaaaaaattttcttgtatgatatgacactcattctcactgttttgcctttaacctccatgcgcctgctcattgtaccatgagtccaaaaaaatatgcggtcttttgagtattctcaaaagaccgcgtatttaccaactcttcacaaatgtttgacttgttgaaaattaatcttcaacactgacgatttctctcttgttataagaaccgcaagccttgcaaactctatgaggcatcatcagggcaccgcacttgctgcactttaccagatttggagcgctcatcttccagtttgctctacggctgtctcttctagctttagaagatttattctttggacagatagacatggtttacacctccttcgactgtttaaaaatatcctggataactgacatccttgggtcaagtggcctattatcgcagtcacaagtctcatggttgagatttgtgccacatctatcacagattcccttacagtcatcgctgcagagaaccgccataggcaggttcaaggttaactcattaccaaccagctggtcgatatccagtttataaccatttacgtagggctgctcgtccaggtcttccactcgttcttcatcactctggttcatgtccagttcctggtcaatttccagatggaaaggaactctcaccgggtcaaggcatctggcacatggcataatcaaaaccaaatcaatggttcccgctaaagccagcttcttatttccccgatttgttatcaccaatgacaacggtcccttttcggcaatgtcgtatacagtgtcggccagcccgaactgggtcatctcaagctcaggcgtatatgttttggactttccctcaacgggaaacagctcagataagttaattagcatattaacctcctaatacgcatctcttgcattatacataccattgcacattttgtcaactatatttccgttttttttccagaagttgtgtactgtttttcataccggtgtgtacctggagagtattgccggattttgttatttatattatccgatgtcctgtcccaggccattgaccgccatcccggaaaccaggacaaaagccggcgtacatgtattaaaatcacatgtacgccagctttttaccactccgttatacttatttcactaacgcaagtgtttctctggcaattgccagctcctcgttggtaggaataaccagtacgcttaccttggaatcaggagtagaaattacgatttcctgtcccctcttggagttggcctcgtcgtcaatttcaattcccaggaatgccagataatcgcatactttctttctggtaatcttgtcgttctcacccacgcctgcggtgaacgcaatggcgtccacgccgcacattgctgctgcgtatgctcccacgtatttagctacccggtaagcaaatgattccagagcaacctctgccttcttattgccgtcatttgcagcgttctccacatcgcggaagtcgctggaaacaccggacataccgtatacgccggacttcttgttcagcacgtttaacatctggtcaatatccatattctctttgtgcatgatgaactgcagggcgccgggatccacatcgccgcttctggttcccatcacaagtccctccaatggagtcagtcccatgctggtgtccacggattttccgttgaggacagctgagatgctggagccgttgcccaggtggcaaaccactgttttaagggagtcataaggacgtccaagaacttctgctgttctctttgatacatagctgtggcttgtcccgtggaagccgtatcttctaaccttgtatttctcataatactcgtaaggaagtccgtacaggtatgccttctccggcatggtctggtggaacgctgtatcaaatacacctaccatgggtgtgttgggcatcagttcctggcaggcacggatgccgatcaggtttgcaggattgtgcagaggcgccaaatcgctgcactcttcaattgctttaacggcctcttccgtaatcagggtagatgcggtaaatgcctctcctccatgaacgattctgtgtcccactgcccctacttcatccaggctcttaatcacgcctgtcttatcattggtcagggcatctaataccatctgaatggcctgggtatgggtaggcataggagaaaccgttacttccttctctcctcctgccggctgataggtaatctggcttccctcaataccgattctttcgcaaagtccctttgcaagtacagcctctgatgctgaattaatcagctggtactttaatgatgagctcccgcagttaataactaaaatattcattgatatctcctcctttattccggcttattcagcctgtgcctgaacggccgtaattgctactacacccacaatatcatctgcacaacaacccctggacaaatcgttaaccggctttgcgattccctgggtaacagggccgtaagcctctgccttggccagtctctgaaccagcttgtatccgatattaccggcatccagatccgggaacatcagtacatttgccttgcctgccacttcgctgcccggcgccttggaggaagcaacctccggtacaagggctgcatctaactggagttccccgtccagcttaagctccggataaagctcctttgcgattctggtggcttccactaccttgtccacgtcaggatgctttgcagagcccttggtagaatgggacagcatggcaacccttgcttccttctgtaccagcagttcaaatgaatcagcagatgatttggcgattgctgccagctcttccggattcggattctggttcagtcctgaatcggcaaaaataaaggttccctctgctccatattcgcagtccggaactaccatgaggaagaatgcagataccagctttgtgcctggttttgttttgacaatctgcagacatggccttaatgtgtcggccgtggagtggcaggcaccggacaccagtccgtctgcatctccgtttttaatcataagacagccgtagtaggcataatcggacatgatgatttcctttgccttttccggtgtcattccctttgatttcctcagctctacaaataaatcaatatactcctgagtcttctcataggtctgaggattgatcactgttgctcctgatacatccagtcccttgctgtggtctgcaatatcctccggtgttcctatgatgatcagattggcgatgtcctcttttaatatcgtttcggccgcctcccaggttctcctgtccatagactctggcagtactatggtctttttgtcagccctggcacgagctttaactaaatcgataaatcccatgataatttacccctttccttggtgtatttaagcatacgtctttattatatactgacagaattggagatacaagccgattttatccaaatattgcactttttcgtatacctgaggtctttctgtgtttattttccaccttttctggcggggcggcgggcggcgatagccaaaccgcctgccgtgaagcacagaaaacacaaaaaatccgcggaccacatgattgccggtccgcggattcaggtatctgatgattaaattttctcgtaacggtccacgttaatcacaaagatagtggcgccgcccacatcaactgtcatgggcatagttgcgtaatttaccatggtggtgcctgatatataaggcatgttgaccgttaacttctgatgctgtccgcattcctgcttaatcacatcaatcacttcctgtaccttatcatcttctgcaccaatcatcaaggttgtatttccctttttcaggaaacctcctgtggtggaaagtcttgtaacactgtaatgatgctgggtcagctggcttacaacatcatcttcattatcatttctcacaattgcatacactaatttcataagctgtacctccttggcgagtttatatacgttagtatagcacatttttcagttaagatctgtaatttttttgcaaatgtttcttaattcgcctcatgcacagtcaaacccataaaacagtactacccgttaccggttcatcagctctgggcggccggcttggttcccagagtcacctgcacgtcgtgctccacgtatgccccgtccaccagggactgtactgtgagtgtaacggctgctccgccctcatagtaggtgagcatctgcttcagttcttccatgctggtaacagactggccgtcaaacttggttataatatccttttcctttaaatcagaggatgaggctgctccgccctccacgattttatagacatagattcccaccggcatgccgtacatctgggatgtggcagcatcaatgttggttccctgtattcccagatagccctgggcatcctcggatacagccacacgcgttttctttgtcatcaggctgtttaagatatcctgggcctttgaaatcggaatggcaaagcccatcccctccacttctgtggaagctgtcttggcggcgttgatgccgatgacatttccgtttaaatcaataagggcgccgccgctgttgcccgggttgatggctgcatctgtctggatgaaggtcctgttaattcctttttcatctgtaatctcgcggtccagggcgcttacatatcccacggtaacggactggccgtatccaagggcatttcctatggcaatgacctgctgccccaccttgatatcatctgaattgcccagagtggccaccttaatcttgctcatggtatcggaggggatatcctttaactgcactgcgatgattgccaggtcagatgctgaatccgttccctttaccgctgcgctcacatccttgttgtcaacaaatgtaacctttaagtcggaagctccgtccaccacatggttattggtggcaatgagaagttccgtgtcagtctggttcacaatgatgccggaaccgctgctctgggctgtataggtctggggcattccgaagaaatcgcgctgctccacggtcatggtatcattgatggccacaatagacggcatggcgttttccacaatgcccgacacatcggtaacagcggatactgccgtggcgccctggtttgcagacgcctgtgcattggccggtgctgcctgtgctatctggttctgagcctgcgtcccggctaatgtgcccgcggttccatatgcgcctgtgagccggttccccaggtaattcacacctgtcatgaccccgcctgatacggctccgaaaaggacagctgccgctgtaattcctgccgctcttttaacaaatcgtcctttattggagtgattgcgctgcttatcactgcctcccggatatccctgataagtatttccgccatagcagtcctggcggcgggtctggctgccgtatgaaccgaatgcggcgtctggtccctgggtatgctgctctcgatgctgctctcgggaaccctggccttcctgggcctgtgaataccgggcttgtgaatactgaccctgcgcctcctggctgcgtgcctccggatccattgtccggtgtccttgcgtattctgtccctgccggttcctctcatcacctggaatcgtccagtttacggttgtttcaggtacatccctgtgttccatattttcatttcccaaaccattcatattcttattttcattctcgtacatagcaaagtctcctttcatacatttctctattttatttaactgtaagtgctgttttttaattgctcttgctttttacaattattaatatagccgccatttatggtggaattgtgaaacgattgtggagaatctgtgttctaattattatagatttataaactgaagattaacaaatgccgtctggacggaatggatgtttgcggatataatggacatgataaaataaaacgggaacgaatcaggacaggagtaaaggaacttgggacagccagatagtttggaacagccggcaaaggtaatcggcatcattgccgaatataacccgtttcacggcggacataaatttcaaatagaagaagcaaaaaaacggaccggcgcagactggtgcgtggctgccatgagcggcgattttgtacagaggggggagcctgcggtctacagcaaatatctgcgcaccagaatggctctttcctgcggagcggatctggtggtggagcttccctccgcctttgcggtcagcagcgcggaggattttgccgcctgcggcgtggccctgctcacaggactgggggcagtggatgtcctgtgctttggcagtgaggacggggatatccgcaggattcggacggctgccggtatcctggcgcaggaaggcggggacttttcctcacttctaagcattggactgcgaagcggcctcagctggccccaggcccgcagccaggccctgcttaagatggcggacaaagataaggattttcctctgaagagagaagaaatggacaaactcctgggctcccccaacaatctcctgggaatcgagtactgcaaggccatcctgcgccagaacagtccgcttattccattcaccatccgccgccggggacagggataccacgacaatgggctggagggcggacaggcttcagcctcagccatccggcggacacttaaagccggggtgccatccggggaagcgggcctgtttccatatgcaaaactgacgcctgaggccatgacgcacattcctccggaaatccggtccctgtacggccgggaacctgtcctggaggccaacgatttgtcagagatactgaacttctgcctcctgtccctgaagcgggaaggaacggattatacgcaatacggggatatgtcagcggaaatggcgcgccggctggagcactgccttctcaaacaggtcagctgggaaggccggatcgaacagcttaagacacgccagtatacctatacccggctcagccgcgcccttcttcacatggtcctcggcctgaccgatgccagggtacagtcctacaaagaggccggccgtgccccctacgccagaatcctggggttcaggaaagagtctcaggaactgctggccctggtaaagcagaaaaccgccattcccctgattaccaagactgccgacgccccccacattctcaccggaacagccctggacatgttttcacaggacatctacgcctcccatatccgtcagaccctgctctcaaaaaagctggaacagccggttcggaatgaatataaccagccaatctgtattttataagataaaaggcaaaatgacaggccccccggatgcaatgcccggatggggacctgtcattttattttcatatatatctgctaatatcagctgtctttagtttttcccccggactcccaaagctccggagccaggagctccaccacggcgggcttcacatgcaggaaatcagccagctcccgtatctggaggccattgtcccgtttcttcccctgacgcacagcccgaatcaatatattctttggcgtatgctccatatctataaattccagtatctgggttctgtatcccctgtattccaaaacctgggcacggatggcatctgtgtaaagggctgccatgcgctcttttatcaggccgtattggagtaccggccgtagaaggctgttttccatctgcccgttgagctcatgctggcagcagggaaccgataaaatgaccctggccccccagtttaccgccttttccagggcataatccgtggccaggtcacaggcgtggagggtgaccaccatgtccaccttctccactccctcaaaggaggcaatgtccccatgacaaaaggaaagtccctcatatccatactggcgtccaaggcggctgcaatgctctatgacatcctccttaaggtccaggccgacaatccgcaccggatatcccttcagttccttcagataataatacatggcaaaggtgaggtatgatttgccgcatccaaaatcaataatggtggactcccggtcctggtccaggttgggaaggatatcttctataaactccaggaaacggtttatctgcctgtatttgtcatagcggctgttcaccaccctgccctcttttgtcatgacgcccaaatccaccagaaagggaacaggaattccctcctccaggatataatgcttcttccggttgtgggacagcaaagcagcgcgttccggttcccgggaagccgggtttccggcaggcaaaatcctggccggccgcggactctgcttcaccttcacagtcacctttcccttcctgctcaccagaataagggcatttccaagaccggatgcaatctccgcctggcggaaggatccgtccagaagcccagtgacataatctgccgcctcatcccggtccagattgcggtgaaatgcctgctttcccgcctgttcctccgcctggaataccagcctgcccttcatgagcagaggccggattctggacctggagattttgccgctgtccgtgggattgctcatgagaatccgctccagagattcatttaaaaacagatccagcgcctgtttgatttctttacattcttcctgattcatgtccagctcctaatccagaagtttctttgcaagggcggtgagctggcttaatgactcgatggtgccaaccggccgctctgccctgccaaaaccatatgccgcgtgtacaaagggaatcccggccgcgccggccgcttcctcatccatatgggtatcacctacataaaagcagcgttccagatggtttctctgcaccaccatgcggatattatctccctttggaagtccggtattgccgtagcactcaatatcacggacgtattcccggaggccgcagctctccagcagcacctcaatatatccgctctggcagttgctgacaatgtacaggccatactggcggctgaggcacgccatgatctccctggtctccggatacaggactcccggatgtgacagcaggtaatggttctcataggtcatgcactcctccatcaccttcctgcactcctcctgggacagccccggaaacagcgtctttccaatatccatcatggtctttcccatattgtcatacatatcccgggccgtgatcctgactcccagatgagggtaacgggccagcacctcattccaggattcagccacctgggccgccgaatcccacagcgtaccgtccacgtcaaacaatatccctttattcatacccactaccattcctttcccatccatattcgcaggctttggctctgaagccatacagcacttgtgcacccctaattttcagcactgacccatccctttcgcagcaaatcaggatagggctccagatgggcataatcgttgaaccgctccagtgtaaaacggccggatgccccatcccagttaagctccgtaatgctgcaattttccaggttcttaccgaggattctccatttgttcatggggattcccaggcaatgggctgtcatggaacggataacgcctccgtgggtcaccacggcaatgcgctcataaccgctttctgtcatctccctgaacacaggttcggcgcgccggaccacatccccggcgcattccccgcccggatagggcagatcctcctccataagggcctgctgcgccttgaaatccctgtacttcaccgcgatgtcccggtcttccatgccttccatatggccaaaggatatctccctcagctcgggccgtatgatatgctctacattccagtagagattggctgcctgagccgtttccacggcccgcagcagattgctggaatacaccacctgtatattttcatgaaacaggcgctctcctaagagagacgcctgcctgtatccttcttcacttaaatccacatccacgttgcacagcttgctgcactgcctgccgtggcgtatcaaaaaaatcttcatctgactgacctccatccgtctgccttagcccggataaccttaattcttaaagctatggattggcgccggaattcttccgcccctggtaacaaaccgcctgcaggagaatgtgtttacaggcataactggcgcatagcccagcaaaccgccgaactcagccgtctcccccactttctttcccaccacgggaatcagacgtaccgcagtcgttttctggttcaccattccgatggctgcctcgtccgcaatgatgcctgcaatggtgctggagggggtgtctcccggtatggcaatcatatccaggccaacggaacaaacgcaggtcatggcttccagcttctcaattgtgagggctcccatgctgaccgcgtcgatcattccctggtcctcactgaccgggataaatgcgccgcttaaaccgcccacataggatgaggccatgacgccgcccttcttcacctggtcgttgagcatggcaagggctgccgtagttccgggcgcgcccacgcgctccagtcctatctcttccagtatctcagcaacactgtctcccaccgaaggagtgggggccagggacaaatcaatgattccaaagggaatgcccatgcgcttggaagcctcctgcgccaccagctgtcccacgcgggtaatcttaaacgcggtctttttgatggtttcacagagcacctcaaagttggcatccctcacctttgccagggcaaccttcacaacgcccggaccgcttacgccaacattgatgatggcttcggactccgtgacgccgtggaaggcacctgccataaacgggttgtcgtcaggggcattgcagaataccaccagcttggcacagccgagggaatcatggtccctggtggcttcggctgtctcagtcacgattcttcccatcagttccaccgcgtccatgtcaatgcctgtcttggtggagcccacattgacggaactgcatacgcgctctgtctgggacagcgcctggggaatggagagaatcaggttcttgtcagccctggtcatgcccttgctcacaagggcggaatagccgccgatgaagtttacgcccacttcctttgcagccaggtcaagggtcttggctatggtgacgaaatcctccgggcgcttgcaggcagaaccacccaccagcgcaatgggggtgacggagatacgcttgttgacaatgggaataccgaaatcagcctcgatatcctggcccgtggaaaccaggtcctttgccagagtcgtgattttcttataaatcttttcattgagagcctcaagattgctgtccacacagtccagaaggctgatgcccagggtaatggtacgcacatccagcttctcatgttcaatcatgttgtaggtctcatttacctcgtacatatttacgttaatcatagttctttcgtccctttcttctgaaattacaggcccgccctatcctctggggatgccgttagatacggtgcatcttcaggaaaatttcttcccgctgaatcttcacgctcacaccgatttcctctccgacctgttccagttcctgggctacttcgccaaaggacttggttatgttctccacgtccacaaccatcatcatgttgaaaaatccctttacaatggtctgggtgatatccagtatattaatctggttctcagccaggtatgtacatacgcctgcaatgattcctaccctgtctttccctactactgtaatgattgccttattcatcttcattctcctcacgcttttgttttattgaaatccggtgaacggatatccatacgttttacagatatatgatttcactcatgcagtccctgctggccacggaaatggaaaagtcagaagctccgtaagggcagtctccctcgtcaatctccagccgtacggtctcgtaggccagctcctcgtaattgttctccttgctgagatgtcccaaaagaatttttttcagtctgtcgtgaaggacgcagtttaaaagcctgcccgcattttcattggacagatggccgtggtcccctaagatccttcgtttcaggtaatagggataaggtcctgtctccagcatcctgacatcgtggttggattccaggagcagggcgtccagcccctgaagatggtctatgatatactggtcaaaatgtcccatatccgtggccacagccacggacttctccccgttttgtacgcggtatgccaccggattcgctgcgtcgtggtcaatcttaaagggcttcacggtcaaatcgcctaccatgaaatccaaatccgggcataccggagtcagaagccctttatcaaatttgcccaggctgcctgcggccgcaatctcatccagggtttcccgggtcccgtaaatgggaatctcatacttgcgcgacagcactcccagtcccttgatgtggtccgaatgctcatgggtaatgagaatcccgtttacatcgtttcccgtaagtcctatctcatttaacccctgctgaatccgcttgttgctgatccccgcatccaccagcaggtgggtgctgtcagaacctatgtaaatacagttgccgctgcttccgctggcaatacttaccattctcatgttttacagtccttttgtcttatttattgcattctgattttgttcttcaggagtctgcggatctgttttcttgtgtcctccacagagccgttgttgtcgataaccgcatcagaaaactccctgaatccggcctccggcgcctggctgtccataatgctttccgttttctcctgtgtgtaaccgcggctctctctgagacgctccatgcggttctccctcgatgtataaacataccacatttccccgcagttgtcacggaattcttttgagggaatggccgcctctatgaccaccagaggttcagggcaggcaagcgcctccccaaaggccgtattccataccaggggatgagtcaggcggtccacctggacgcgtttatcagggcagccaaagattacctgggccatggcaggacggttgatggttccgtcctcattcagtatggacggccccaggaagtccaccacagcccggtagctctcctgccccggctgcatcaaatcctttgccacctgatccgcctggatgacacggaagccatactcctccttcagtatctccagcacccggctcttgccggaccccacgccgcctgtgattcccaatatgaacttaccgcctgcggggaatgcatttcttatattttccatatcctgccgctgccccttttgatgtctttattttccgtgctttgtgctttgatctcttcctaactttcctacttggcgtcaaaccaggattttcccacttccgcctccacttccagtgaaacccttaaatccgcggcatgcttcatcttgtcggtcagaatctccttaaccgcctcaatctcatcccgggccgtctcaatcagaagctcatcgtgaatctgaaggacgattctggatttcaggccgcgctttttcagctccctgtccactgcaatcatggctatcttcatgacgtctgctgcggttccctgaatcggtgagttcatggccacgcgctctccgaactgacgctgcataaagttggcggacttaagctcaggaatgggccgcctcctgccgtacagggtcgtcacgtagccctgttccttgccctgcttgaccagtccgtccaggaatgtcttaacccccggataggtctcaaaatatttgtcaatatactccaccgcctccttgcgggagatgctgagtccctcgctgagtccaaaggcgctgatgccgtatacaattccaaagttcaccgcctttgcgttgcggcgctggaggggagtcacttcatcaaggggtacatggaatacctgggaagcggtgatggcatggatgtcctgggcggaacgatatgcttcgatcagcctctcatcccctgacatgtgcgccaggatgcgcagttcaatctgggaataatccgcgtccacgaacacacagccttcctttggaacaaataccttgcgtatttccctgcccagggccatgcgcacagggatattctgaaggtttggctccgtgctgctgatacgccccgtggccgtaatggtctggttgaatttgccgtgaatccttccgtcctcaccgatgtaggctgccaggccttccgcataggtggaattcagctttgtcagctggcggtagtccaggattttctggaccaccggataatcaggcgccagcttttccagtacatccgctgccgtggaataaccggtctttgtctttttgcctcccggaagctccatctgttcaaagagaatctcccccagctgcttgggggaattgatattgaattcatgccctgtctcctggtaaatttcctgttccagcttggcaattcccaccttaagcctgtctccatattcctttagctcagcccgttccaccttcacgccctcctgctccatatggaaaaggctgtaaatcaggggcatctctatatctgtatacaagctgtacattcccgtatcctttaactggcctgccaggggtgcagcggccttccacgcggtatatcccatgtagcatacacagtctacggcattcttctctcccctccacagggcatctcccagatcctccttggccagcaggtccgccctggagggcacggtaagccccagataatccctggccagatcgtcgtaggcataggtatccttaagaggattcaaaagatatccggccactcccgcgtcatacacaggatccgtatccttaagttccaggtacgcaagcatggattttaaatccagggcccagagctctctgacgcctgggttatcctgtccctggctattctgtgcctggttatcctgttcctgatttctcccgcacagcgccctgagctgttccagaagatactcgccggtaatctgctctcctgccgccagacagtaaatatcctcctcgcccaggcacagggccaggcctgtcacgggattcagcccggatctggccttttttcctgcttttacttccccgttctcgtcaaagctgaaggacagctgctctgctgtctcctttaaagccccgtccctgccaagtatgagctggaagccaaccagcccagcctctgctgccctgctgaatattttatccgctgtctttatatccttcacaagggtaaaatgggtttttatatcaggcgcggctgcttcctgggcagcggttttatcaaaacgggccaggatggacttgaattccagacgcttcatatactggtaagcctccggggtatacaggtcctcaatccgggcgtcctcataattaaattccacaggacagtccgtacagatggccgccagcttcctgctcatctgagccatgtcataatgctcctccagagccttcttagccctggggggcctaatctcctccagatgggcataggcgttctctatggatttgtactgggcgatgatgctggttgctgtcttttccccgatggaaggcacccccggtatattgtcggaggcatcccccataagggccttcacatcaatgaattcctccggcgtcacctgatactcccgcagcacatcctccgggaaatagtccttgatctcggtcacacccctgctggtcctgggaatccgtatcttgatgtgctcatcagccagctgcagaaggtccctgtcacccgataccacggatacctggataccctgggcctgacaccgctttgccacggttcccagtatatcatccgcctcaaaccccttaagggtcatgataggaattcccatggccttcagcacatccttcatcacaggaacctgctcatgaagctcctggggcatgggctttctcgtccccttataggcgtcatacatctcatgccggaaggtaggttcctttaaatcaaaagcaacggctgcgtggtccgccttttcctcctccaatatcttcagcatgatatttaaaaaaccgtacactgcgttggtatgcagaccctccgaattcgtaaggtccggtaccccgtaaaatgcccggttcataatactgtgtccatcaatcaaaaccaatttgtccattaatatgagttcctttctgtctctgtcaccacatcctgaactgaagcaccagcacggccagcacggcccagaagcacagagtgttcaccgcatagcgggctgtttccaggattcccagggtgtgcaccctctgccgggacagctccagagctgtctcaagggctcccttgatgttataggtgcctgtttcctggtccagctggcggatacccacgtccactgtgaagtaaatctccagctcttcccggcattcctcgcaggtctcgatgtgttttaagaattctttcagttcctcgtccgtaatgctgccgttgatatacggcatcaccagacgctccgcttccctgcaggtcacagccagcacctcctgtctatcattttaatccaattcttcttacatcatacaataaatcagcttacttttcaatgaaagattaggactcccatcctccggttccggacagactaccccttcctgtattccctgggagatacgcctgtcagccgccggaacacatccccgaaataattgccgtccgagaacccgcaggccatggccacaccggtcacagaaaggtctgtattgcgcagcatatcagatgctttctgcacgcggatgtagttcagatactccttgaagcaaaggccggtggagcttttgaatttcttagaaaagtaggtggggctcatattggcaaatgcagccacctgccccagcgtcaccccttcctggtaatgctggttcatatatctggccgcacgcaccatggcctcctctgcctcctccagcgcgtgtccttccctccgggcctcctggcagcggcccaataccaccagaatctgatgcaggaggctgcaaagctgtatctggcagtagctgtcgccctgcttttcctcatcctgcatctgagccagcagttcctctatcttagggcggaattctgaaggaatggtgcgtttgggctgtgaaaagatatggccaaaggcctccctcccgcaaaggcttaaaaaggaggtgaccgtgtccctggagaaatagatgccgaagcgctcagcctcccagcttggctcatacagggccttgtggacctcaagaggcggaatgatggtcatgtcacccggttccaggtaatagatgtcctggttgatgaacattttacactttcctgataacagataataaatctcatagtaagaatgataatgaggccgcttcatcacaaagctggaggaccttctgatacggctgacctgaacgcttttatcctttagaatcatggtattgctcatatgcggtctttctccttccatttctctttcatagccggaccgtcatggcaaaaaaactgtactttttagaaaaaatcccataaaatccgtattattccatctgtttttgttataccataaagccaaccaaaggtaaacaaggaatcagacaaggaaatggaggaatgaccatggctgaaatgaccatgatatccatggctgtaatggctgccacacaaaaaagccgctcctttttggaagcagcagccgggcgtaaggacctgtatctggaggaaggccttctggaagaaggaactttggagataggaactctggggataggcactctggagaaagcagacgtcatatatcttccggattacagcagtctggatttccggcaggtgcgtaaacttctgaaggcaggaaaacacgttctgttcggaaccatgggagctgcggatgccggcagcctgaaggcgctggcacagacagccgatgaacatggcgcagtgctgttggatcacatccaccttgcatttaatccatgtatggcatcattaaagacagcgctgacatgcctggggcccattgggcggattcgtctccattcctgtgagtatgccttctgctgtgaggggttacgcatttctcctgtccgtccccccgcctgcgttccgctgggaggcgcattgtttcagaggggcgccgactgcctctatccccttgtgcatctcttcggcataccggaacagatggatgcccagatggtgctcacggaacatggaatggacgcagccggcactgtcaggggatatctgggcaccgcccgagtggagatagtctattccaaaatatcaggaagccatgtaccaagcctgattgagggagaaaggggaagcctgttaatccctgatttacagaatttaaaggaagtgacatataaaaaccagtccggagataaagaacagctggtttccttttccgatgaagcctgccgcgccagggaactggaccactgcatggcgttcataaagggaaaatgcagctggcagcgtcagcttgcatcctccatacagacgcttcagatgatggatgaaatcaggggacatcggaatttgtctgcggaatataccgtttcctcccatggcacctatgcctccgccatttaaacaagcctccgcctttgtctgtcagaaaaaggccggacgcaaaagacccacacagaatcacttctgcatgggtcttttcttgtctcatgtgccgtcaatctgacacgtatagatgccggcagcgggacttgaacccgcacgcggttacccgcaacagattttgagtctgcatcgtctgccattccgacacgccggcttacaacgctgattattttatcacaggatacatattttggcaagtgttttttcaaaacctttgccatttttccattccggtactataataaagcagataatgaaataaagaaatagaataacagaaaaggcagggtactctttcatggctgtgaactacttcaaaaaaatcggggcgcgccggctgctcatcatgattatgggaaatgtatttcttggaatgggaatcagtatattcaagctgtccggcctgggcaacgaccctttcagcggtatggtcatggccctggccaatatactgggcttcagctacgcctcttttttgctggtcattaacggcggactctttatctttgaactggctgcaggccgcagactcataggaatcggcaccctggtaaatgcatttcttctgggatatatcgtcaccttttttaatggtttatggcccctgctgtttcctgtgccggataccatgctcctgcgcgtggtcaccgtgcttgtcggcgtcattgtcaccagtttcggcgtgtccctgtaccagacccccaatgcaggggttgcgccttatgacagtatttccctgattactgcaaagagccgccctcttatcccctacttctggcaccggatagccacggatgcagtttgcgccgtcatatgcttcctggcaggaggaatcattggcctgggcaccctggtgtcagccttcggcctgggccccattgtccatttcttcaatgtccatgtggccggacggctggtaaaagactgttaaggcaggtatctgcccgcccaaaacagtccctccggcccttcccttacctgattgcctgctggccgctggccttatatatttcataccattcatagtgctccagacggatgtccagggccttaatggccgtatccagcctgtccagcctgttgcttcctgaaataggaactgcccctgccggatgatacataatccatgcgtatatgatggcagacgggtctgcgtcatgcttctcggcaatcctttttatggttttcatagccgcagcgcacaggctgtcgttgggatcaaacattctcccccctgccagaggcgaccatatcatgggatggattccggacgcagtcaggtcatccatcattccggaattaaaatgttcaaagcacacagggttccactcaatctggttcgttaccagctgtccgttgacagctctgttaagaccgttgaatttatgagggtcaaagttggagacgcccatttcccctatttttccttccttcttaagctctgtcagtgcctttgcagttgattcaaaatcaatgcagggatcctcacggtgaatcagatacaggtccagatggtctgtgtgaagccgcttcaggctctcctcacaggactgttttaccctgtcgtatcttgtgtcataatatccaaatccgccctctttgaaaataccggttttcgataccagctggattttgtttcgaatggcgcgatcctgttcaaaggcctgccccatcagcgtctcacagagcgtgcctccgtagatttccgccgtgtcaaaggtggtgactcccctatcaatacattcattcatgaatcgggccagttcttctgcagaccatttccagctgtccagcctccagaatccctgaaccacggctgacaatgacagcccttccgacaatttaacttttttcacgttaatcctccttaatctaagaattttttctcatatccagggccactgcactgcatatgataagtccctttacaatcagctgccagttggaattaactcctatgtaggcaagtccatagctgataaaagtaaatatcagcacaccgatgatgacgccggatacctttcccactcctccgctcagagatacgcctcccaccacacaggaggatatggcatcaaattcatatgcgtttccataggccgagttggcgcctccggtcctggccacttccaggatacctgccagccctacaaacatggattcgatgataaatacagtgatgatcaccttgctgacatttataccggataccttggccgcttccggattgccgcccacgatataaatgttcttcccaaacacagtcttgttgagcagaaaccaaacgccgacaatggcaatgacggcgatgaccactaaaaaggaaatttggccaaataccttaaagctgctgagcacagtcaagtcattccttatgcctccgatgggctgggaattgttcggcttctttgcaaagtacagacagttaatgccgtagacaatggtgctcatgccgaatgtggcgataaaaggcgccatctttagctttgcaatcataaagccgttgacagctcctatcacggcaaccagagccagggtcatgatgacgggaatgataatgggaagttcaggcaggccaggccagaacttgttggaatagtccgccatctgggacagggatgccaccataacggctgccaggcccacctgacggccgccggaaaggtctgttcctcctaagagcagagcgaacatcagccccaatgcacatatcattttaacggcagactgggtcagtatgtctgtcaatactcttatttgcagaaaagaaggttcgattatgataattcctataatcatgaataccagcacgatgataagagctttatccatcatgatattctttatgtcttttgctgtcaactcctttattttcatactgacactccttctttcgttttatcttcaaattgggtggcgtacttcatcacctcaacctgggtagcctccgttttgccaaggatacctgtctgctttccggcgcacataatcatgatacgatccgacattcccaacaactccggcatctcagaggaaaccataatgatcgcctttccctttttcactaaatcctgcatgattcggtatatctcatatttagcgcccacatccactcccctggtgggttcgtccagcataatgacatcacagtttgccagcagccatctgccaatcagtaccttctgctgattccctcccgacaggttcttgataagcgtttttgtcccggccatgcggacatccagatccgtgcacaccttgtcaacgctgggggacagttttttcgtatggatgtatccgaaaacattgcctgtcagtttcttataggcaaccgtcagggcgttgtcccagactgacagcatgggaatgattcccgttgccctgcgctcttctgtcagaagggcgaagccgttgcgtatggcatcctggggtgaatggttgaccactgtttttccattgacagtcagttccccgcttacaattcttcgcaggccgaatatggcttctatgagctctgtcctctgtgcccccaccagtccgcctatgcccagtatctcccccttatgaaggtcgaaggacacgtttttaaaggatcgcgggtctgcactggtaaagttctttacctgcagcatcacctcatctgttcttgcgtcctcgcacaaaggaaatcgctcgttcatctttcttcccaccatttggcctatcagctggtctatggtaatgtcctttatatcccatgtgcctatgtactggccgtcccgcatcactgttatctcgtccgctatctcaaatatctcctccagcttgtgggatatatagataatagagcgcccttcctttctaagcttgtcaatgattttaaaaagatgctgtgtctctgccacagtcagtgaggaggtcggctcgtccataatgataatttttgcattatatgagacagcctttgctatctcaattgcctgcatctgtgaaacggagaggttctttgcaaaggttgtcacgtctatatcaaaatccaaatcccgaagcaggttcctggtcttttccatcatctggttttcatccaccacaatgccttttgtctggaacctgcccgcccatatattgtccaccacattcctgtaaggaaccggattcagctcctggtgaatcatggaaatgccgtttttcagcgcatcattgggatctttgatatccatgacccggccatcaatttcaatggtaccgctgtccggatgatacaggccgaacagacacttcatcaaagtggatttgccggccccgttctcgccgattaatgcatgtacacttccaggcttcaccgcaagcttaatattgtcaagggcttttactccggggaaggatttagacatatttgctatcttcagtctgtattcttccatctgcatcctccagattccttattcggattgggccactgccagcatgtcctccagggttgcgcttaaattgctttcatcaacaatcacatacggtacccatacatattttccgtcaaccgtacagttcacgcctaccacgtcctctgtgatttccgttcctgcatgtactgcctttatcacattgatgatggcgtcagactggctcttcctgtcattcagcacagtgcccagaagggaacctgccttcattgcctccagggcgtcgatattagcatcaattcccacgatgggaacaaacttctcagcatcccctgagttatagccattgttgatgcaggcctgcaccgcgcccatagccatggagtcgttgttgcagaggacaccttcaatcccgtcgattccgtaagcggtaatccacgcattcattttatccagtgcctgggcctggtcccagttggcggtatcgcaggcaagaatctcatattcgattccgttcttttccagggtctctttatacgcatctgtgcgaagtgtcacatcctgctggccgatttctccctgaagaatgaccagagaaagttttccgtccccgtttttatctgcaatatctttattgtcattccagtagttaatcagtgcctgggcgcacatttcgcctgactgtttggcctgggcgcctacataccagatgttttcgtagcggttcatggtatcttccatcggctccatattgaagaatacagccggcacgccgtcagcatcgcatttcttcatcatgttctcaatgctctccctgtcaggcgcgcatatggcaaccacatccgtctttttgctcagggccacctctaatttggaattggccgtggatacgtcatttgccgcgtcctgcatatccagggtgataccgcccgacttttcagcctcgttctgcataatgatgcggaatccgctctgaaactggtcgtcaaaggccctccagataacagtggccttcatctcttcctgggcctctccctgctgggcggcactctctgaatttccggctgattcactgcctgccggagctgccggcttggtctccccctgaccgccggagcaggctgttaatgtacccatcatcacggctgctgtcaacccacatacgaatctgttcatgctttttttcataagtcatcttctcctttttgatatattaatccatcagtgcaaattctctcatctttcccttaataaactcccttgcgcaggcctgtgaattgacaaacatgcctgtattatacttgaagtccggcttctgcttcatatcctcaaaggaattggcaaccgctatcaatacatctgtggcaatattgatttttctgattccgttcctgattgcttcctgtacctgctccttaggtgttcccgaaccgccgtgaagcacaataggaacatccaccacatcatgtatctttttaagccgttcaatgttcagatggggagccgccacatatacgccgtgctgcgtcccgatgctgacagcgatacagtcaatgcctgtgcgctccacaaattcctttgcctggtccgggtctgtctgggcagattcagggtcgccttccaccttaaagtttccttcttctcccaccagcttgcctaattccccttccaccgtgattccgtagcagtgggcataatcagccacctttttggtcagcgccacattctcctcaaagggaagggatgagccatctatcatgacggaggaatatccggcctgtatggcctgtacgcattcctcatatgtacggcagtggtccagatgaagcgcaacaggaactttgcagtcagctgccttcatggctcttttaaccgtatccacagtcccctcaaaaccgcccatcaaatcgcagcagtccgtacctgtgataaagatgaccggaatatccaactctgtacctgcctcaattgctgccaatgcagtttcataggatacagtcacatatgcgccataggcaatgttcctctcctcagccatctccaaaatgtctttcatcggtgataatttcataagtcttcttctccttttattttagtttttatggtgattgtatatgtacaactcgtcttcatagggcagtataccgcccgccgcccccatatgctggacactgtgggaagcaactgagcctgcgaatccagcactttcaaaaaatgaaagcccgttgaccaggccggccatcagcccggccataaaggaatcacctgcccccgtggtgtccacggccctgatccctctcgggcattctatatactgctccctgataaaatctgtggcatagcatccctttgaaccaagcttgattccaaaacaggcaagtcccatgggcttaaaggcgctggtgatgtccggtatctcccggcatccggttatggccgaagcctcctcatagcttgggaaaaaaacatctgtatagggcagaacctccttaaacatatccatccagcagctgcagacagacctctggttaatagccgcatccatgaccgtcatcctgccatgtgccttggcccgcctcaggattctggcaagtccgccctggttcatccggttaaagctgcaagcagaaccaatgtatacaatatccgcattctcaacagccttctccggcaggtcactgtcatccacctcgtcaaaaatcgtcacatctgacaggaaatgcctctctccattttcctcaatcagtgcaaaactggatgccgtcgcatggaccgggtctgttaccacatgtgaaacatccattcccagcttcctgcattggtccagaacaaaccttccattcaggtcatctcccacccgtcccgccatggtgacaggaatgcccagacgtgataatgcgatagctgtattgagagcgtccccgccgcaggcctgtaccggtttttctatcatggtgcagtccctgcttaaggcatcccggtccaccggccttaacaaggtatcgcataccatcattccaaaactaagcaccaccttttaaaccacccctccttcatccatatgtccgtacatacatataattgcacaatgatgtatatttgtcaagtagttgtggcaaaattataataaaatgttattttttcaaa

SEQ ID NO: 3226 - DNA, 1833 bp, Unknown
  gut microbiota DNA sequence
attcccggtgttttacagcactctatttttacatgcttacattttatgaatcattcttggctaaccaccataatcgagtaggagaaatttctgctttcgcagaaatttcgacctctcacaccaccgtgcgtacggttccgtacacggcggttcaatcaacttaacaagtaacacacctttcggtgtagtaatctaacattgagattagtccaaatgacgctaatctcttgttgtttattgcctcgcagacatcggatgctctacatactcttgcgtacccttttgcatacgccgtccgccgtgctgcccattcaggtacacctagctttttcaggttccttgctcggttttgtggagttttccaatgtttccatatacacatgcgtatgcgataccgaatgcttccgtctagccttgcacagattggtttcatacttcctatcttgtagtagttaatccatcctctgatgagttcattgagtttctgtaccttataaatgttacttactccccagcttcgacaagtaagctgtttcattcttgccttaaactttgctgccgactttgcatgtggtttcgccttgtattggtgtgctctgctgtcaaagtaaaatccatatccaagatattttattccttgcggcttgtctaccttactctttgttgtatttactttgagtcccagtttttcttcaataaatcgggtaatgtttctcatcaccctctttgcagacatttcacttccgaccatgttaatacagtcatccgcatatctgacaaagttcagccctctttgttccatttccttgtccaattcattccgcatgatgttggcaagaagcggtgacagattgcctccttgccgtgtccctatcactgattccctgtattcatcatcctccttgattccgctggctggaattttcctgatgattgatattacttctccatctttgattgtcttacccattagcgtcatcagcttatcatggtttactgtgtcaaagaacttttccaagtcgatgtcaacaatccagtcatagccgtcattcattctatcaagttctgtgatgattgcctgctgtgcacatctattcggtctaaatccataactgtggtcatggaattgttcctcgtagactggcgttaacacctgtgctatggcttgttgtacaaatcggtctgttactgttggtactcacaggtttctgactcccccgtctggctttggtatctccactctgcgccgtacgacttgcagatatgccgcattgaggttatctctgcttagtatctgctccattagactacttgtgtccatgcgttctttcctttccgtctcgcttgaatcgaccacctttttcccgattgggtacggcagatgttgtcttttctgcaatacgagacatactcaaacttattgattgttcaccccttcgctccatttccattacagatacttcttcactactatgggttctgctgacttctcacagttcgttgttactaggctaatgaaacctctatgagacctccacgcttaaggtgcacgctctttcccttcatctatccgccacatttactcctacttccggcaactttcggactttatcttcttttgcagacttatccgtatttcagagccttatatgtgattcctgttcgtcggaccaaaggtttgcctacagcttccttccgattccacctcacgatggacacccttgctgttcagctatacacttcctcgttgcctaggcgtgttcgggactttcacccgttagagcgcgcccatggcgcgcaaacaaaaagagccggcattaagccagctctcct

SEQ ID NO: 3227 - DNA, 3541 bp, Unknown
  gut microbiota DNA sequence
gttaagaaaccatacttacgaaaatggtatctttccttaatcaaataccggagaaagtatcattttttacaatatttattcattattgggaatcctttgtcccggatccagttttcagatgatttttttctctcttttatatataataaaggcagtatttttcaagaaaggggcccacctatgtaccaagtaatcattgcagacgacgaagccaagatacggagcggactggccaatctctttccatggaaccagctgggttttgagattaccggctcattttccaacggcagggatgcctatgactttgccctgtcaagcccggtagacctgattctctccgacatccgtatgcctctcatggacggactggagctgtcggaacgcctgctgtcccgtaaaaaaataaaaatcatatttttcagcggttaccaggattttgattatgtgcggaaagccctgcgcaacggcgtctttgattacctgttaaaaccagtaaaatatgaggacctggcagactgcctgacccgggtaaaggaactgctggacagtgaacagggccaggacatgccggaggtctgtgaaagcctgagctactatgaaaaaattatcagtacggtaaaaaactatctggacaccagctaccaggacgctaccctggaacaggctgccaggctggtgtccttaagccctaattacctgtccaaaatcatgaaggagcactcggataccagcttctccgattatctgttaaagacccggatggaaaatgcggcccgcatgctgagggatatcggttacaagcaatatgagattgcctaccgggtaggctatgacaatcccaaaaatttttcccgggcattccaccagtatttcaatatgacgccaacccagtaccgcaattgcggcggccgtcctgaaccgcagctatgatgtggtctggctttccctacccggaacaccccaagaaggaactgaaaaccatgagaaaacgcaatttcataaaaagctttttatattattcagccatcatagccatacccatcctcaccgtattcctggtattcctggcctttgtctttcagggtaaacagcgtgaaatccgtgaggacgccgagacagcagcccaggccgtaagggataactactccctggtcctggacagcgccgccacccagtacgatatcctggccaggaatcccaggctgtccatctccctgcggggatttatctcccataagcagattggctatctggacgtgattctgaccaacaccatcctttccaactttaattcactgaccaacaacgccccctatattgcctctgtgtactattacctggatgggtatgattccattctcacctctgacacaggagggactacacggctgtcacagttttcagacctgagctggaaggattcctatgaccactctgatgaggacgaatggctggaacgcagggaaatgcaccagtactcctacacgcagccagtccctgtccttacctactttaaaaagctgagcatgtttaagggcgtggttatggtaaacatatatgaggaacagttaaaacagcttatcaataccagttcccagctggaccgtttctttattctggataaggacgggaatttcctgctccagggaggcgcccaaaccgcccagctgtccccggaggataaggatttattggtcagccgcttggaacagtcaccggacgacgcctaccgcgggtgggtagacttaagccgtggaaaatactatgtgagaatcattccggctgactgcgggacttatatcgcagcctgcatcagccactccaactactatcaggccctttacaccctgctgctgcagtttctgatggtcctggcagcagtgatttccacctccctgtggattgcttataccattaccaaaaagaattttcaacagattgattatttcgttgaagtgttctcggatgcggagcgtggtgtatttaaccctaaaaagcccgcgttcatcaaagatgaatacgatataatccttaacaacctggttcagctctttctgaaccagaccttccttcgcagccagctggctctgaaggagcaggaacagaagctggcagagatgacagcccttcagctgcagattaatccccattttctgttcaacaccctgcagaccctggatttcaaggcaatggaatatacacataagcccactgcggtaaaccagatgattgaggcactgtccgatatccttaaatattccctccagaatcctcattccatggtgaccctaaaggatgaaattgattatctgaaaaaatacgacagtattcagcggtaccgctatgaggataaatacatcctctattatgaatacgaaaaggagctggagagcatccccatcatgcgcctgattctccagcctctgattgaaaacagcctgtaccacggcatcaagcccctggaaggctcaggctttatcaagctgcgcattgtgagaaggggcggacacctgattttttctgtcattgactccggggtgggcatggaaaaagcagatatccaaaaactgtatgaaaagatagccaatccgggcagcgagaatatcggccttaccaacgtaaacagccgcctcatcatgcgctatggggaatgcgccggacttaagatactcagcaaaaagggaatgggcacatgtatttcatttcgtatatcaatagaagaaatagcgtgttccgtcccgcataaagacaccaagacgcaccagccctccaaatcagcagtcatatttcaggacatgccgaataaaatataatatcacccttgaaaggagcacttacataatatgacgatctatccaatctgtaccaccataatgaaatacaggattatccagacactggcggaagcctattacagataccgagtaaataaaccatgtttcatcatgcgtcagaataaccgctggacccttgtgaccatggatagatgacatcatatgacctgcacgggaacttcatatccataaacagcaaaggacgctgtcctatgatgtgtgattcaggcatgaaatctgagcctgaaactccatcataagacagcgtccttatataattttctcaattttccgttgcaattttaggattccttctttttctttccaaggaccaaatatacggccatcagcatccccgaaagaatgaacgataactcatgggcactgcttcccctgtcacctgtcttcggtatggcagctaacggtatctccccatcgtctatgatggccattgactggctgaatgctgccgatgcatccgctggaagggatgcaaggggaacctgtgaggattcaatcacattctgctgcgcgcctggaccgctctgggcatcagtcccctgatatctgcctgtgccgccggacgttgtggtggttcctccgcctgaactgccggaaccctcagagccttgggacgtattcgttgtgccgccggcggatgaacctggggtatctgtatccgctgtgtcgttcccggacactcc

SEQ ID NO: 3228 - DNA, 29158 bp, Unknown
  gut microbiota DNA sequence
tttgaatcgttatctggtttttctgaggaatcatttcctgaggaatcattgtctgtggaaccagtgtctgtggagccgtcacctgcggaagtactattatagtaataatttttaaatgtatactctatttgatatgcggtgccaaatttggaaatgacaccgtccacagccggctgcataatcggatctcctatatccggtacttctcccgggcacattgcatgccagttgccgctgtcttcttccatcagcatatgcatggttttaggggtattcacattccctcctgcatgcagactggaaatcatataggttgtgctaactggatatgcttttaaatactggtaccacataccctcctggctgtcaaaggccgcgtacgcattccagtccttcaaagcgtcacttcccgttaaatatggtatgatttccatattttctgtgctgtctactgttctgaagtatatatgcaggtataaattctttggccgcttgttatttgggacattgtctttttccagtctttcacttacgatgccggccaaatcgccaaatccttcttccgatgccaaaggccacttagaagtaccataatggtcttctaacagcttcgctataatgctatcattggttacgttattattcgaaattcccaataaagcccgccgttgctcaaaccggtcttttctccccggagtctcatcgtattccctgcactttgtatatgctctcattaatacggcggcccgctccatcagcgaaccatattgattgttagaaccataaccataggggaagctttctccctctccctccgtgccgaggtcaatgtctgtttcaatccaatcaatttttgttctagctgtttccgttacccctctaaactcgttataagtatcctctatcgtctggactaccctgtattcagctgacggccctacattccctatcttcatctttccgttgggttttagattgaaggtataggtattggtgtcgccttctgttacagcggttgtattatattcctcagccccaccatctcctgtcagcagatagagcttctcattcttattcttcctgctgtctgtgatgctgactttataggtgtattcgactttttcagcaccttcactgccttcctgcaattcattggcaatcaccagataaggtgaggtcttaaatatagccgtaaatgccgagaaatggtcagtctggaaatgaatctgtccaacggacgcgcttccgctcacatccagttcctggcgtccctcgctgtcaaccgcaatatcgtctgctgaaatgccatccagcacaggcacctgggctacggcttctgtttccccgctgccttccagctccgcctttgcagatacggcctggacctcctgggtaggcgtctccagatggagaatttcaatctggtccgcctccatgctggccttctcaatccgctctccgctaaaggataccgtaacaagattgctgccgtcctcggcccagctgttatctaatttcacgccgtcatacataaggttgatgtcatatgcaatgatggtgctgaccactgttccgtcatcagactcagcatccactttttccgtcagcgctgattccacctgctctgttatctcctctgcctgtatctgcgtgtcggcaggcagcactccttcgggagcagttatcctgattgtaaccccattgacctccactgacttgtcaaaagcaggatgttccaatgtctccagggtgtatacctgtatgttctgctcctcataaacctcggatatggtataccatgctgtctgtgatccgtccagctcatccgtaaccgagtctgcttccaaatcctcatcattggcagtcacattgtcaattgtatatcccaactgggtcttgacgccaaaggtcaggctttcgccttccttcacgcctcttgtcccctccataatccgggcactggcctcagggaaactggtgtatgtcaccttataaccgtcaaaatcctccaatgcctttaactggttcaggcttgtggtgtaaaccttggctgtggaacaataccccatgccagccaaatcagaggtgctggccttcttagtatcatcctccggcacaggttccggagcggtctcctgctctgactctgaaggaagtgaggcatctgcggacggtgctgttgatgtttccgctgaatcgaaagatggctcgctgcttccggccgtgctgtccgctgcctgcgtactctcaggtgcgcttccctcatcatccgcttttgtagtctgcacttcgtctgtatccggcacattcacttccgttgttggggcagccggttccctggtctcttccgcagaaggcttctctgtttcttttaccgtctctgtctctttttctttccctgtctcagctgcttcttctgtctcctttacttccttatgctcctctttctccctgggctcagtctccttctcattggaggcttcttccttctccggcacgttttcctttacatcggcggaatctgccggactgccctcctctttctcagatacaaccggggcatcatgacgggaaatggcagctgccggcacagcgccctcttctttcttatcctcatccttatttgacttttcttccctgtcctcctgcttctgggtgtccttatcctggtccgcaatatccttttccggcttctcatcagaaccagacccgctgttcttttccggtacctctgcctttgtatcggcagcattgtctttctcagtatctgttccctgagcatcgtccggcggcacggcttctgtatcagctgtactgtgatctgcattgccgtctgaaccgtggtctgtattgccggccgaaccaagagacccgtcctcaggccgtgatatttcttcctggttttcgccgctgctttcactgctgttttcgctggcatcttggccgctgtttccactgttttcgccgcttccgctgccatctgcgctttcctccggcagagttgactccccggtgccgtcggcgccgctttcaaccgatgtctcagattcggaggcttctgtctcctcctgggctggctttgatatgatatctacttcctcatcgccaaatgcatcctcataactcctgatggtgacgcgctttgtctttttgaccttttctacaccgtcatccatccgtgtgatttccgtggtgcagctgatggtctcctccccgttattcacataaagcaggatgatttcctcgtccccggttaccatatacatatcgccggcatcctccggaaggcgcacaaatacacgcagctccgcttccatgctgcttccttccatctccggatatacctcatacacggcacccttcgtaccgaaaaataccttttcaaattctgccgtcctgccattggtaaagcctaaatcatctgccgttatctcatggccgctttcaatggcctcctccacggcagctaccaaatccgcgcctttcatctggaacgtaacctggtccgccgtaccggcataggatacattcagaccggtgcccaaattcgtgaaaaccatggctgctgtcagcaaaaatgccagaatccttttctggctgtaatacatggatttcgttattgtaccggaacttctccgtctttccataatagttctcctttttcataaactcccctgccaatcaggtgcagctgcttcacgattcatcttaacaatatcatatcataaatgattacactttggttacattttcatgttttttataaattatttatgtattttgaattgtaaccagaagccattttccttcactatagttacataatagcatacaaagcgttacgtaaagcgttatttcaagctgtaattggtcactttttttatttttacgttattttattcatttttttataatatgtgtgtccgcatttccctgcattccacacaaaccagaaaaaaatggaaatctttttctccccccaaaccgtataaaacatctggaatccgtacatcatttcgttatagcagattcatccagtacagccctgaattttttcatgtcagggcgtatggcattataacggaggtaaggattatgtcgggctacaaagttgagatatgcggagtcaataccgccaaactgcctttactgagcaatgaagagaaagaggaactgtttcaaagaatactggacggtgacaaggaggccagggagcagtatatcaaagggaacctgcgcctggtactcagcgtaatccagcgcttttcaaacagccaggaaaacatcgacgacctgttccagattggatgcatcggcctaatcaaggccatcgacaattttgacatcactcagaatgtcaaattttccacttatgcagtgcctatgatactgggagaagtgcgcagatatctgagggacaataattccatccgggtcagccgttccctgagggatactgcctataaggccctctatgccagggagcagcttaccagaaccaattccaaggaacccactctcatggaaatcgcacaggaaataggtgtttcaaaggaagacatcacctatgcactggatgccatacagactcctgtcagcctgtatgagccggtttatacggatggcggggaccctctttttgtgatggaccaaattagtgacaaaaagaacctggaggaaaactgggtggaggatttatctctggtggaggccatgaagcggctgccggagcgggagcgccatatcattgacatgcgtttctttgaaggaaaaacccagaccgaggttgcccaggaaatccatatcagccaggcccaggtgagccgccttgaaaaaaatgcgctgaaaagtatgaagtcctatttaagctgacccttgaagcctttcagcagatgtgttaaactattcatgttagtgcttgtttgaaacatatgccaacagaaagtgaacatatctatggaacaaaatgaacgcagatttgcagtattgattgatgcagacaatgtctcccccaagtatatcaaatacattttggacgaagtttcggatgtgggaatcgccacctacaaacgcatttacggcgactggacagataacgaaaagcgcagctggaagaatgtgcttctggactggtccgtaaatcccatccagcagtacagctacaccaccggaaagaacgccactgattcagccatgattattgatgcaatggacatcctatattccggaaatgtagatggtttctgcctggtttccagcgattcggattttaccaagctggcccagcgcctgagggaggcagggatgtttgtcatgggaattggggagcagaaaacccccaagcccttccgtgcagcctgcgatacgtttaaattgctggagatcatatcctctgacgatgcaccggagacatcggtcatcgaaaaccagaagaccattaccaacatagatgaaatccagaaggccatcaccaagctcctcattgaaaataacagccagaaccagcccattatccttgcaaaggtgggtaacttccttacaaagcgcttttcagattttgatgtcaggaactacggctactccaagctctccacctttttggaaagcctgaacaacaacgactttcaggtggtcaagctccacggcggttattttgtccaggaaaagagcgccagcatctccaagactgagattgaaaaggaaatcatccgcatcatcaagggatataacggacatgtggataatctgagcatcatacacgatgagctgaaaaagacatacccttcctttgacgtgaagcagtatggtttcagccgcatttccagctttatccgcagcttcggtacattccgcatcagggataacatggttcagctcaaataacaacaacagaaacgcccggaaagggacatccagcctgtggatgcggccttttccgggcattcctgttttactctcttttctgcctctcctgttatctgcggatgatttcaaagccatccttaaactctttatagtcccttatgccgatgaattcttccggaacaggcatcttcgtcatatggctggtgatttcataccatttgtccatttggaatacagcgtccgggtctgtccatatggcctccgcctcttctctggtcaggtccgtatatttaagtatgtcctcaggaaactcctgctcttttccgtaacatccaaactctgattccaggatttccttattaaatgatgtcgccctctggtacacatgcttttgatgtttgtcgctgtaggcaaccatcagcagatctccgtcaaattcgtcatagagaatgacatccgacttgaatatttttgacaccttcctggcattctccatggtgcagttttcctggagactctggctgtctatgcccagccaggggctgtcctttgtccgggccgccagcgcatccccgctttttaccccaaaaaagcctgtgtcaatcttcttcaccaactccaggcagtcaccgatttcctccgggcttaagtcctcctccagaaggaccagacagtttgtcataacatagtttttgccgtaatagccgtgaaatacctcgtcctccatctttttgcagatacccgcagacgtatccaaaatccggaaggaatcaagagcccgcctggcttctcctatggattccggcgtttcttccctgagacgtaccgttaccgtgtaaaaatactccggtcccagcacactgagctctacgctatatcggtatgccccttccccgtattcacccccaccgtatatctgtcctgtattctcctcggccttataccgtatctccttttggacaatctcgtctcccttcacccttctgtatgtatactccagcacctccggcatggaatcgtccttaacagctgctccgctctccatccttcggatgtaatccgcctttgtcctgggggtatctattcccgctattgcaaaaaactgcggctgctccctgtatccccggaccagaatactcccccattccgagaccaggacgtccccgaaatcacggtttccctgctgggtccactcctcctgcggaagccggattttataataaagggaggatgatacataggttccgtctgaccccacctggtcaaaaaccgtatcatcgggaacagtaatcataataccgtcctgtattttgtctgctgctttatttccatgttccgctgtctgacttgcgttttcccccgaatccgccgttccctcttcagacacctctgccattgccatccgggcctgtacgctgccctccgctgtctctgtgcttcccgttgttcctgtgcctcccgttgttcctgtacttcccgctgttcctgtgcttcccgttgttcctgtgctttcaccactccctgctccccacgccgccagtcccaatgccgccgccgctgcggccgctgccagtaaccttctgcctgtcccccattttcctgccggcacatgtacctttttttgcttcaggctcagaggcttcccgcttcctctctcattgcatatctgaaacagcatcttaatgccgcctatttgtgctaacggctccacgggaatcatgaccgccccgccccgtcctttcatcagataaacatattccggcgtataaaccgccttctcaaaatccccataggcatgtctgaccacggaccgttctccatattcacagataccgtcctcttccagtgccagcagctgcaaacccacataccggtacgggaacaatgccgccttcctcagcttctgcacatttctccaaggcaggcccaatgccctgcatgcatctgctatctggtccacgctcctggtgtaacagcagaatgggacggttcttctgcggcaggcttcctccacatcccccatgggaattcggccatccctgttctccaaacattttgtgttcaggcatctgaaccattcctgcgcctccagatcccctcccaggacccgctccggtatggcccagaattccttctgcccgaaaaacagaatcaggccttccttcctatgaacctctgtcagcgcagaatacagcagccatatatccgtattcccggtctgtatgcggatcacctcattctccatggtgatacagcagtcttccttcagattcataaaatccggccggacccttcccaggtccttttccttcagaaagtctttcttataccatctgaggaatcctttatactcctgttcactcagcctgaaacagagcctttctcccacctgtgctgcggacatgcctctcctacccccttggccggctctccccatacgcatctttaagatatggaaagccttgtatatcaaatcatattcctgataacaatgtaccgcattttcctctgttagacaagccttaagacagcaaaaaagccagctctttctgctgactttccatgcctattcaaatctgacaatttctttttttagccgtttcatgattttcttttccagtctggatatataggactgggagattcccagcaggtcggccacttccttctgggtcatttcctccccgtcctcgtttgtaaggccgtaccgcagctccacgattttgcgttccctggggtttaggcggctgattgcgttgttgagaaggcttttttctatctcatcctcgatatcgtgataaatcacatcctcatccgttccaagaatatccgacagcagaagttcatttccatcccaatccacattcagaggttcatctatggacacttccagacgtgtcttattattccttctgagatacatgagaatctcattctcaatgcatctggaagcataggtggccagcttgatgttcttatccggcttaaaggtattgatggctttgatgagtccgatggttccgatggaaattaaatcctccacccccacgctggtgttgtcgaatttcttcgctatgtagactaccagcctcaggttgtgctcaatcagggccgccctggcctccttgtcatcctcgcttcccaaaagacttatcatccggccctcttcctctgtttccagaggggcaggcagtatatcggcgcctcctatataatgcacctccccctgcctgggcatcagtacggtcctgaagctggggatggtctttaactggaaacggtttggtatggatacttttataatcatggaaatgtcctcctgtacgttgtgtgttattcaagttccttagtcgcttttctgtatcaggatttgatactcccctgagggagaaagctcctgcttcgtaatggcaatgaggggcttctcaaggctgtacctgccgccctcctgctctatctccatccggtctatgtacacggccggcagaattccgcggctggttcccacggactggtacggcacatagaccacaccctttaccgacggacacagctgcttcatgataccggccgccgccacatggaccggctggctgctcacaggctccctcagcctgttgcccgtgtctataagccctgtaactgtctctttcttttcgccgtaaatcatggtaaccctgcataaatccttcctgtgggccatggtacggattaattcctttatcccccctgaaaatccatagcaggctgcggctgcccctgcaatcattaaaatccagcccatgacgggaatccttcttccatgtccggactccaccaaaagccatgcgtaatacccagccctggtgtgttcatagagcaccagcatcacacctccaagaacaaccgatacaaggtagatacctgccacggatttaattacctctctagggcttttcaggtgataggcagctacggccatcaggctgctcaccgctacatacgttcccaatatctccactgcggccggaagaccgggaaccaggctcaccacacaggaccatataccgccgatgacagctccggccagaatacgccgctttgtggtcctgtaggataaaactctgtttaagatggtcagaaccatcatgtccattatggtattgaccgcgaataccacatctatgtatactgtataaaccactcagtccggcctcacctccctggcaaactttctgaaagccattatagcggtttcaaagcgcggatgttgtcgaaataaccgataacaggtacaatatttatcgacaaaattcgagtttcatactaaatatggtgtttttacaaaaagccggaacgccgccgccacatccatacacggtgtggcggcagcgttccggctgtacgcgtctctatttgattgtgctgttcttataatagcctgtgtttacaacagcctctattcacataacctgtttcatggttcattcaccacattctgaggcgtgcctgacataaaccggctcaggttttccactgctatatccatgagcctttgtctggattccctgggcgcccaggcgatatgaggcgtaatcagtatattttccgcgcccaaaagaggattatcctcctgtatgggttctgcggaaaccacatccaccgcagcgcctcctatcttaccgctgtcaagtccctccctcaggtcggcttcctccaccagctgtcctctggaggtgttgataatcagaaccccatccttcatcttttcaatggtgcggcggttgatgattttctctgtttcaggaaacagagggcagtgcaggctgattacatcagagccggacagcagctcttccaggtctgcgtatcggcagctgtccgtctccagacctttatcctgataccggtcaaaggccagcaccttcattcccagagcctgggcaatgacagcagtgcgccttcctatgcgcccgaatccgatgattcccatggtctttcccgcaagctctgtcagcgggtacttccagaaacaccagtccctggagcgggtccattcgcctgcccttacacagtcagaatggaagcccacatggtggcacagctccagaagcagggcaatggcatactgggccactgcatctgtgccgtaggaaggaatgttggaaacaatgatccctgcatctccggctgcgcgtatgtccacaatattatagcctgtggccaataccccgataaaccgcaggttggggcagctctctattgtccgggcacttatgggcgtcttatttgtatacaccgcctctgcctggccaatgcgttccaccacccggtccttgggcgtcctgtcataaaccgtcagatcccccaggtcctccaggcccttccagctcagatcccccggattttccgtatatccgtctaataccacaatcctcatatatgattcatcctttccattttcccagcgtaccatttggcgctaatcctctccatcagtcctccaccatcgcccatgcccggttaatcacacgcttcgtgtcagccagtataatttccccgtcctcgtccccccagggtttgacctcaagagataacacataaggctctttttcattgaaaaagccttcctccttcagtaccctgaaaaattctgtcagctgctccgtatcgttggcgctctccgggaatccgaatctggggtgctgatccccgtacgcctcgcagccctccttaaccactgcgtttcctatgtggaaatgtgtgatataagggcgcagggtcctcaccacataacgggaggtctcataggtggtgggaaaatgggacaagtccgccagcaggccaaaattatgatgggtcatgcccatatcggctgcaaaccgggccgccagaggcgccggaccaatcagcgccgccttatccatatcatagtcaaatacctctaactccaccatcatgcccttttttgcggcatgggtgcacactgccctggttgtctttaaaagctgggaatatgcctgttccctggaatcaggttcccactttcctgccaaaaatgcgatacccccggcccccatatacgccgcctcgtccacagcccgggtcagctcttcttccgccgtcctccgctccgtctcctccagatggttgggattcagccccttccccagcaggttcggctgggcgccgtagcacacccgcagatgggattggtccagcattttcttcaccctttccctggtctcgctgtccgggatatgggtaatctccaaagccccaaaatacggatcgcagcagatggttctgactgaatcgcacaccggataactgaccggcgggtgggtcatccactggatggtgcctacctggaaatatttctggattggttctttcattctcttattcctcctgttcaaatgggcctcagggcatatcaaagggccgcagtgtcctttcaggcagcctgcccgtcccattatcctgcttacgccgcatcacggccctacatctttgcgcaatggattccgggccatatccgtacttttccatgagctggccgtaatcccctgactcggcgaaatccactgcgccgatccgctccatgggaaccggacagtgctctgcaagcacctctgccactgcgctgcccaggccgccgtatatgctgtgttcctccgctgtcacgatggctcctgtctgttctgcacattccagaatcagattttggtcaatgggctttaccgtatgcatgtccaccaccgctgcctggatgccctcctgctccaggagcagggctgcccggattgcgttgtgcagaagcgttcccgtggtgataatggacacgtcattcccctccctgacgcggataccctttccaatctcaaacctcatattgtccccgtaaaacaccggagccggcgcacggctcaggcgcagataaaccggtccctgatgctctgcaatggcaaacacagcctttcttgtctccgtcccgtctgccgtggctatgactgtcatgttcggtatggatcttacaaatgccatatccgttatggcctgatgactggctccgtcataggagtcagacaggccgcagtaagcgccgcacagctttacattcaggctgtcataggcaatgaggctctggaccgggtcagcacctctggtggtcaggaacacggcaaaggtattaacaaagggaatgaaaccggtcctggcaagtccggccgccatggacaccatatttaactcgctgattcccacattaaaataccgctcaggaaacgcacttccaaatataccgctttttgtggaggaagccacatcagcctccagtcccacgatccttacatcctgttcccccaattctttaagcgccgctccgtaggcatcgcggattgctgtcatctctcccattaccggtcacctcccagttctgcttttgcctgtacgtattcctggtctccaatggcttttccatgccaggtatttttgccctccatgaaggaaacgccctttcccttcactgtctttgccagtatcagggatggcttgtctgccgtcattttagcctcctccacggccctgcatatgtcctccacatcatggccgtcgcagggaatcacattccatccgaacgcctcccatttggcctttatatcacccatgggcatgatatcctccagggtgccgtccaactgtaccccgttgttgtccagaatacctatcagatggtccgccttgaatttggacgctgacaaggctgcctcccatacgcatccttcctgtatttccccatcccccatgattacatatgtgtaggaatcataccctttaagcctggatcccagggccattcccagtcctgcggataatcccagtcccagcggtccggtggaaagctccaccccaggcgtcttatgtacgcagggatggccctggagcatgcttcccgtctggcgcaggttctttaactccgccaggggaaagaatcccttgtgggccaggacaagataaagcatgggcgccccgtgaccctttgacagtatcagatggtcccggtcctccttttccgggttcatggggtccacatccatcagctcatagtaaagtgctgtcaatatctccgtgcaggacagcgatcccccgggatggcctgtctggacactgtgcagcagatcaatcagcttgttgcggaatacaaggcacagcttttgaagtgtttcctttcgttcctctctcatatctgcatcccctccttacggctgcgtcctctgccatccttgttccggcctgcttcattgcagtgtgtgtttccgccgtaaacccggtcggcaatgggcctcagataccggatggattccctggcagcttcctccatggacggaagctggaatatctcggtacagtaattgccgtcataaccgcactcccgaaagaccgtcagaatcttctcaaaatccaggccgcattggcccggatagcgccggttattgtcagccagatgtacgtgaatgttgtaactgctgtatgtacggatggcctcatacaaatccttttcctccagattcaggtgaaaaatatccatcatgagccggaaattaggccgtcccacccggtctgccatggcagctccctccgccagggtattgataaagttggtctgcatgatggtcactgtctccagggcaatgtccacatttttaggggctgcatagtcagccagctcggtaaacgcgttctgagccagttcaatggtttcctccctgtccagttccctgcagtactgcccgcgtatcctccctatattgacattggcccccaggtaaccggcaaaatcaatgatttcctttgtcctctccacggcctcccggcgtagggaccggtgggggtgtgtatagctcaatcccagctgtccgaagatctcgcctgtgcacaccagcaccacggacagattgttttcctcagcagtttccttcacttccctccagtccagctttcccggattcagggtcatcagctctaccccgtcgtatcccagggcgcccaggtccccaaaggtttttgccagaggcccctggtacgctgtcactgaatccgctatggccacgtcgggcgtggctgcctgataacataatttcattgctctcctcctcccgcgaatacaggctttaacgcctggtacagttcccggtaaacccggtactgtctgtcatatacacaagcccggacatcatcgggccaaaacacctcgccgtccgctgccagcacctttccaaagtccggcgcaatctcatggattcccatagcctgggcagcgatgatgatatcgcccagggtctctgtctcattggaccggagccgggccacaggaattcccagcacatcggcaaatatccggcaccacagagggctgttggccgcgccgccgccaaggggtatgatatccggtctggcagcccggtccaggaccacttccagacagtggcgctgtgaaaatgccactccctccaggacagcccttataaaggatgggtaatctgtctccagcccggccccataaaacacgcccctggcccgtgtatcccagacagggctctgctccccggccagataaggaagccatataaggcctccggccccggccggggcagtgtccgccagacggtccagatatgggtatataccgcacccggctgcctgggcctgcctggctgcctcccttccgaatgtgtccctgaaccagcgcagggacacacaggcattgttggtggactggacaatgatgtactgtccgtcataggccccgtacaggttcagcagccttggatcctccataggctgtcccgcaatgctgcaaagccttccgctgctgcctatggtcagggcgaaatccccctcatccacagcgcctgcccctatggtggccgctaccgtgtcaatggtgccgcctgtaaccggcgttcccgcagccagtcctgtcatggaggccgcccattgggtcacagtgcccacgatttcagcggaaccgcagggactcggcagcagccgggccggcaggcctgtctgttctgcaatctctgtatcccattggccggtgcggatatccgccataagggtcaggctcatgcgcggccggttcatggtaaactcccctgtgaacttttgaatcacataaccgcagggcaccatcagcttatgtgctccctttatcaaatccggccggttctcaaccagccaccgcagggccggaaggctgaaggagccgttggcaatgcggtttgcggccagagcgcggatccgctcctctccgatattctccttcagccattccacctggggaccgcttctctggtcatggaggctgatggcattgcacaaaggctgcccctgccggtccgccagaaacactgcgttggtgctgctggtccccaccgccgcaatcctgtttttatctatgtcctggctttgaaatatggtctgcaggttgcagcacactgcgtcccaccaccgggaagggtcctgttcggtccatccgggccggggatggagcataggatattcccggtaagcagaggccacccgttttccgttaaaatcatataccgaacattttgttccggtggtgcctacgtctattcccaataacaggtccttatgcatcatacagttcctcctgcccgaaacagcgcctctgtctgttcttcatcaaggggaattccccggtctcccaaaagtatggtaagatgcgcgttctcctcaatctcctccgcagtggccagcactgcctccgggctttttcccgcagccaccatgccgtgatttgccagcagaaggctgtcccggctgcaaatcacgtcagacacagcctcggccagttcccggcttccgggaaggtaatagggaaccacaggaatccttcccacacgcatggcatatcccggagtgtaggcaggcatgcccgtggccggactcccgtttccctgcctgcggcaggcagctgcaatggaatagggggaatgcagatgaaacaggcacaggatgtccgggcggctcctgtagcacgccagatgcattccggcctccttggagggacgccgcctgccgggatccgacatatctgcgggaggcgcaacaccatctgcctccagcattatcatgtcctcctgcgtcaaatcacccaggcagattccgcttggagatatatacacctgcccctgaatccgtatgctcacattgccgccgctgcccgcggcaaatcctttcatatacgctttgcgggcagcttttaccacacgttccagcatattctttctgtccatatccatatggttctccttactttaagatggccggcagaaactccgtgattcccggcaccgcaaaggtgagcagggcgcaggccgtcacagtcagaataacccacagggtatccggaaacgcctcgtcatactttacattcagcaccctgcaggatgtaaacaggttaacggaaagaggcggggtcagggagcctaccatcagcgccatcagcatggaaactccatagtggaccactcccattccaagagtctgggcaatgggcagaaggataggcgtcaccagaataatgatgcacatggtctccatgaaggttcccagcagcaaaagaagcaggaatatgaatgccatgattaaaaacttactggatgtaatggacagcagccagcccgcaaacagggtgggcacattctgtatggacataatccacccgaaaggcgtggcaaccgagataatcagcatgataacgcctgtggtgacaacgctttccgccgccaccttataaaactcccgcagcgtcagttcccggtacacaaacactgccaggataaaggaatagatgacagccaccaccgatgcctctgtggcggtacagatacctgaaaacacaccgcccagcacgaaaataggcattaaaagcggaagcagggcatctcctgtaatcctgagcctttcccttgccgtataatctgttttctcaacattctccttgtttcccctttttacggcaaaaaaggtattgagcccgataagggcaaggatacagataaatcccggcacaaagccggccaggaacatatctcccaccgacgctccggaggaggatgcatagaccaccattacaatgcttggaggaatgatgcatgccatggttcctccggccgcaatcagtcccacggtcagtccccttgggtatttctgctccagcatctcaggtcctatgatcttgccgatagccgcagcgcttgccacaccggaccctgagaccgcgccgaagaatccgcaggctgcaagtgccgtggcccccagtccgcccggcattttccgcagcatcatgttggcaaaccgcatgaggcggggcgtactgccgtataccatcagggaaccggcaaaaataaacataggcattgccatcatattaaaggatttggcgccgctggccatgcgctggacaacgatatccagaggcggataaccattgacggtcagcagggccatacagctgatgccgatggaaaaagccacaggcagtccaatcagcagacagattcccaacacaacaaacaaaacaattaatccagtattcattatcgactcagctcctcctccacataatccatgtttcttccccttaacttctccacatcaatccagagacgcagcacataaaaaataatcatcagtacacagccgctcagtacacccacataattgacggaaagaggtaccttcatagctgctgaaagggcattgagattggtgcccaccagctttgccgcatagcggcagattaccaggagaaacgcaatacagatacagtcatccagaatctcaaaaccgcggtacacaggtccggggagcttgcggataaaaaagtctatccgcgtgttgctgttattgatggtggccatggctgcgccgaaatatgtaatgtaaaccatggccatgcctgccagctcctccacccatgtaaatgaagttccaaacacataccggttcaccacctgtattcctatgatgatggtcagggtacacaccgtgacgcagcttaaaatgcgcagaaggaattttaccttgtctattaatttcaggaccattttttacctcctttttcatattgttctgtggcaaatccggggcacggccgggccgtcccccggtacttgcggatacctacttattaaaggaagtagcaaggtctatccaatactgtccgtcctcgtactgggaagcaaactcttcccagatgcctgacattgcctcctggaacgcttccttatccacctcattgatttccatacctgcctcttttaataattccaggtattttgactcatcattttcctgcaggtccacttcccttgccttgtcagcctcctcaaacagtatggtctggtactcttccggaagggtttcaaaccatgcggtattgactgccagaggagcagcgtcatacatatggccggtcagggacaaataagtctgtacatcctggagggatgaggtgtagatgtttgccagaggattttcctggccgtcaatggtcttgttctgaaggcctgtatacacatcggaaaatgccataataacagccgatcctccaaccgcctcatacatcttgaccttcatgctgttttcattggtgcggaacttgatgcccgcaatatccgcaggagccagaataggcctggtgttgttggtcatatggcggtagccggactcccacacagacagaatggtcacgcctgttggctccagaagcttttcgcagaactgctggccgaactcaccggcccaggcttgcctggcattgtccagggatgtaaacaggaacggcagaagggccacgtttacttccgaattatagggctcccagttggctgctcccatctgcatcattccctctaccgtaccggatgtaacctgttccaaaaggtcagcttcaccgcccagggccgaatccgtatatatgtttacagccaggtccccgccggtcctctcctccaccgcctttttaaagctctgcagggcaatgctggacgggttggtggagctcatggctgatccgatattcagcgtatagctggccttggcatccgtacctgtgttatccgtcttggaaccctctacctccccctgggccgaagccgcatcggctgatgctgccgggtcagcggctgatgccggggctgctgctgatgccggggcagaagaaccgcctgcgcaggcagtaagcccccatgtcatggccaatgccagaaacagtgatacaagtctttttttcatacgtttatctctcctttttcattatatagttttatgattcatgcagaatgctcgtccggcggcatacgcggctggtccgcagcattctgccgcatcatacagttacgcgtaaataccattcccctggcaagtataagcagcaggttctggctttccaccggaagttcctttgcgttgtcaatgatttccattaataccctgttctgccgttcttcttccttttgcattgtcaatgttatccctcctttctttttgctctattaatgaattatagcagataaggaattcactgtcaatgaaacatactatatttttcctgcacttaagcggccaaaaaatcattgacaatgaattttgctcattgtatactgattgcgggggtgataaaaatgaatacattgggagaacgactcaactatgcgcggaaacaaaagggatatacccaggattctcttgcccagaccatcggcgtatccagaggtgtcatcttcaacctggaaaaaaacaagacagaaccgcaggccattgtcatcaatgcagtctgccagatactgaacattaataaagaatggctcaccgacggcacaggagacatggaatccggaaaccaggcctttcaaagcgcaaaactgctggaggaactctatgatattgccaaggaactctcagaggatgaacagctattccttttggacacggtcaaagcgctgaaactgcgtctgggcaagcggcagtagactgccatcctgtggcgtattgttatatattggcgtattgccaatatatatatttataatatcagcgaattgccagtatgtcaatgtattttatcaacaaattgacaatacgccaaccagaggttggcccggaaatgaggtgtgataatgggattttccgaacaactgaaaaaagccagggtttccatggggtatacgcagcagcaggtagcggacgccttaggcctgacagccagcacctactgcggatacgaaacaggcaaacgacagccggatgtggctaaactgaagcagctggcccggattctgaacactaccggcagcttccttctggagacagagcctgttcagaacacatgccggccggaccctgggtctggcaatgacctcatggtctcctatggcaggctcaatgaacggtcaaaaaaagcagtggatgatttggtggccctgctgctggatttgcaggaaaagagcaaagaataacaaagaaataaatctatgatgaatgttggaacgtactttagcagataccgtcccggcattcttttttattagggataactaaaagcaaaaaaccggctgcctcatggcagccggaacatatacaaatctggttgaaacttatctcttattcttcaggaaatccggaatattaatctgcatctccttattggtagccggtctgaaaggctggcttggagcaggggtaggattctggccggcattctggctgccgcctgcggaatatccctggttcgggttatacttgggcgctgtgtatccctggctacctccggccggattatagccgtgggtcgaatatccctgggatgccggtctgctggtataaggtgcagacgctgttgctgctgcctcaggtgctgccgcatgtgcctgctgtccggcgggcgctcctgctgccggtacctttgtcttaaaactggtaaaaccagtcatggcctttgccacggaagcattggctccatgctcgtccaaaccagtggcaataacagtgatggtagcctcatcctgagcgttctcatcaaacatggcgccgaagataatgttagcttcatcaccggccagttcctgaacatagctggcagcctcattggcctcaatcaggctgatatcgccggaaatattgatgatgacatggctggcgccttcaatggtagtctctaacagaggactggatacagcctgcttaaccgcctcaatggccttatcatctcccttggccttgccgataccgatatgcgcaatgcccttgtcaatcatgacggtctggacatcagcaaaatccaggttaatgagacccggaacattaatcagatccgtaatgccctgaacagcctgctgaagcacctcatctgctttcttaagtgcatccggcatggtggtacgcctgtccacaatctcaagaagcctgtcattgggaatcacaattaaggtatcgacactgttcttcagctgttcgatacctgacagggcattgctcatacgcgtcttggcctcgaaacggaagggcttggtcaccacacctacggtaagaatccccatatcttttgcaatcttggctaccactggagctgctccggttccggttccgccgcccatgccgcaggtgacaaacaccatatcagcaccctttaaggcctgtgaaatctcttctgaactctcctcagcagctttctctcccacctcaggcctggcacctgctcccagtcccttggtcagcttctctccaatctgcatggcagtgggggctttacaaaactgaagggcctgtttatcagtgttaatgccaataaactccacccctgcaatgttttcgtcaatcatgcggttaactgcattatttcctgcgccgcccacacctacgactataatcctggcggcattctctgactcatttatcttaatctctaacaagatccatatcctccttttattcccttactaccatttcaagccatgctttcattctatcatcaatgtcaatttctcatcaatttctggtctaactaatactatatttgatttcacaaaaaatatcaacacctttttttacatttcctaatatttttagaaacactcattgacattgtaccaaattccagcttactttacaacacctgattcatgccactattttctaagatgcagataaccgccctaaaaaggaaaaacctgactggcggaggactattttttgactttcttccttaattaatagcagccctctgtctgccaatatatgtttcatgcgtaaaaaagcaaatacaggggatggacagctcctaaacagacagccgtccatcccctgttttaaacttaacatacgttatcctgtgaatttaaacctgaagccttcagcatatcctcaactcaccacattgactggatttccttccataaatgcctttaaattggagacagcaatatccataagccgctgtctggactccctgggagcccatgcaatatggggagtgataatactgtttttggctcccagcagaggattatcctctctgatgggttcctctgacaccacatccacagctgccccgctaacctttccgctgtccagggcctgccgcaaatcctgctccacaatcaagggacctctggaggtattgatgattttcactccatccttcattttggcaatggtatctttattgataatgccttctgttgacggaaacagcggacagtggaggcttatgacatccgacatggataaaagctcatccagggaaacgtatctgaaattttccccttccagctctttcacaggccgttcatcataagctactatcttcattcctaatgcctctgctatttttgcggtcctctgaccgatacgtccaaagccgatgaccccaaatgtcttgcctgcaagctccaccaggggatgcttccaaaagcaccagtccctgctgcggctccacccgccggccttcacgcaatccgaatgttctccgatatgatggcaaagctccagcaaaagcgccacagcatactgggcaactgcatccgttccgtaggaaggtatattggaaaccactacgtttgcagaacgggccgccttaatatcaatcacattataaccggttgccagcactccgataaacttcatgttggcgcacttctcaatggtttcaccggtgatgggcgtcttattggtatatacggcctgtgcatctgcgatcctctctatcaccttgtcgccgggagtcctgtcatacacagtcaatgttcccagcgcctcaagaccctcccagcttaaatctcccggattctctgtataaccatccaataccacaatcttcatcctgtctcccctgtcttaaaaatcctcatagttcttatcatgctccagctgggccagcaattcctttgcctgctttaccgtataccccttatgaatcatataccgcagggcaataaccagggctgtcacgtcttcatattcccagacaaatcttcccattgtcacgcctcctaccccgcagtccatggcttcccttgtcatggtcaggtaatcatccaatgtcctgcatttgtcgcctccctgaatcacaatccggaaagaggacggaacacacgacaccaccctggccatggaatccgggtcacctgtatacgttgttttcacaatatccatgcccagctcgcaggcacttctcacacagtatgctatattctcccaggaggtctgcttgtccgccggaaccgattctcccttgggatacacatgaccgataagcggcattccctttgccatacactcctcggaaaatctaccgatggcagcaaactgttctccctggaaatcccccagggtcatggctcccatggaaaccgcatccgctcccatccgcaccgcctcatccactgacccgaatatagtgtccctggtaggcgataccggggaatagtttgataccttcatcaaaagggccacctttccggcaaagggccacatgcagtgttccgcgattccctttgtcatggtcatggcatccggccttcccataacgattttttcaatggtttcctgaatgggctgtaagcccttcataggcgctatgcctctcgaaattgcatggtcaacagtaattgccatcatctttttgctttcaggattgaccagccggctcatccttacctcttttcctaacattgccataattatatactcctctcaatttctatcatactaagatgtcataccatcggcagtacggttgctcccaccaatgaaagtataaatgccatgcctgcaagggttatggtattccatgtatatgtttttaagccgcctgtgacactggcccctgataggtttgtcaccacccagaatccggaatcattgacatgacctatgaagttgcctccggccagggccgccagggcaatatataccggatgacagcctgcggacggagccacggaagccatgatggtcatcgcggttatggaagcaacggttcctgacccctgcgccactctgaacaagactccgattccaaatgtcaggcataatataagcattgtggaggactgtccttccgtcagtcctgcgatgagaacctcaccgatatttgttgcctgtatcacggccccaaaagccccgcctgctcctgttatcagcagcaccacgcctgcctgcttcagggacttactcactgattcattgagtccgctccatcccattcttttcagcaatatgatataggcagccaacaggcccagaaggattgctatggttttctgggaaataaactgtataaccaccggtgcgtcgcttccggttaccactggccagaaggatccgatgagaatcgccagtaccggaaggcagataggtatgactgccgcccatggagacggcagatccacccggtgcacaacagccgcgtccatatccaaaagaccggtttcatccttattgggatcccagaatcccgggcggtccagcatcctgaaccagacaaacatggagaatacagctgcggccaggcccacaatggttcctgcaataataatataagacaaatcaaaatcaagtatggtggcagccgccaggggatttggggtgggcggcacaaatgtctgggagctgactcctcctatggcaattgcccctgcaaaatatgccaaaggccgtttcgtttccttcgccaccgcaatgcccaggggaatcagaataacaaacgttacatcaaaaaagacggggatggataacagaaacgccgtaagccccaaagcccagggcgccttcttaccggggaatgcctttaatatggattttgccagggattccgcagcaccggaatcctccagtatctggcccatcatgattccaaatcctatgggaaagccgattcccgtcatcagagatccaaatccgctgttgattgatgtaatggtgtccatgaagcccaggctgcaggatatccccatatacagactggccagtatcatagatataacagggttgattttaaacttcaggactaaaaataatatgatcgcaattgatatggccaaattcacagctaatgtaatcccactcatatgataacctcctattttgggcgtactttaatagaagtaccacccgtttcaactgataccttaattctcacatttcaagttattttaagcgctgtattcggaatacaaaaatggaattgacaaatccaggaaacagaattagtatatagatgtacggctggatatcctgtgactgatatcctttaatcccggatatattcttttatattcctcaaatcttgtttcatactcctttaccattgcaggattggggatatatgtttctttcggatggaccatatgttggatggcttgtccgaaatcttcaaaataaccggtccctacagcgcctgttatggctgctcccagggatgctgcctcctgggtttctaacacagtgatgctgcggttgaatatatctgcctttatctgtaaccatttaggcgacttggcaccgccgccaatcatgcgtatctcttcgattgactgtcctgtgctctgttcaatggctgagaggtttaatttcatctcatagcccagggaatctaaaacagcacgggttatatctttttttgtatgagtgactcttaagccgattacggctccaagagatagcggatcatttaccggtgtacccgcgccttccaaatgaggtaatacatatatgtctgccggagtgttggcgcactctttaataatatatgtataaatatcacagttctgttcaccgcataactgtgattcctcatgacagaaggtattcttgtaccatttcaaaaataatcccccgtttgtattgattgccatggtaatataattggttccgtccacatgcctgtagcagggcagtttgttatccagcatggccctgtctatgataaagccaggcagaaccgaaaccattgcgtccacggtgccgcaggcatccatcaccatgcccggcgtaatcacgccgcttccaactgcgccgcaggcctgatcgtgtcctcccaggaccacctggcaggtccggctcaggccaaatccggctcttatgtcctccctcacccttcctatagtggcagtggagctgactggttccgacaatttttcctttgatatgcccgcaatatctaatacaccgctgtcccactccggacgctctgaggacagcatcatggtccttccggccatggaatagtctataaacgggccttctcctgtcagcttaaataccacataatcctggacgcagcagaatttccatgccttttcatagatatccggcctgttttcaataaaccacatgatcttgtttaccgtataaatggaagcaaatccattgccggtgcgcttgtatatctcccactcatcatggtgttccttccagaatctgtattgccgcagcgttctgttatccattgtaacgatgatgttatacagagggttccccatacggtctatgggtaccactgcctgtgcctgggatgaaaccgcgattgatgcaatattcccatggcattgtgccgacacatcccgtaatgtctcgtatacctttaccagataattctctggatccaactccgccaaccctgtctgtggaagtaccagatcaatctctcttctggaaaaggccagctgtctcccatgttcgtcaaaaacagaggcctttacactggaagtccccaaatcaattccacaaaacatacactatcctccttaatctcagatatttaactttggttgtcttatcacctctctccatacgttgacttcatgttccttttttattcacctcctttatattttagtggaatccaatgccttcctcgtcttaagtatattggcatatgattcatcgtatctcttataagatactcctatatacagcatatcaatgattgtcagctccgctattctggatgacaatgcatcgctgttaaaggcagtctcattggaagatgtatacagaacaacatccgccttttccacaatgggcgacttcccataattggtaatagcgattgtctttgccccggattgttttgcaatgtccatggccatgagaatgtccttggatgccccggaatgggaaacagccaccaagacgtcccgggatgtaagtacagacgcagccatggcctgcagattactgtccgtaaatgccatggccatataaccaatctttaaaaacttatgctgcccgtccatggcaacacagccggaaccgcccactccaaaaaacaaaaggcgcctgcatcccaatatcagattaaccgcctcatctatattctccctgctgagcacgtcgcttgtatcccttaatgactggatatttgaatcaaatatcttatccacaatcgtaggaatggtatctccctttgacaattggccgtaaatctgctgtcccggctcaattacgtcctgggcaatgctgattttcatggcctggtatcccttgtaccctaatttctgtgcatatctgactatggctgcctcactgaccccgcaagcctccgccgcatccgccacagacatatgtatgatttccttcctgtttatctctatgaattcataaatcttcatttcattctttttgttgatggaaggcaatattgattgcactctcagctgataactcgtatttggattgtccattttctacctcctggatattattatatcgtatttgaaat

SEQ ID NO: 3229 - DNA, 3565 bp, Unknown
  gut microbiota DNA sequence
cctccatctaccgtatgccattgagttcctgatacatatccttggcaaatgtgtctgtcatgccgcagatataatccgtcaccagcagcagacgcagatacagccgttcctcctcatccctgtcccgggcgcatatggaatatatcatcttataattgtcagatataagggaaaccagctttttctgcacctgggtcatgggcaggtccgtgtcgtagggaatcacagcgtccacaaaccggtccaaaagaaaatcaaatattgtctgtgccgctatctccagtttcaggatgggtctggtgctgaacgcataccgcaaagcaataccccccagcgcttccatcaacagctctacatccgtacctgcaaaaaggtctctggtataggtgccctccataatagattcatagttgccggcaaaacattccgtaacgcctgaaatcatctggccctggacgctgataatccagttctgcaccgcatactggtccggcctgtcatatcccttacccacggccttcccatacttctcctccagccatgacacaatctggacataatggtttgtctggctgccggccttatacgcctttaactcagccaaaaggcgttcataagaaatacagcccttcttaaccgcatcctcaatgtccgccgtcttataggcaatatcatccgctgcttctaatataaatgccaacggatgcctttttcccaatgtgccggtagactcctgcacatcctggaaattctccctgtcgccgtgaaaatatcccatctttttcgttcggatatcaccgctgtccttgtcaatctccagggaagataccggatacttgataatagttcccaagagagcttttgtcaagttcatgccgtgctcatccaccaggaaatgaagccttgtcaccaccctgaacgcctgggtatttccctcaaaatggcagaagtcctgtaccatctggggttccagaatctccgccagggttctccccttaaatgtaagtctctccagattcttcttaaaccaatcctgaatggctgtctcgccaaagtggccaaaagggggattcccgatatcgtgaatcaatccggcacactgaagaatgtcacacaccgccgccttatgctccggtgtaaaggtttcatccttgataatagtacggatgctctccgatatgttctgtcccagggatttggccagggatgaaacctccagggaatgagtcagcctggtacggatgaaatcactcctgtccagcggaaacacctgggtcttatcctggaggcgccgaaaggatgcactgccgataatacggtgataatctttctcaaactctgtccgcaggtccgtggaggactgtttcttgtaactgcggatgcggtcgtcgcaaagcagtgtctgccaatccatacatacctccttactgctttcccgcctgagtcctgccccttataatccatcaatcccggcaataataccgggccctgacaggacaaaacgcgggatacgtttcattctagtatatcggaagtcgattcccctgtcaaatatgccttttatatgtcagaatatgccctaaacatgcgtctatatctattatcaacaaaatcgtgaaaaaagcaacaaaaaactgcatcttttgcagttgacatccattgttatttgtgataattttaaatgagaaaagcaaatgaataggttcttcggggcagggtgtgattccctaccggcggtatagtccgcgacccgctgcatgcggctgatttggtgtgattccaaaaccgacagtatagtctggatgagagaagacaattttgttcctatgaatattgggtgttatcccttatttatattgactatgaagttaatctcaggttccccggaacctgagattttttgtttcctggaacttcattcattgccgaaccaccgtatcaaaagcacttatcaaggaggatttgctatgaaaacaaaatggagtattcagaaactaatttacaccggtatgctggccgcagttgccggcgccctcatgtcactggaattttccgttccaatgatgccgcccttttacaagattgacttcagcgatgttccgtccattattgccctgttcctcatggggcctgcttcagctgcctgggtggaaatcattaaaatcattatcaagcttatcacggtaggcaccaattccatgtatgtaggggaatttgccaatctcatcggagttgcattgtttgtaatcccaatgtgggcagtttacaaaaaaggcgggaagacccgccgggcagcaatcgcgtcattggctgtcagcgtccccatccggactctgttcgcctgtttctgcaatgcatttatcaccctacccctttatgcagcggccatgggactccctctgaaccaggtgattaccatggtggccgcggtcaatccggccatcagcgatctgaccaccttcatctttttagctaccattcccttcaacctgattaagcttggacttaactgctttgtgggatatctgctgtacaccagactgctggcagtttatccggctgtgagaaccgcgtgaggaaatgcgggttaaaaaacaatcaggaggttatatacacatgatacgaaattatcgggacttaacccggttagagatggagcaggtcaacaaggatgaaaccattgtactgattcccctgggcgcgctggagcagcacggaaaccaggcgcctctgggtacggacgatatcatcgcagaggccatgacagactatatacgcagggagttggaaggagagccgtcatctgaggattcagattttcccatgctggtatttccggtcatccccgtaggtctgagcacagaacacaggaacttctgcggctccatcacattgaaacccgacacctattaccatatgctgtatgatatcagcaccagcctggtacaccacgggtttaagaagctggcctttctggtgtgccatggaggaaatgcccctattgtacaggttttgagcagggaacttcgcagtgagttcggcatctctcccttcattctttcatccggggcctttagccatccggatgtgacggccaccatttcagagggaaatatctgggacttccatggaggcgagatggaaacctccatggtcatggccgtggacccgtccctggtaaagttagatacctcagaggcaggaattccaactgcatttaaagacaatcaggcactgaggccttatggaaacgtatccattggctgggtgtccgaggactggaaaacagcagacggcaaacccataggaatcggcggagacccgtcaggcgccacggctgaaaaaggacgaattattctggaaaccagcgccaaggtgctggtgccggggcttagagagattcgggcatggaaagggtgagggaggcccgcgttctttataccctataacagttttatggcaaaggtgggtgttcgcccacctttcttgttgcgtgttgttagttatagctaatgtttatgattcaaactatactgttttcttagaaaaaggggaatgatgtttt

SEQ ID NO: 3230 - DNA, 10395 bp, Unknown
  gut microbiota DNA sequence
tgttccccatcctcctccgtatatcttccgtccagccccgaaatccataccgcctctatatcctgatattgtccgtcttctgagggctggtggagcacaagaggtatttccgatacatttcccttttcatccaccggatacacagcaaattttgcaccgtttacctccttgccgccggtaatatccaccttggaaacctccagcttaagaggcttatcccccatctgaaaatattgtatctcttctaagtgtcctgtttcttctatattaataagtatagggttcgctgtggcatagccctcgggattttctgtctctgccagcacataatttcctgcaggcagatattccagacgcacggtaccttgctctgtataataataccgtccctggtatgtgccgggaatctcccggaagtcataatcatacttcataattggatgatttccgcctgcgtccgggaccacgcggccagttgctgccacatcctgcccgtccttataggtagcggcccggaaggtaaatatccttcctgtctcatcgtacctgggaattccatgatccagcaccggaaatcctttttcatccagtatgggccggtataaagtcaggtatgcttcgctgtccccgtagattacatcaccatttcttgtgtcgtatttcagaatatctatggatgtaaaatcatcctccatctcaaagctctgtacatcacgtgtttccaaaacgtcaatatttacggcctcagactgaacataaccctgttcatagggagaaatggtttcctccagcacgtaatacccaacaggaatgtggtcgatccagtgaggcttagttgtcgttgccggctccccatgttcatccaattttatatttccgtcatcatcgtactgatatccgctaatccatgaagcatagacctggccttttttgtatgtgccgtcctgttccctgtgagggctgccgtcactgtccagaccggcccggtacagggtcatgactgctccccttatttccttctgcgtccgcacatccagcttcgcaaatgcggtcttggtaaattcattctgcaggaaatatttctgcacctggtctgtatcctgaagtacaagccccatatacatggcctggatatatccctggtcatagggaactccctgctcttccagtatataggatccaaagggcaggcgggcaatcaaatgtctggcgccggaagtttcctgagttccattagaatccatactgctgtctgttgtccaggactcatcctttgtgactacatttccgcttgtataatagatgggcaggccattctcatcatccacagttgttttgttgtcatagatggtttgtccatttttatcttttaatacctgtatggatttgaccagtatcttatttccctcatcatccgccgtgtatgccagcatacggccataatcatcatagacatatgccatgccggtaacggagtccgcaaagcacagcggatttccttttttatccagtaccagcagtttgcccgtatccgggtcctccctggtatccacctgagtcaaatcatggaaatacagatttacagggtcattatccacaataacagcatcccatacatcccacgatgctgtatgtgttttcacggcaccgcccggactgttttcctctccaaccacgcgtatttccttatgggtaccggtatttgtgtccgtgatcctcgttaccttgccgtccttgacagaagcgcttacccccttatagacatgttcccctgttttttcaatttccatggcatggtacagggacaagactgcgccggatacggaaatgtcaaaccggattcccctgcctgtaaaggtaccgtccagccggtacaatggttttacaccggacattgccttaagctccttctccgtaccctccactatatgttctgagtattcgtcaaatgacttggtcacgtatccatcccactgcattgtcttcggattgtaagcaatatcccttacatccccccgttcctccagcttctctttacggccgcttaccttataaaccagcagatctccggcatcatttaccgtaacatccgtctcaaaacctccgcttgattccaccctgccctggtcatcggtcttctgaagaatattctggtttcccaccagtgaatccccgtcctccaccttgtgaatttccatcctggaaggatagtcctccacctttatctggctgaccgtcctggtacggactttattggtgctgccggccaccggaatggcgtactggtatctcacagctgtttcctcttcccacccatccgtggttccgtctgcgtttcttctttccctgtaaaatgatacgttgtccgcatatacttcaaaggctaccggacggctcttctcatatcccttcggggcctgaatctctaccagcacatagacgcctgcccccaatggtttatatgtctctatgtatcccacgggtacctttttcacctgaccgtcaacgaccagttccctgatggtggaatatgccctgaaaactcctgtctcatttccctcctggtcttcctgcctaatcagctggctttcatcatactggggaatcccatccttatccaggcgcacaggcaggtcgtccgtgctcccattgttcttacctactctcggatacaggatccttcttccgtctgcatccgccacaggatttccctgccagtccaccgcctcgccgtacagcacatttccggaccctgtcacggtgcccattccctctttttccacctctctcttggccgcatatattttaaacaatgcaccgtcatgaataatggaatcacctgtctcggaatccagtttctcaatacggagtctggaattaaaatactcatcctcaaaatcctcctgggcaaacgccacgaaattaaaatcccggccatttccggagggaatcagcgtctccacatttcctgtgtccgggttaattctgtccaccgcagggggaagcacggtccacggaaccagcatagaggcaaatttgccgtcaacagcggtctgcatccctttcatcgttgccacctggtccctgacctcccgctgtccgtcctctgtttcgtagccgtcgtagattaccccgttcattattccggcatcctcgctctgggaggtatatccggcataatatccctttacagtatcatttctgccatccatgtactcttcttcatagggagcctgggacgtcaggctgcggcccggccgcatatccttgtccagaccatatttatatatctcaaatttcccatcctgtccattggcctgtatgatgtgggtctcctcattaaaccgtatcttatatttacgaatcaggtcatccggtgtgtctgtgctgtcataccggaaataaggactgcctgtctggtaattgacatctgtttcccctgtgccttcatcctggccgatatccggcacaaagggaagggttatttccctgggatagtccctggtaaaatgccggttagccagctcccggtccacatccgcgggaacctgttccacaatgacgtatgtgccgtaggcaagcatgatggaatgattaaaataatcgtccttcccattcctggtattgcattgcagcgtggtcacatcaccatccgcccctccgcctgcatcgctgtcccaggcaatagccagcctgttatccagtccggaaaaaacagacagatagctcccggcctcatccgcagcccgaagaagggccttttcgtaggctgtatcgctgttaagcccaggttccgccgtaagaatttccgctttataggcatctatatcatagtagtccacagcaaactgctgtattgcctcctggggcttttttcctttttccacctgcactgccgcgtacatggcatcaaagaatttcgtgtagtcatagcttccgtcctcttttgtttccaacagacgctgcccgcttccatccctgggaggaagaaaaattttctggacatctcctttgaaatccgccgtccctatatcttctgaaatgatattgccggcactatccacaaagatattttccaggttacttttcagatatgccttgaatttaaactgtttcagcagctttgcgccctgggaactgctgcctccgttaaacaatcccagcagcacggtcagcgggtcattgtgaacagatccgtacgtatttactccgtcataggatgactgggaaatatcttttgtgacctttacggactgctttataactctctgcaatacctgcagcggactgaaaccagtgcccgcttcctgtaccggctgattctgccctggataattcaatgcctggaatacaacatagcttccttcatccaacggaggaaccgcagccaaggcgcttaccccggctcctgctatgtctgtcagatactggctgtaaggcaattcctccccttcccaatcaatggtcttctctcttgtcactacccggaattccgtatattccggctccgtcctgtccttccagtctatggtattctccacatgaaccgcatagtatcccgtggcccaatcatagacagcagaaaccggctcaggcttatccgtttcgtatgtctctgtcctgtcctcatactcatagacccgctccatgagaggaatgggatttccctctctgtcaaggacaatatccccttcgctgtaagtctcatacagcggctgatacacggtttcggccgcagcttctatatcacttccaaaaggaatgacctggtttatttcccttttttcttttattgatgcaacggcgcttttcaggctgtattcaccctcttgatactcaatccagtaaccaaccttcccggcaggtccccctgtcacctctgctgtctttcggacatacagcttacggttcacaaaatcataaaccgcagggaagccggcatggcccaatgaataatcgtgacgaagcaaggcaaaaaagctgccctccatctcatatatatcctccacatacccgcagtcaaagaagttatggactgtgtaccaatccatgatttcctctgcggcctgagcattggtctgacccgaaagccggatttgggtccatggcgaaatgtctgtaaccggtctgtatccaagctgtcccaacatgccgttaacctgttttgacagataatgatgttcaatggcctgcccccatttactcatatcagccggtacagccgtaccgctgggatatggggctgtccggaagcggtagggcagagtctccccatagggagtccgctcccccgtgtcactgtctgtagcagtatccagccggataatgggattaccgtcagcccctatcttatactcccctccttttgccgtctgatagacaggcctgccctgctgatctacttttggctgaagagaactgcccaaaaccgccttgtacgtctttgtctctgtcccggtccttatttcataaaattccgctccctgtggatatccggtcaggatgatatcatatccattttcagttttatagctctccactataaaatcattccaggaaccgtctgcatccatggaattataatcggacaaacctcctgatatacgggcctgcccggcctcatggatcctgtttactatatcctgggtgcggttgctctcctttaaggaaatgccgttgacagataactcatacccctctgacctgctaagctccatcacataataactgcccataataaggggccgcccaatccactggtcttcattggaaagcacataatcaggataaacaactgtaccaaatccttgggctgaggaggtgacagaggaaccattatatagattctcaggtccggtggcgttctccggtgcgattatagttccatcatcactcaaccgggtacctggtttctccgtgtacgccaggaaagaggcatttccctgtttatccgtggctgctacggctgtcaaatcattctgattataaatagtgccggattttccatccgggtgaatgatatcctgggccgcaaacagtccatagacagcgccctccagcgtggcatccccctgggtcagtccataacttttatccccgtccgcgcggtacagctccaaatctcttttattgatatgcagcctgccctctgtccgatggtcccacaccttaaaggtgtaaagaatcgtatccggttccccataagccgatacatccaaggctcccagatcatcgtccataaatgacggcagggatactgatatggtgtcgtcgtcatcctcttctccggaaaacagggatctgataaaccgcactgcacggtttccttcctcttcaggttcttcatctccgttcccagtgtctgcctggaaatacgcagccatgccaaaggacggtgaaataggatttctggcatattcgtattcttcataaatttggctttgacctccatcctcctcatccccatcatgttgactggtgccgtcctgattttctatatgagaattcccttcagcctcatcccggatatccgcagtttctgtggtgctgtcttgtatctcatgcttttccttgtctgtggtgttgtctgtggtgttgtctgtgacgttgtctgcggtgttgtctgcggcgttgtctatactgttttctgggctgatttctatattgatttctgtgtctgcgtctgctttaccatttgtgtctttatttatttcttcattcatttctttttttgtatcttcatctgtttcatactttatattttcatttgccgtatcttctggtttgttttgggattgatgtttggaattaactgtgtgttcttctgatgaaatgccggaaaatagaatggtttttccatggcttgattttaatagaataggggatgcggacatggaatatgattggacctgaaggtttccgcttttctgttcttccttcttttggctcccactgtcttgatcctccctatatgaagtttcatttttctgacggctgtctcttgttttttcacttatagaaccgtcgctttttgggccttcactcccggtgctctctggccccgctccttcacttccggagttaccggcctctggccctgcgcctccactcccggtgctctctggccccgttcctccacttccggaattcccggtctccggctctgcgcctccattcccggtgctctctggccccgctcctccacttccggagttcccggtctccggctctgcgcctccactcccagagttctctgtctctgtttctcccccttcggagtttcctgtttctggccctgcgcctccacttgcggagttcccggtctctgttcctccgctttccacatcctctttgttgccattttccggatttttttccgtcatctctccatctttctcctcctcaccttccggatttccattgccgtcctcatcttgtcctccgtctccggatgtatcttcttcctctccctgtgttccatctccagcctcctgttctcccgcactgccggaagtattttcctggtccccgaaaatgccgccggcagctgctccgtccgcaggaatctccggtttctttttttccttttcatctccccataaactgaatatgctgcgctgttccccaagctccatctccagggcatccggaaccggatatttgtaagctcttctttccctcattgccgccacgtaagtgtacacaggctccactgcctttcccacaaaagagcctggcctgtatacagctggccgcgcgcttcctcccgcctgggcggctgacagtacaaccgtttctatctccttgtcatcgttgtgcagtccatggagaatatatcctgtcctggctgtcttttcctgcaaatggtaactgtattccaattctatgaaccgttcatacgtctcatcccgatccgccagcatggcttccatagccgaagtgtcctgttctcggttgtcctcatcattgttcagggcatggaaatcacaagtggctgcacacaattcctgttctgccctccactgtccgcgaagccggtcattttcttcgtcacagctgcaatcctcatcctcctcatggtcgcactcagtccattccggtgcaggatgacccatacagtatgttttgctgtaattataatatctggtatcgctatgccttgcatatccatccggatccgtggtcaatatatcacagacataatcgttttccggttccggcgacatgcagtttaagtagacctgcccgctggtcccatctggttcaccttcctcatatccctgttcatttacctgagaaaaatcaaaatcctcccacacgttgaacaccgttccctctaacggttgattcgtctcagcacaatatttctccaaatcaatgttgtaattgctctgaaatgtttcagaatggcggtataattccaaatcactgctgcccggcagaaccgcatctgttccaaccgaaaaggagacagatgccatgggccggttaaaatccagccatcccaactgcttctgaaggttttcagatgcagcaggggtaaagatataagcataaaaacggttttcgatgccctggatctgcgcggacataattgttccctggggctcctggtttccattgtactgaaatgtcacacttctgccatccggcgcaagtttatatgaccactgattatccggaaaggaccaggaagtgtcctgaagctgcggacagctgctgatatccagtgtaagctcataatgcccgtctttcaaagtcattttttggacagaaccagtccacgcaggaagggaagaactgcccgtcccattaaactgggcttccccctccagtatgtgggccttcatttcctcataatagaccataaccatggcatccccattcattactgcctggaatttttccatggcctgcttctgcaatgcccagttatgttcatatccattcatgcatccccagtaataaacctggactaccccgtagcgcgccggaacataatagttgtccgataccagccattcataggcaagcaccatggacagataacgctcaaatggcccgatgacaggaaccggcttccccggctccacataatattgctcgtatttggccggacttccgtccggcagtttgtggccttcctgtatacataatgcaggcagcgccccagccccttcacccacctggtaaatgttcatatcccggtgtgtccttccgaatgcattcagattctttccccggaacacctggcggtatgggtttaaattaatcaaatccccggctccgctggtggtccgtattgctgtacataccaatactgttgcaaggaacaatgccatcatgcgtttcagtgtcttcattatcctcattttttctcctccggtaaaaaaccttatactacatgcctttgacgaatatctgtgaaatatagatatatccgccgctctcacagacacctgcccctgtctccgtccatctgtcatccagcaattgcttcttatggctctccgaatccatccatttttcgaccgccgcctctgcaatcatttccataccgtccctggaatacagctttgccaggttttctgcggaggaataacgttccacggttattgccgtatcaaacttacttttatcgggacgcgtgtgactgaaatatatacatgcctcctctgccctggcagcagcattttccattaattcctgattaacagataatacgttttcccctcttttctgtctctcggcattgactaattcaataatacggtatgctaattcatctgtcgaaatatcttctgttgaggttgggttagttctctgatgttccggttcttctccgttccatgttctgtttttaccatttatccggtttgccatatccgtaaactgtatgtactctgtttccgacatatttatctgccatgttctgttatctgctccggccatctcctccctctggatcaccccatccattatccaggctccttcttcatttacctgctgtccatccggcgccgtggtatctgaaatcatgtatccgtccgggccaaaataataatgttccgccattccgtcctgattgccgtccagccactgccagcagttctcaggatagcttccattgtcattcttccaccgccacccattgccatcctgcatccactgactggcataaaccggcattgctgccatgattgataacaggactgacaggacgggtactgtaataccctgtctgaatattcggttgatatcaattctcttggtggccttctttttaactgttttcttttcggttgtttctattcccattatgttacttccccttatatcactttccgcaatttttcttcccgctatttcacttcctactatttcacttctcactat

SEQ ID NO: 3231 - DNA, 389 bp, Unknown
  gut microbiota DNA sequence
aatttcctcttcctttcagtgctatactgcacattacagcaatttcataaaataatgtataatttctgtcaactaaaaatcgatatctgctcagtactctcacagaataattaacatcgaacaattacctgtagcgatcctcttaaatgcattatttacgagaattgctataaaccttataactgcatattactttctacattatacacactttacgaaattcgtccagagattttacacatttttcacttttatacatcaaaaattgcgctatatcaatgtcttttgaatgccatacctgcaggctgcacctgaatctccaactgtttctttgtcaccggatgctgaaatcccagttttgcagaacagagagccagcggttcctgact

SEQ ID NO: 3232 - DNA, 22060 bp, Unknown
  gut microbiota DNA sequence
acagtacaatggccagcaggataagaaccagataagccaggcccactaatttcacgattttctttgcctgggacgaaccttgttctcttattttccttaatttctgttctaattcgtccgcagcctgctggccgaactccttggcaatccagtttgggttatatttgtcgttgttcttaccataggtatagctgttggatatctgaaccgtgttcttggtaagctccccactgtgattgtatttccgatagtcataatatacggtgaagaaggagaggactggaatgattgacgcatactcgtcctttatatgaaggaaatagacatccaggttgtctgtgactgtaagaggctttgtgatttgagctatctgtttttcatcatcatagatggacacataattgttccttcccctatcaaggctgtatcccagataggcatttcccatacactcaatgcagaatttgctgtcaaacaagccgttctgcatgacatagaaggacccttcgctgccattcctgccgatgatttcaaactgcccgaaacgctgcccttttgtcagcaggtatttgaagggaatcaactcctccacgaggttgtcgatgaatctatagcgggtagtataaactatttccccggcaggattggaaaaggtgagttcccgtaagtcttccgcattgaacggcagggaaattttcatccacggggcttttgcctggaacaagagttggccgttggaggtaacttcaaataaattttcagtatttgattttgtttgttgtatcgtaaccagcatagctgtatcctttctatagaaaaatattaggaaatgcagatgccccggaatcgcatctgtttcccacttttatacgaaaaatggggagttattttatgatgtgtgcagtaataatcgtataactataatagttgacggttatctttacactgtcaatttcgcagtaccaatttttgccctgccggtatatatggcaattttcatccataattttgtccttacaatattcaaccacgtcaacattttctaatttcagattccgtctgattctgtcagcgcccatttcagtagtatggatttcatcaatattatcaatcaatatgactctatcactcatcatgtcattctcccatagcttccgatttaaaaagttacctatgttcattatagtcccatatgtcaatcaagtaatgatattcatcgcgggaatcagaactagcctccagcatgcggctcaaatctgtttcagcgagcaggaagcccctggtatttccatcatgcatccacaaggaggggactgcaagccgtaagtctaacagcttaaagccaggaataaactgtttctgccggggaacagcacgataatctgctgtatggcgctatatcatttccataggtggagacataggtggaaaacatttcgcttaagcgcggattttcattcagtcccataattgttcagtctgtttatatgcaattagtttctggcattcggtcattccattatctgtcttattctgattttttgtgttgatcagctcccctacaaactggaagttacgttgtcaatttcttttctgtttcagctatgtctttttcaatcagcggacgcatactgtccttgtatttcgataaatctgcactccgcaaacatgataatattacgggtatatattgtggctttgctgaaccaacctgtgcaagagcctttatgcactgcctggctgtgattggcttttcatccgttatatgtgcaagaaaatcagaaattatcaagtcgaaacgattttcgtcatcccattgagcatttgccgcaaggatatacaatgctcgatttctcactaatgattttggataattaagcaaagaggcaaagtcatcaaaatattcataccattcatcggtttctaaactttctgatatgattttatcggcaagagcacaagcatatttatcgtcttttcccgtcaacgttgctgcaatattttctttcatggctatccctctaacttctgattttttcattctttgcgtttgtctgacaaactggaatttacaagattaagattggccgggtacttcggcaagagcgaaaatcatgaaaaccattcaatttcaaaatcatcatttataatttgctgtaatattccagcttctgttatgtcccaataaagtaattgctctttatcatgaaatattatgagataaaatccaccagtatcgtctgaatctccacaaattccgatttgtttatatggcgctatcagcttataaaagtatagcatgtacattcggattccacaacagtttccccacccatctgccagttgccgcatatacttgccgtatgatataatttatcccatgaacgagagggaggaagcagtatgccggcgtatttcaatctatcagtccagttcagaagggatgagctttatcccacatctgtgaaggatttctatgccttgcttgatgaagcgggaatgaaattccaatcaggctattggggatttgaggaggattcattggaagagaccaccgaatggaaccaacggaagctggaagaggattttaaccttgggttcacggagcaccactcacacgattataagcaggtgatatataagtttggcggttattccgaggtgcgggggttctggatgaacaattacccagaggacggggagtttacccatgaaatcatcataccggaatcagatgtcctggcggaaggatatccagtcagattcaaggaagaaagaattgaggaacttctgggattctccaaaaggatatggcaattccctcctgtcagggccatacagacgggcttggaaattgaggatgactcagccggccttgcggaactggcacagggaggattcccgaacgcctggccttttgctatcgtggaggactcaagggcttgctatgaagattccatatatgatatccagcccataaccgaggggaagaaggggctcctatttcggcgtacaggagctgacaatgaatagaaaatgaggaggatattatgatatcagctttttgggagatgttcaagccgctttatgcagtggatacattggaggggtatacggagaatgaaattgcatatttgaaggagctattcggcgctctgccgcaggtattggaggattattaccgtgccgccgggcggacaaaggcgttccactgtgttcaggacacatggatactgccagaacatttccagaagtgggaatggctgtgggaaccggaatacttgattcttctgaatgagaaccagggagtatgccgggccggaatccgcagggaggatttgatgctgccggaccctccggtttatgtaacggaggatgataaaaactggaccctttgcgcgcccacgaccagtgagttcctgtctgccgcactggcttatgagtgtgtttttacctttgaatgcaatccggaagaattctactggttgacagaggaggagctggggctgattcagtctaagctcacgaagcttccttttgaaataacaaattggctttgcggcatgcgtattaccctctatagcaatgagccggacaatatggtggccgtcatggactgtggagactgggaactccatggggacggggaattgcagatgctttatggggcggcaagtgaagcctcatatgcaagcctgatgtccgtcctggaaggcattggggaagcgatataatttaatgaatgtggattgtgaaaggggaagaaagcccttgattttggtggaacctcatacgccatggacttggagatagagccaagcaacgaggaaggcgggattacagaggacgtgaactattacgatggctccaagcccaagaacacaatggagctggttgcgtggtttgataaggattgataagggggcgcgtcagacagatgggatatgatggtaagtctttatttgaatgtgtccgttgcccgatgtgttcttgccgccggctgcctccatatggaaatttcacggttggattggattacgcatttgattatataattgacgctatgaaagtgacggacaacctgggggaaacaatggtattaccagaagctgttttcctttcctgttttgaaaatctgggggaggctgtgacttccttcagtccgattcactcagatactacagtataccatttatatctggttttaagaggtgatgattgcagcctggaggaaatcaaggcatatgcaaaggtcatgaatgtgaattatctccaggcaaaacgggcattgatgcagaagcggaacctgattgcggccgggagtgcctatgatatatggaaaatgctcggcaggcttgagccgtttaatgtgcatcatgaaatctggcctgagtatccatatggataaaagaggaacaggacacataaacagagtatataggggaggtgctggcatggcaagggcgtattttgggctcgcaaggtggggcattaccctgatactgccggaatccctccccgcattccaggagatagtgatagcggatagaaggatgaacagggatgagcagctggcagccctggctgttaaaatatgcgaggcaatctgtagggagaaatatatgatacattttggcgtttgacctgggtttccggatatacaagggcatacaaaccccaggctatttgccatggataatggaggataaacgaaggatatggttgaaaaacagcgcattcagactatttttacagcaaaggattatatggaactctaccggacccagaaaccaacggttgacctgatgcttggaattaaagagcagtgggagtttgaggattttctggaagaggaagattggatatatatgtagatatagatgaacgggataacctggaagaaaaaatggggctttgcaaccaatacctggcgtgtgcaggctattcaatccaggtagaacatgacgatacctattgtacatgggattatttcttgtcggttcaacatgcaagaacatgaaaaaagacggcgttcctgccgtttttctttgcaagcggtccttccagtgtgtttttcctaatccggcaattaaaagcaggagacagagggccgggaggctgatttctgttatatatgtgctgttttggggctgaaaaagtaaaaataatagacctgaggtatgtgaaaaccatacgttgggtcctttttgcatgcatgaaatctcccaggcccctttgccccaggctatcatgtgtatccacgaaagaccttctttcacatagttgaatttagttcacaggcagatcgtcaaccatacggacaaaccctcacgctgccctaacatacgatatggaaaaccctgtcttttagctgattctgcacattattaccaccggcttaaagctattagtctgtcaatgaagctcctataatgacgaaacggttcatccatttatcgtatatactccaaagagcagttccccaccattctttaccatcatcaaaataatttgagaaatcatcattccagctaaatatctccaaatcctttctaaacagtataggaaatagtgaatcattgattttacgaaagtcctctttgctgtaggggataccataaggcggccctgaaaaagcaagccaatagttcattttcatcttctctggcgtttcagagactcctttattaaaccgtcctctgttatcctcataaaagaacgcacctgcgtcacattcaatacaccgcatgtctgattcatgcacataaaacagaggatgttttatgttgttgcctacacgatgccttgtgttaagtattgacaatattgcttcaattacagcttttttgtgagattctgccccgtgatagtcctcatcccaactgagcaaaacatagtcaagcagaagttcgttatatttttcagacaaagttgtatagaatttgtccccgacaagttctttcatttacttttacctcattatctttatcaaccccgatttttcatccgattgatcatcccattcaactcaggaagctcacatttcgcttttagcctgtcacacaagttaccaaataaaatcctgcttaacgcctatatgaactgaaagttaccaaaacaattcataaccgattgtttttaagatatctaatccattcagataatgataaccggtcaggttggataaatctatctgtttactgcactgttgtattatctgggaaacgaacaatggctggtttaaatttatgctcactcgctgtccctgaaaaaccgcggggaggccgctgttgagcaggaagtgatccttaattgggaaattgatatgcagggtagctttggggaacgcttttgtagttatcaataggtatggaatcctttgataatcataatcgtcatatcggaaaagccacatatattctgaattgtccactatgatttttctgaacgttcccatattgtgtgattcctttcattaaatagcatatcccggatgaaacggtttcctggggccaaggttatttgcgcgataccttgggcgcagctaacgacactacattcccagtcccgttctaaaacaataccatcaatctgctgggctttatataattcatccaatgattctctggacctgccttgatatgtatttccttcaccgtaccgtcacctgttactgtattcaaggtcattgggtctgatgaatgttttcttccaaatagcaatagtcatctaagaaacgaggattatcccatgtgctcctggctgtttgcagcaattttgcggcacgggcataatctttatggccgattgctgcataaatatcgagtacagcgatatttcccccatataacttgctgttccgatatggatttaatatcctttggctgctttcgtataatgccattgcacggcctgtttgtttttgatagaagtaacaaaggcagagattgagacgatgaaccaattctaaatcaccggacagtttcacatctgatatgctttccaatagttcggcagccttgtcatattgtttgagtttgcagtatcctgctgacaaattgattgtaagcatgcagtttgcaaagcgacctttggcgagacggcgcattgactctacttctgtgatgtattcctctgcgcggttggattccaacagatgtacggctgcctgcatctttttcagataacgccggttgtagaggaggttgaatgctgctgtgccaacaactgcgattcctccgcaaatcagataatacttccaaaataagtcatctgggatttgaaatactatttttacaaagagtaacggcagtcccaaacaaagtccggcgataataattttacccattcgtttcattaatctgtcctccgataaaagctttgttttgtgctggagatggccgcgtcctctaggtcactgaaggaatcggaaagcttaacttttgatgggagacgtctggcaaattaactatttagaacaaaaagataggcataaatactttcttcagacccatgttcatatcgtttcatacatctgataacaggccaaatgacagtaccgtccgctaacttgacagaaatatgtatctctccctgtgggtcgctatcatcagtattccattctccaccatataatttgatagcagattctccaatatatgaagctaaaccaaataagatttcaccacggttttttgaaagcagccctgtttcggaactctgctcatcaaaaaatctgtcgatttctttcatgctttctaaagaatagtctgccttgtagccagatgaatttagcgctttaaccacccaatctgacgccaaatgaatatcctcttcaagcgtattattatgtttcttctcactaccattatttttcttaaaaatcatcctaaaagttttcttgaaaatccccatatcattcactccaagtccattttatgatttccaagttcgctatagtcccatatgccaatcaagtaatgacattcatcacgggagtcagatccagcctccggcatgcggcttaaatctgtctctgtgaacaggaagccctctgtttatatatggcagcccatttgataagctatatttatgtaaggcgttccacagacttttcctgcatccataacattcgttgcataaatacgtccttttatctcatgtttttctagatgctcgacaaaaccgtccaaatcacctaatgaacgttttactatgtcttcgcccagaccggcggaaataatataataaacttctttttctcctaaatgctgccatataggatatgtcctgtcaataaatgttttcatttgagcgcaaataccgtagaaatatacaggtgttgctaataccagaacatctgcttttttaaaagattccagaacttcagccatatcgtcttgctgaacacaagtgccattatttttcatacaaacatcgcatgctttacaaaatcctattttcttttctgctaaccgaatcagttccacagagtttcctttatcctcagctccttttttaaattcttcacataatctttgagaattccctttttttctgggactacctgaaataataagcacatttttcattaagtatatcctccgaattactaaacgctatccgcttataaaagtatagcatggtcccctgatttccacaacggtttccccgtccggctgcctgttgccgcatgcacttgccatatggtataatttatcccggaaaattcagttttaagtatccctgccaggtctgttctttcagggaaatcttgccgacctgatagccgtattccgtcagttcctttttataattcaggaaagaatggtctatggatatgccggcaaaatcctgtatttcttcaaaggtaagcctgaatgactggcttccgttcttctgtacatactcccacagggcgttgtatttgctcattgtttattcctgccttccacaattttggcttatatcatcgtgataccacataacggtaatgaggcatatccacacctctgtaatgttttgtccatgtgccggtcattgtcataccgtttcttatggctacgttttgggaagctatatttgtatcccggatgatagagcagacttcatctgcctttaatatttcaaaagcatacgttttacacgcctttgctgcttcgatggcataccctttatgccagtacggccgcgcaagaagataacctatttcaagcacttccgtatctttccacggctgcattgtaagtccgcactgacctatcatttcattggtttcttttagaatgactgcccataaaccaaagttccatttttgataacggaaaatttgtttatccagccattcctggacttcatcatcgctgaatgcaccttcatatgcatacatggtatcctcgtcctgtaagatgctgcataaagagtcaaaatctgactgattcatctcgcgcagatataatctctctgtttcaagtatcatatttacctccgaaaatttgagtttatcaagtattatgctgcggtaataaataaagccaatacctatattgtcaattcaaaatccaaggtatcctgctcagcgccattgacaataagcgtgacggaatgtgttcccggataatgtttccttgtccttaaatctgagaaggaatgtttttttatatatgtctttttctggtttgcctttaacaaaatctccgatatctggaatattttccggctcagccttccatctgcttttacatagcccatggcatactccagccgtacctttgttgtttcttttgccgaaactgtaaacgaaaacgtcatattttctccgagggaaatagacgcagagcctaacgtaaaatcagcgatatccacggaaccggcattgtggtacccgaagatatccagaacctcctgatttccttttttaagcagtgtccggcatccatgttttacaatccaattcgtatactcatgcctgccataccaatctcttgcgatttttgtaaccaggccaggatgggtttttgaaatatcatttaaatgattggccacacttttgcggacatacagtgatgggtccgtgttcagttgctccaaaataggaagtaccggcgacgggtcctttttgaagctggtcaatgcctggccccaggggagggcgggacggcagccctcgctggcaagccgccgcacatgctcgttatcatgcctggcccagacagccatctgctgcatcatgcgcgcttcttgctttataataaacggtcttacggcaaactccgcagttgaaagcggggtatatcgttctatggcggccattgacaagtcccaatggcattcatcctgtccatagacttcaacaaaatccggaaagtatatgagtgcattatcgttataccctgaaggatacccggcaatgacctggtctataatacccagtgcctgtttatagtctgccggcagatattttcctaaattgatagtgatttgccgcatacgggccttcagttccaatgcatcccatgtttcgttcataatatggtccacaaaatcattttcctggaatgagggaaagacagcttgaatacgcgaagccaaatcgtgaagcgaatcgtaattataatatttgtctttcattaatacgggcatatgtttcctcttttcaaatgtgattcagccatgggtataccctatcataaacagtttgtctgacttcaacaaaagtatagcatggccgctgggattccgcaacgtccctatctgcctgttgctgcatacacccgccatatgatataatttattttatgaaggaatggaaaggggcaatatgccgacatttcaaatggcggtggaatgtataattgacgcagaagcggaatctgattgcggccgggagcgcctatgatatgtggagaatgcacggcaggcttgaaccctttgatgtacattatgaaatcgagccagagtacccatatgaataagccgggttacttgtgatgggggacggagagccgcattttaaggagataaaatatggataaagacaataaagttaaaaaagagagaaaatattatacttctgggccggggaaaccgcccatttttattcaggctattttatatgagaagaaaatgtcggcaattgatttttttcatttgacagatgcctgcctggattgggaaaagcaaggggacgatattgctgtcattgaacctcttgtcacattgcttgctgcctggggagatgaccttatttttgcgttccatgataccatggcagagcttttatattcgttagacactcagaaaattgcaggggacatttataaggacagaagtttttctgcggatgagtttttatatattcgatgtgctgcattaattaattccaaacggtattacaacgacattgtcagcggcagaagaaaactgaaaggcagcctgtcatttgaatctattctgtctgttcctgcttttgcgtgggcaagagtacatggtaaaccagagaatgaatatccccacacaacaaaatattgttacgaaaccatgagcaatattgaaggatggaaaggaaagactgagagagaggattgagggaatagattgcagagagcagattgcagagagcagattcagaataatctgcaaggggaggttaaacgtgaatgatcttcagaaaaagatggatgtattacaaaaaatagcagcagagtttaacaaagataatcttttatgggctatcggtgcatcactgcttttgtattttaaaggagtggcagaggtgtttcatgacatcgacatcatggttgatgaaaaagatgttgaacgatgcaaaaacattcttttgaacatgggaactatgggtgctgccagccctgatcctcaatttaagaccaggacctttatagagtttaccgtggatgaagtggaaatagatgtgatagctggatttgttatagtagataactgcatggaacacgattgctcccttaaacctgaccaaattactgagtatatcaccataggcaaagagcgtgtccctttacagggattggcgctgtggcgtcaatattatgagtggatggggagaacgtctaaggttgaattgattgacaaatttgcagaacacaaaaccgggaacggcaaaggcgaaagataaaaccatatgatatggtttggtacaggaggccagggcaggaatctgcgaaacttacggaaaatgatttccctgtttcgcagcctttgcaccggccaagcccggacttaaccccgccctcccccggaccggcttcccgtcccggtggtaagtcccggcgcataatgccaataacgcagctgcaacaataacgcagctacaattcgtttatgatttctgttatttccatgtctctcattcgctttgcaggggcataaacggctgcaatcgctgccatacaaacaaagaaaaggattatcagtaaaggggcagcaggcagacttagggcagcgtagctgaagtgagagattatgagaatgtcatataaaagcttgtaaatcagcaaaccggctgcacaacccacaaggccgccgattaaagcataggtaaaggcttcggccgcaatcattttcgtaatctgatattggtccatcccaaccgcccgcattgctccgtatgattttattctggaggatacgctcatggaaatactgtttacgatattcaacaccgtaaccagcgtaatgattgctaaaaacgcgtatatgcagaatacaaatgcaaaataagtgccggaattgtgctggccacgcaggtcctttaatacgcagttttggtctaatatgctgcggattgctgtcacatcttcatctgtcacatcctttgctgtctgtatcatgatgagagagtagtcagtgatgccggtcagacgggtaaatacagcgccggaggtaacaagggttatttctccatttgtaagaccgttgctgctgaaagggttatattttaataagcctgcgatttcaagctcttcattaccaacatctattttatctccgatttccaatgtgctgtctttatcccagaccgcaagcacatatttgctgtttccgtatacctttgaaatattgctgccctttttcagcataccatcttttacaaggcagtccaaatcaaagtcatcgtaagagacaatatcaatcttagccccacctgaatgtaatcctgcggaaacatcaaaactgcttcggcgcccgtaaacgcgttttaccccatgcattccaatgattgtatcaggcaaatcactgctgactgtatttgaaccgtcaatacttgtaatgtttatatcagatgtgccggctgactgcggcataatatagccgacaaaatcgatcagaacagaaaaacttaagaataaaataatactgagggcaaatgaacctgtcataagtatcaggttttttgctgcagacagggcgtgatgaatgccaagcgctgtctcaactttaaacaggcgtgtatttactgtgtggtgtgcattaccatcattttgtgaattgcctgaaacggctgtgacaggagatacttttgcagcccgttttgcgggagctcctgcggcgagtaatactgtaacgatacccacaacgattccgctgacaataccgggcatgctgatgccgaaaagagggatgccggagaattcttcaccgacaataaaacgcagggcagcgcacaggcaccatgtgactgctattccaagcgcaacgcctgcgggaatagcggttttgcaccagttcagggcttccagtctcacaaaacggattatttgctgacggctcataccaagacagcgcatcattccgaaaaactttgttctctgggttatattgctgttcatactgctggaaatcatcaatacggccgctgtcaatatcagcacgaacaatacacctgctgtcagaaaaagggtttgggtcattgtattagttagcaggtcctgaagggtcaggtttccatgcttctccagcaatcgggactgctccattttgacacccatatcagccatgctgaaaacagctgttaccaaaaagacagcaaatacaatgcataaaagtgtcatgctgttttgccgttttctgacctttgcggagatagggataaggcttagatagcttttcattggcggcacctcccaaaatcagtaaggactccgtctgatacctgcaataccctgtctgcggtttgcgcaatactgcggctatgagtaatcataataatggtctgttcatatttttttgacgcttctttcaggagcgcgattacttcgctgctgttttgtgtgtcgagatttccggttggctcgtcagccagaattaacgccggacgcgtaataagggcgcgtccgattgcagcgcgctgctgctgcccgccggataactggctgggcaagtgattgcggcgttctttcagattgagtattgtaagcagttcttctaaatactgcctgtcaggtttctggtaatcaagcagcaccggaaagataatattctgctcaacggtcagttccggtataaggttgaaggcctgaaagatgaaacctatatttcttcgtcggaatatggtacgtttgcggtcgctcatggaaaagatatcgttgccgcaaatcattactttgccggatgtgggtgtatcaagagcgcctatcatattgagaagcgtgcttttgccggatccggattctccgacgatagccacatgctcgcctttgggaacggaaaaactgacattcctgagtgcatgcacagcggcgtcaccgtttccgtaggttttgcagatatggttgatttctaataaattcatggtataaacgcctctttctgttttgataatcccaatataacagagcaatcctacgccaatatgactgtaagcctacaattttgtaggaattagaatttggaaggaattagaaaatttattgtgatggaggtgccgatgcctaatgtgctgtctgcttcaatcgtaccgttatgggcttccacaatcgcttttgctaacggcagaccaagaccgattccttgtgtatccttggaaaaccggctccgataaaaccgtttgaaaatatggtgcaaatcttcgggatgaatgccgcatccattgtcctttatggtaatctggacaacagaagcaaacgcctgccattcgatacggacaaaactgcctttttcagtgtggtcaagggcatttttgacaagattgctgacagcttcgatgatccaggtacggtcacataaaagtgtaatttctccactgccggataagcagatttcttttccctccctttgggcgcgaaacaggaaatgttgttttacgttttctgcgagttcggacacatgttctaaagacttctctaatataatcgtacctgcgtccagctttgtgattttcaaaagattctgcaccagtgtttctatgcggtccagctcctgctcggaaagcaggctgaattcctgaataaccggagaattttttccttcgtcctgtataatgccgttgtaaatattcagggcggcaaggggtgtctttagttggtgtgaaatatctgatatggtattttgcaaaaatttctttgagtttgtttcatttacagcatgggcattcaagatagagaccaaagagtttacttcatggaacagtctgtatagttcgccctcgtcattacactcaatggtaacatctttgttgccggaaatagattcctttatctgtgatatggcgttttccatgattgtatgctgctctctgaaataccggaaacagagcattaatattatagcccccatacacaggctgctaaataggatgcaatacgacgcattcctgacctcaaagcctgctaacagcgctgaaatcaatgtaaaagctaagatggaccacaaaataccggcaaaaagaaatttgattcttcggttggcaaatagtttcatcataacacctcagtctgctgtattccatttataccccatgccgcggaccgtgattatcctttccggtgctccggggttgtcctcgatttttgttcggagcctgcggatgtacaccgtaagggagctgttatctatatattgttcgctgcaatcccataatttgcttagtatctggtccggggaaagtatctggtcaggatgcttcatgaacaggcataacaatttatattcactggctgtcaggtcgagccgttttccgtttttatataccgttcctttcagaagctgaatatgaatgccgttggagctgatttctgcagcagctgtattaaaattttcgctcctgcgaagaagtgcgttaattcttgataaaaatacagccagcttaaagggctttgtaatataatcatcgccccccatatcaagccccatgataatatctgtttcttcgtcggcagcagtaagaaacatgacaggtacttttgacatacggcgaatcttcctgcaaaaatcaaaaccggaaccatcggggagacttacatccagaatagccaaatcataggatccatttgcccataatgtgtcagcttccagtatggtacgggcagcatctatttcatatccctgcttttttacagcaaaggaaagcccgctgattaaactcaaatcatcttccagcaaaaaaagtcttttcatctgttatcggttcctttcccttaaggtccagcagccaatcagctgttgtatcttaacatcgtaatcgtattccctttcaaacaccgcttctctaattgtatacggtgaactgaataaaatcaacaagagagggggagcggcccggcttttaacttaaatacaatgctttccttcaaacggcttttttgttatactgagagtaattgtatgaggatacggcacctgtatgggaggagacatagattggaactgtttgtaaaaccagtatttattttaaagaaaggaaactgagccatggcttttgattttaagaaagaatataaagagttttatatgcccaaacataaacctgaaatcataactgtaccgccggtaaattatatagctgtccggggtaaaggaaatccaaatgaagagggcggtgcatatcagcaggcgctggggattttatatgcagtggcctatactttgaaaatgagttataagacagattataaaatggaaggattttttgaatatgttgttccgccccttgaaggattttggtggcaggataatgtggaaggggtggactattcggataagtcttcctttcagtggatttccgctattcggttgccggactttgtaacgaaaaaggatcttgattgggcaaaagagacagcggaaaaaaagaaaaagttagaatgttcatcagcagaatttttaaccattgaggaggggctgtgcgttcagatgatgcacttgggtgcatttgatgacgagcctgcatctgtggccgttatggataaattcatacaggaaaacggttatgtaaatgatatgaacagtaaacggcttcatcatgagatatatatgacagatgcaagaaagactgcgccagagaaatggaaaacggttatcaggcacccgattaaataagaaccatgtttagccaagggtacttattaaaacaaaaaccattacaaccgccagcaaaatgagtaccagaaaaatcaaaccgacgatttaaactatctgctttgccggggcccagcgctgttcctttgtgaccagatatttaaaggggatcgcttcttcaatcatattgtcaattattttataatgtgatgtataaaggatttccccggaggcatccgtaaaggtaaacatatctttaatccttcctgctcaggtatttgatggtacatcagaggtagaatgtgtataaaattataacatggcgccctgttttccacaactttttctgttttgatatgccggttgccggagggaccctaatatggtataatttaccggtgaaagcgggatggcatagtccctgatataatgaacggccaaatgatagaaagcagaatgtgaaatcgaacattacgaggtggatagaattgatcggaatatatctgagcggtacgggaaacaccaggcattgtgttgaaaaattaacaggactactggattcctccgcagaatccatgcctttagaaagccgggggaccgttgaggcaatacgaaataatgatacgattatactgggatatcctacgcagttttcaaacgcaccttatatggtcagggattttatacacagaaatgccggtctgtggaagggaaaaaagctgttatgtgtttcaacaatgggtgcgttcagcggtgacggcgctggctgtaccgcaagattactcaaaaaatatggtgcagttattctgggcggacttcatatccgtatgccggactcagtatgcgacagtaagcttctgaaaaagacactgaaacaaaacagagaaatcattattctggctgataaaaagatagaatctgccgcgctgcttataaaacaagggatatatccaaaagacggcataacgttcatttcccatttggccggtcttttggggcagcgtctttggttttacggaaaaacagcagattacacggataagctgaaaatcagtaaaagctgcattggctgcgggctttgtgtttccttatgcccaatggaaaatatttcaatgaaaaacggaaaagcagctgcgggtaaaaggtgtacaatgtgctaccggtgtatcagccgttgtcctgaaaaggcaattacgcttttaggcaaagaagtaaaagaacagtgcggttacgaaaaatatcgttagggtaatcctggtttgcaggcgttttggacaagcccaaagcggccggacaataaaacacaccattaccgccaggctccggaaaaaaccggaaccaaaagccggttatgccgatgctccttgacacggcttaaaaaaccccttgcatacaaaggaaaaatctgtcataatatcatcagaatttgtttacagaagaaggggttccatatggactatttgtactgcatgcctgatttgaacaataccagggaaaactgtgagaagatacataatatactggcaaggatgtctgacaagtataaactgaatattgtacctgagccggttaaggcaaagtattttggcggtttggattattacaagaaatatcggatttataaggagatacgggaaatcggaggcaacagcgcagaagcatacctgcaggcggatgagaaagagatgattctcagcgtatgtaagaaccagcaggagcaggagcttatgaagagctgtatttatgcctattgttatccggcgcagatggtgcttaaatcatttaatgacagagataaaaagaaataaccagctggtatgacggacagagagaggagggcttgcctgacctctcttttttgactcatggcaacattatcctggtttccgggtctatatggtaaaatccgcaaaacgcagtccgggaaaggaagaaaaagtatttattactacaatcaggcgcgtcatgatataatacagataacagccagagaaaatggcaggataatcacatcaccagaaagatttaactatattatcacagacagaggacacagtcatgttataccagatttcaaacgggaccgtatcagtgggcggcgagctgattttatcccacattgattttgagattcgcggcaatgaaaagatagcagtggtgggtaagaacggagcaggcaaaaccactctgttaaatcttgtggcagggaagctttctctggaccgggatgacagacgcgaaggggcggggatacggtgttcgcgccggctcaccgttgggatgctttcccagcaggcctttaaggacgggaaccggaccgtggaggaggagcttctgaaggcatgcccctgccgggatacctttgaaagggaacgctttgaatatgagtgtgagtacgacacgctttttactggtttcggatttccgaaggaggataagaaaaagcggataagccagttttccggaggggaacagaccaagatagctttaatccgcctgcttcttgaaaagccggatatactgcttttggacgagcctaccaaccatctggatatggagacagccggatggctggaacagtatatgaaacattataaaaacgcggtggtaatggtatcccatgaccgtttttttctggaccagaccgcggatgttgtgtatgagctgacaggaaaaggactgaggcggtatccgggcaattatacccattacagggaagaaaagctgaaacagattcggcttcagaagaaggcatatgagcgccagcaggaggagctggcccgtttggaaaatctggtggaacggtttaagcacaaaccaaataaggctgcatttgccagggcaaagcggaagacaatggagcatatggagcgtgtggaaaaacctcaggaggatgatgctcatatctttacaggtgagattaatcctctgctgcccggcagcaagtgggtgttcacttcagagcacctgaaaatcggatatgaaaagccgctgcttgaaatcaccatgcgcatacggcgcggacagaagattgcgctactgggaccaaacggagcgggtaagaccacatttttaaggaccattgccggtttcctgccctctctggaagggagctattcccttggaaatcagaccaccattggttattttgaccagcacagcggggccatccagtcggagcagaccgtgctggagcattttacggcccaattccctgcactgacagagaaggaggccagaagtatccttggcgcatatctgttcgggggaagggacgctcagaagaaggtcagttctctgtccggcggagaaaaggcgaggctggtgctggctgagcttttacagagccgtcccaattttctggttctggacgagcccaccaaccatatggatatccaggcaaaggaaacactggaatccgcgttccgggcctataaagggacgattctgtttgtgtcccatgacagatatttgatccggcaggtggcagatgcggtgatgatatttgaaaatcaaaccgtaatgtattatccctttggatatgagcactatctggagcgcaaggccagggagaaccagggcggttccatggcagcacagatcagggccgaggagcaggcgctgatagcaggtatgcgcgccgtgcccaaagcggaacgccaccgcttaagggaaataccggaggatgaggcgtaccgggaatggaacatgggcctggccgcccaacatctggaacctgccgggaatgcagtggaatatctgacggagcaggtgagggaactgcgggccatgtggcatggctcagaggagtattggaacggaggtacttgggatcggatgaatgaatatgaggaccggtgcctgcgtctggaacaggcctgggaggaatggcacagggcctgtatggaatggctggaaaaggcccaggagatggaggttctgtagccaggcgcagtgcagaaacggaagtttttgctgggcagaagggaggtttttcatgctttggacaaaagttgagaaggaacggctgaaaagggcataccatgccaggatgtcccgggccatatccggactggaagcaatggatatttccggtctttcccaggtgtactgtgcggtggcagcagaggaccgggagttgatacgaagcgggggaagagccatagggatggtcatggagggtatgaccatgaggcaggtgatacggctcagcgaacatttccggcagtatacctctatggaatgggatattgactggaaaaaagtggatataaggcagaagaaagactggttccggtcagatagggattacttttggatattggccctgggcagcttccatcccaatggctattaccgccaggcctgtctggaggagatggctggttatcctggcgcgctcccctttcttgtgctccgcctcaatgactgggtgggcgaagtgcgtttggctgctgcacgggcagcagccaaacgcctggagacatgtcccctggatgaattgtttgcg

SEQ ID NO: 3233 - DNA, 33107 bp, Unknown
  gut microbiota DNA sequence
cggctccttttcctgaggattcaggaagaaggagccgcggctttttgctgctggtaatttctgttattttacggcttctgttgttttacaatttctgtcatcttttggttgattcaatgcacgtcttattcgattacctggtcgccgtccttaatgcagtaatttgcattcacgccaaggcggaccatccagttctttgtctcctgtgtaagccagataccgcttccggctccgccgccattgtcattatcccacagccattggggggttggccagagagcaacgctgggtcttaacgccttgtagacctcatatcctacgccgttctgtccgtgatgggccacctggacaatatcacacttaagggcgctcagatcatggtcggccatcagctgctcgccgcctgatttagccaaatccccaaggaacacggtgtttgtcccattcagggataccatataggccacgctgctgttattgacaaaatcattattcatcttatatgcctgattcaacacctgaatcctggcagggcctgcctggataacctgtcccgacacaatatcaccgtgaaggatattctgaggcaccagaccaaaggctcccttgatgtaggccaccatcttggcgacctcagggtccttctcagcataccagctgtcctctgcaaaggaatagtagatgccgtcaatggtaatctctccgttatgcttgtacagaatgtctgccaaagctcccacatggtctgaatcagggtgggtcagaagccatgcctggacatgaccgcccttctgcttaatctggttcagaagataatccgtattattggtccagccaccgtccactacgatgaggccgccctcacctgtctcaatgataaccgacagaagctgggctgccgtgtcgtggttggccagcatggtgagacggccggccccgaacagggaagtggaatctgtcttgggagtggtgacttccccaaatgcggcaatctgagccttggcctgaatgaccggctggctggcagccgctgcctgggatgactgggctgtctccccttcatccctgatgataattttgtccggggaagacagcatctgtccctgggcctttagcggctgggagttggtcatggccaagctgtccagattccctccggtcattgtcagtgtcatgatggccagcagcccggcggcggcctgtttccagtatctgtcaatcctcatcccaatatctccttaatcctctctttactgaatctgagccgtcagctccctctgttcccctgccttcataacgtcgtttacaaggtatgcgctttcatccccctctttgtcgtaagggaacacctgaacaagcacgtcatgctcatcaaagtaactgccgtagtaagtactgtccgtatcctccgggtctggcgcttcataatagaaattctgctccgcaatgtaggtgcccactgccttcagtacttcctggccataaaccacagcaatgtcccctgtggtcttatgggtcacgggaagcaaaacaacgaccctgttgctgccggcatcatacttggcatccagatccatcacataatcagcaaacaccccgtaaggctccaggaactgatccctgaggtcttcccttacctcctgccagtcgatgttaatatttttatcaacctccaggtcaggctgtccgtccccctgaaccacaccgttgctgggagaaacaatgttgctctgggtacaaccgcaaagcagggccgctgaagctaataatatcaatgataatttctttaattttctcatgatatggtaatcctcctttttgtcaacgttactattatagctaagattacaataatttaacagtccttttttcttacaaaattattgatgtttttacaagttcctcttgatttttccaggaactgatgataatatgttcaatatagttaatttaaatcaatttttgaacattcaggaggatacagccatgaaacaagataaaaaccgcagtatagacactccattaaagaacagactggactgggtcacaaccatcattccctttgtgaccatactggccctctgttccctgttcatgatattcccggacgcctcatcccaagtgcttggttctgtgcgatttttcctgggtgaccagtttggaggctattatcttctccttgggctgggcgccttaatctgctccctgtacatggcgttttcgcgctatggcaaaataaagctcgggaatcttgaaaagccgcagtattcctcctttcagtggggttccatgatgtttacggcgggattggcagccgacatactgttctactccctgtgcgagtggatgctctacgcaggcgagccccatatcacggacatgggagccatgcaggactgggcatccacctatcctctgtttcactggggccccatcccatggagcttttacatcattctggctgtgtcctttggctttatgcttcatgtgcgcaagcggaacaaacaaaagtactccgaggcatgccgaccgcttctgggcagacgtgtggacggtgttttgggcaaactcattgacctgacagcggtatttgcccttctggccggcactgccactacattttccctggcaacgccccttctttccatggccttaagccgtgtgctgggcatacctgaaaacaatttcctgaccatcggcatcctggtcatcatctgcgttgtgtataccatggccgtatacttcggcatgcagggcattgccaaactggcagcctcctgcgtgtacctgttcttcggactgctggcctatttccttttgtgcgggggcgagacacgctatatcatcgagacaggcatcaccgcagtggggaacatggtgcagaacttcgtgggcatggccacctggaccgatgccatgcgcacctcctcctttccccaaaactggaccatcttttattgggcctactggatggtatggtgtgttgccacccccttcttcatcggcaccatcagcaagggaaggaccatccgccagactgtgctgggaggttatttcttcggtctctcaggcacctttacatccttcatcatcctgggcaattacggacttggactgcagatgcacggaaagctggacctgatgggtgtctatgcaaaaaccggagatctgtaccaggccatcatatccatatttgagacaatgcctgcggccaaggccggactggttctcctggccattaccatgattgccttttatgccacttccttcgacgccctgaccatggtggccagctcatactcctataagtccctggacgctgaggaagagcctcacaagcaggtaaagctgttctgggccatactgctgatgctgctgcccatagccctgattttcgcggagaattccatggctaacctgcagactgtgtccatcatagcagcttttccaattggtttcattattgtcatgattgtatggagctttttcaaagacgccgggcactacctggacaaagagaattccgaaacgcggaatatggaataatgtaattgaatggtataactggatggtataattaaatcgttgcaaacatcataaaatcaataaacgaggaccggtctccctgtcctcgtttaattttgtacacacatagttatgtacgctccttatccttcattatcctcccacagaatcttctgaatcctgtcctcggcctccagctcgtcacttcccttaaagtaaaaagtcagaaaacctgtcattctaagattctttacttcgtcgtattgcttgacatttgctgtatacttatcgctggtgacaaaaatatcgcagtcaaattgatttgccgtctgaatcaaataagaaatagggattggcctaaagactctttccctgctgtcaacttgtttcgttaacatagaatcacctcaattcaaaacaaaaccgactactggttaccaccctcctctgaataattatacatgcccctatgtacttagaataacatttttttccactaaattcaagggattgacgcattaaatttatatagtttttgtaaattttaaactaaaagtcagagaaaaaccctattttcacctccgttttgttgcaaatgtaacaaagctggtaaaaatagggttttactgtaatttacatttaaccggcgctaacgctgacgccttttacagcccattgataattgcgcagtgcctgctggagattcaggtcagcacacttaaatccggactgggcctggagataggccagctcctgctgcatgaactgaatctggctcagcgttccattctgcctctgaatctgcgctgcattccatgtgagctgggcgctctggtacgcagtggaggctgaatcataggctgcttttttctccagtatggtgtcatacaatgtctgcatatcagaacggagctggtcctctgagtagtccacggtacgcatcttattggccttctgcgtcatttctttggtggttcggacctggaagtcgctcatccctgaccctgaaccgctccgcatgctgatcaggctgtagttgttgtttaccgcggtttccttgtcggatgccaaatccagggttccgataaccgatggttctgctgccggaaccgggccaatgacagtatccacgcctttctcccatccggtgtagtaacagagggtcttatatatctggtcaattcccgcatctatactctccagctgggattttgccgaggacagctgggctgcggccgaaagcacgtctgcatccaccgcaagcccctgggcctgcatggtctgctgtatggcctgggctgtctgggctatctccaatgccttggctaccacagtcctctgtgccaggtaatactcatactggttcatcagagtctccgcaccggacacaatcatgttcacctggcggtccacgctccggctggacttgctgcgctcaatggaacggtccatggaccctgcgctggaacgcagcatcctggcacctcccaccacctgcatgaccgcaggattaccgctgcccagaacatctgccagctggtctgcctgggacatataatcatcagccaccactcgcatagccgttgcaatgcttccctggtcctcttccatggtatcaatcatggagtacgcgctttttataggggcatagcagttcttaataagatctgtcaattcatcgtactccatgtggctgtcctggagccgggccatggcctctgtgtacgtatcacccggcaccactcccggctcgtctgccagcgcagcgcctgcaccgcccaccgccatcacggctgccagcgacaaagccatgaagccttttcgtctgttcatattcatctgtccaacctccttacctttcttcaaccggcctaattggaggttgtgagaccttttacattccaatcataggcttccatggccagcagaagctgaagcttatctgtctccacactgttcttggcggatatatagctgttaagcacattctggtattccagctctgtaatttcgcctaccgctctcttggccgttgccgtgttcaggttaacggaggcaacatccagggccatcacggccgcgttcagggaatcgcgtcccgtaagcactgtattgtactggtttctaagggatttggccgccttatcctttgcatcctggatctgtgcctggttggagtcaatcaggtactggctggtcaggttgccggccttcttctcaaaatatttcacatcataattattcgcgatggccgtctccatatcagcgtccggattcatagatgcaatccggttcaaatcaggctcgggcacatccctaatctcaggctgtccgtccactgcccatcctaacatcagacagagactcctgtggacattgtcagctgatttctgtgcagtaaggatagccgtatcctggtcctgtacactctttaatgcactcagcacatctgcctgggttgccatgccggctgcctggcgggctgcggttgcttcatactgggcctgcatcagattcctggcgctctgaagattttccatattgtaccgtgactgctcataagtcaccatcagctgctgggcctgatacacaagtcctgcctctgtctggtcatactgaatcttctccatgtccgcgtcctgatagttattgtcggcctgctgctggagtacgcccacctggaacctggctgtggcccatgccacgtcatcgtcgctgtctgcattattccagatggcatcaatatcatccatataatcatcgtaggccgcattcaggtccttgcccttctgatccttataggtagaccggttgctgcggaccgttgggttgtactcatgcaccaagtcctttaactccccgaattccagcacattatccctgagggaggcccatttatcctcactgtatgcgaattcaggacttatatccttgttgatatcaggtgcaggcggctctgcaatcgtatgggcgtcatccggcttgcttacattgggccttttcccgctggccgcaaatgaggtcaggggcattgtcccggccatggtaatggctgccaggacagctgctgcccggtatccgtatttcctgttccttaaattcttcatctcttatctcctcttttctgtgtttccttatcacgtcagtttccggtgttacggcagacaccgtattccattataagcatttccttctttgtcacttccagaagtttttcccggtccaccacgttcttataatacagcgttacagccctgatgatgataagcatggccatgtccaccagatacgacagagtctcttcatcaacaggataacgttccctgtcaatcccttcataaagcttatgaacgaattcaccataggactcatcctgaagcagaaagcccttgattccaaataaatggttctggtccaccacacttaaatccgacagcatgttcctgtacatcttatagcccaggcctccatggtcctcatccaccactgcctccagaagcttaagggctgtgccaaagggatttcccccctgttccttcagggttctgaagattctctcctggcagttatccctgaagcctctgagcatataccgcatcaggtcgtccttatcttcaaaatatgtataaaagctccctctggatatgtctgcctccttgataatctggttgatggatgcagatgaataaggaacccttgagaattcgtggaccgccgcttccagtattgcctgcttcttctcttcctttagtttcaaaaaccgttgtgtaggcatgaatccagcctcctagccctcttttgtaagatacaatcatattcctcttggtgacataatgtcatttgtgacaatatgtcacgaacccaattataaacacatatgccatggattgtcaagaaaggaagaattaaatttccataaacagaaacaggggccgatggtccggtccctgtttccacagttatagtacacaataccaaattcaaaaatcaaaactatctttacatattctttgcagcatattccttggggagtgatgattcatcatccatattctccgtccgatccacaatataaaccggcctgtccttcagttccgtaaacagaatcgcaatatactcaccgatgatgccgataatcacaaacatcatggcaaacataaagcaaatcaaaaccacaatggtggcatagccgctgggagcaccttttctggtgcagagcgtgtatatcatgactgccaagcccagcagggccgagaatatgcctgcgtagataccaagcttcaggggcatgttggaaaagcacaggattgtattgatggaaaacacaaacagcttcttgatgctgtacttgctctcccctgccacccgggcccttgcttcatactcaatggcggttttcttaaagcctacgttctgcacatagcctctgaggaaacgcaccttctccctgtagctgttcttcagcacctgggccacatggcgcgagactgcaaaaaagtcagaggcatttgcctcaaagtgtacatctgaaatccggttgataagccagtaaaagccggaggaagtgatgttcttcaccagccctgccgttctgtttttggtgcggaccatgttgatgacctgatatccttcctcaaacttagccagaatatccggtatacattccgggggatgctgcaggtccgcgtccatacagatgatgccgtctcccctactgtagtccagtcccgctatcatggccgcctcatgtccaaagttcctggaaaagcttatcaccctgacccttgaatcagatgcggccatacggtccagtatgtcctggcttccatccctgctgccgtcattgacaaaaagcagctcataatcccagctgatttgttccaacacatgtgtggtttccctgtaaaattcttccaatgctttttcttcgttgtagaccgataccacaactgataacaacctgtccatctcttttgtctgtaatcctttcctggggcatgtttacatatgctgccaatctctctgtcctcatccccccagtgcgtgtctgacccccgctccggcacgctctaatcaaaaatacggatttgctggctggagtgggtgggcacccgtttgtcctccggcggcatttccatgtaattgccatacacctctgtcagtatctgatgccatcccttaggtatcatcaggcgggtatcctcaaaatccgagtcctccacctggtcgcagcaggatttatccacagtcacatacagataatccggctgatagttactgtaatagcgcagactccccttgctgtgcctgtccttcagggcagctgccttctgcatggcaaagataagcttcatgggcaccaggcggcctgccgcagccagccctcccacgaaaatcttgtgaatcaggctgtatttgccaaaatccagcttatacctgtgccccatggccatgccatacactgccttgtgcaggaaacgggtaaattccgcccctgccccggaggcaggaagtttgtccagaatgaacagatccacccatatatgattcagctttccctcatagtactgcatttccgggctgtcctcatggcatttactttttttgtaaatgattctgggagtaaaatcataaaatgcctttccgcccctgtaactgtccggctccagcagctccatggtatccggcagctcccttggagccaccttcataaatgcctcatactggttcctggtaaacgccacatccgcgtcatcatcccagggaatgaaccccttatggcgtacagcgcctataagggtgcccgcgtccagcatgtagcggatattatacttgcggcaaatccggtctatctcttttaatatggtcaagttagcctcatggacccggctcatatcataggttttcatcataatcagcgctcctgccctttattcctgccgtgtttacggcacggtgcctaatcggttcccgcagagtccctatgcgcactccactgcttccttaatagtcctggccatatagtcgatcatctcatctgtcattcccggatacacacccacccagaatgtgtcggccataatgcggtccgtgttgtccaggctgcccacaatacggtatccctggcctgctgcccgcatttcatcaaaacagggatgctttgtcagattgcctgcaaacagcattctggtctgcacgccctttttctccacatactggacaaccttattccgctcaacgccttccctgcacgtaatcaggaaaccgaaccagctgggcctggaatgcgggcaggcttccggaagaatcagctgtttctctgttccctcaagtcctgccttcaggcggtcgaaattgtgacggcgccgctccacaaaggatgggaatttatccagctgggcgcatccaatggcggcctgcatgtccgttgccttcaggttatacccgagatgggaatacacgtatttgtggtcataccccaggggaagctccccgaactgtctgtcaaacctgtgtccgcacatattgtcgcggcctgaggggcatacgcagtcgcggccccagtcgcggaaggatcggatgattttattgagaaggggattgtccgtatagacagcacctccctcgcccatggtcatgtggtggggcggatagaagctggatgtgccgatgtcaccgatagtacctgtaaaccgggtcacttcctttccgtcctcttccatggtatactgggtacccaaagcgtcgcagttgtcctccaccagccacaggccatgcttctcgcagaatgccttcactgcccttaaatcgaaaggatttccaagggtatgggcaatcatcactgccttggtcttttcagacagggcctcttccagcttttccgcatcaatgttatactggggaatcgtcacatccacaaacaccggcactgcgccaaactggatagcaggggccaccgtggttggaaacccgcaggcaaccgtgatgatttcatctcccctttttaccctgcgctcccccagcaaaggggatgtcagcgtcatgaaggccaccagattggcggaggaaccggagttcaccagggagcagaaacgcacgcccagatagtctgccagcttcttctcaaattcatcggtgtatctgccggaggtaagccagaattccagtgagctgtctaccaggtttaccatctccttatggtcatagaccctggaagcgtagggaatgcggtcaccctcctgaaaaggcccctttttattgtgataggtgtcgcagtattcggccaccatgtccagaatctgctgccttgcttctgtctctgtcttatgttcaaatgccatgttcatttctcctctttacgaaaaaaattctgttatctgccggtccataacctccagcatatcctcaccgtccagataagccctggaccactctactgtcttttcaacagcttcctccaccccatatctgggacgccagccaaataccgactttattctggaacaatccagcttcagaaaattggcctcatgagggcctccgtcatactgattcacccattttacatccccaccccagagccggcagaacatatccaccaggcatcctgtggtcacgcagtccttatcatcaggccccacattataatacccctggtatcgtccatcctcatactgcctcatggcaatggtaagatacacggccagcggctccagcaccagctggtagggcctggtggaatggggattccttacaatgatatctttccctgttgcagctgccctgatacagtcaggaataatcctgtcgttggcaaaatcgccgcccccaatgacattgcctgcccttgaggtggagacagcacaccgcccgtcaccaaaaaatgatttctgatagctgtgggttaccagctcggaacaggacttactgttggaatagggatcgtatccatccagaggatcgcattccctgtacccatactcccactcccggttctcatacaccttgtccgtggtcacattgagaaaagagcgcacactgtccgtcagtctgacgcactccatcacgttcacggtccccatgacatttgtctcataggtatacaccggatccttataagaatccctgacaatgggctgggccgccagatgaaacaccacctccggcctcacccgttcaaacacatcccttagcccctgtagattccggatatctccaatcacgctgtccatcacatcctccagcccggcaatctcaaacaggctgggatccgtaggcggttccagggaataccccgtcacctgagccccggcaagcgtcagaatcctgcaaagccaagcccccttaaacccggtatgccccgtcacaagcacccttttatctctataaaaatccatcaattccttcatcttcataaaaaaatcctctcatccaacttccaaccatccacaaaaacccttccgaaccacctaccgcacaccatctgctgctcaccacttaccgcctaccgctcaccgcctgccgcacaccgtctgccctacacaactcccctcagcatcttctttctaccgcattcgaggaagcccagcatggttccaggcgtgcttcctgctgaaaccattttacacgccggcacttaggcgcggtctttcacgcgtcttagtaccgctacgtgtaaaccgagcgagagcgtgtttcatcagggagcacgcctggaaccatgcggaccccccgcgaatccccacggccctcctctaccaaatcttccagggcgccctgcccgactgccacaatccctccagcttattcatctcacgctgtgtatccatgcactgccagaatccgctgtggtagaaggatttaagctgtccctccgccgccagtttctgcataggtccctgctcgaacacagtggaatccccttccagataattaaatatctcaggattcatcaccatgaacccgccgttaatcagggcaccgtcattatcctccttttcccggaaggagagaaccgtatcattttcgtcgatatccagaacgcccttcatctgtccgatgttgactgttgtaatagtagctgtcctgccatgggattgatggaaacgcaccagttcatccaaatccactgttgacacgccgtccccataggtcagcataaaaggctcatcccccacaaaaggctggatacgctttacacgcccgcctgtcatggtgttgagtccggtgtccaccaacgttaccttccacggctcggaatagttattgtggacttccatcttattgttagccagatcaaatgttacatctgaggtgtgaaggaaatagtctgcgaaaaattccttcaccacatactgcttataacccagacagataatgaattcatggaatccgaattccgaataatacttcatgatatgccacaatatgggttttcccccaatttctatcataggctttggtttcagatggctctcctcgctgattctggtaccaagtcctcctgctaatattactaccttcatctctgtcctccattgtatttccggcacattgtattccagccgcattctattctgcctgtactctttcctgcccgcattccatcctgtccgcactctttcctacctgcactccatcctgcctgcatttcatcctgcctatattctttcccgctcacattccatcctgcccgcatcctactcccggaacacattcagcttgttctcttccagtatccggaacgcgttctgtatcttgtccagtcctttgcggtattcaaactctgtctccagttcttctcccctgtcctttagctcctcacggctcattccggggacctccagggccagccgggcctttctctcaaagctttcctccctgctgggcgctttctggatctcacgataagtagtataaccatttcccataaggattgcaaggcagaatagagccatgccccaccggtatcctctgtttgtcctctccttcatctgccacgccagggcaaaggtaagtataattcccaatattcccacctggaactgcagggcatagcgggaacttaacgcataactttctttctcaaatatataccgggaaatgaaaatgattacatggttcatcccgcctcccgccagaagcatcagaggcataatggtcctctcatacagtcggaaccggaaattaatccataaggccatcaaatagccgcagaccacaaacaggcccagaacataacacatccggttgctgagaaggccgttttccatgaaacgttccagttcctcccctcccaccaggactcccgcaaaggactttaacagaaaacggatggggaatgtgggattttcagccagtatcgtgcccagggaacgtcctgtggctcccgcgtgttcctccaccgccatggaattgctcagcatatacagaagaaggggcagcagggcgcaggccatataggccagataccgcatatcccaggaaccctgcccccttctgcccgggcagtccttacgcttcctccggtccatcaccatgcagaacccataggatagcagcagcgtggcggcatagaccgcacaatacgggccggcagtacccagtataataagccaaggcagtaccagcagctttaaccggtcccgtcttttttcctctcctgcccacacccggtccagaaccagctcatggtagtagaagcaggcaaaggcaaagaaatgggaccatccgcttccattggtaagcatttcccatttattcaggctgaacatcactgccatcagcagcgcaaaccagaggcatccgattttcctgctcctgcagtaagcggcaaatacccagcctgccagccccaggctcaccacgcccagaacacgttccagggttatggtaaagccgaataactccacattgacaatccggcagagataattgatcgggatgcgtgtcaggacatccggcacaaaaaacttctccggattccatacatccggcagatagctgttcaccagccggatgtagtctgagtacaccacatcgcaggtggcgcttttcacataccaaaggcagaataagatgcctgcaagcggaagaagccaatatatgattttcctgtttcgttctgctttcatggttatcctgctcctttctcattccctatgtctttcccggaaaccggttcttatctgaccgtcagatgcactatcgctgccagccggtcctctcccctctgttcctgggcattctgcataaagaaattatattcaaaggtcaggtgcaccgtctgccacggctcggcctgaatggttgtatttacaacattggaccgcaccggcagataacgcggctcctccttatcctttgtaatcctgacagcctcgccgccgctcatgattccgggatataccacctccaggtcaatcacgcctgtctcaccggccatgaccgtcaggctggcatgttcatccatccagccatcgctgtagtagccgtaatccacctggagcttcatttcccttacaatctccgtgatatcctggaatccctcatggtccgggtcttcccgcagaaccagcatcctgtcatccaccagaccgatatcccggatattttctatgaactccaccctggttccttctgctgcccgttccctgtcaaacaccttgaaaaaggttctggccgtgaaatcgctcatctcatagctgtcgcctatgatgtaaatggttttgccgaatatgccgtccccatatcttccgtaggtctcctcggccagcgaattataccgcagctggttgggccagagatacagcttgggatagtccgcccggtaatacagctccaccggaagcatgaataccacatagcaggcaaaggctgccccccagggccaaagccgtttcagatacagctccggctttactccctctgtcagttccccgtacatataagccaggaataaaagggcggataccagggatacatacacccagcgcatctccacccgtatggtgacgctggaggacgcaatacacagcccggtaaacagaatgaacagagtgctgttcttcagcatctgaacacggtaatccttccgcttctcccttacaagcttcaccacaaatgccagaacaataaccgcgatgcaggcatccgccaggagcaccagcccctttatggccaggggactctgcccccatggacagccattgagatgttccggtcccgcattgatgccgaacacataggcaatctggctcaaggcgtatttgaaggtgtccgccaggctgaaggtatctgccacctgggttcctcctgtgcctgccggcagaatacttcctatggtaaaggcgcgaatgatttggaccagaaggaaggataacagaccggctccccattcccacagcttcctgctcctcttaaacagcaggaccagaagaagcagaggaaacagagccatatagcgttcatgtacaaagcataccccaaagtagagcacgcaggaaaggtagaagtatacatggctgtccttctcattgagataccggaacaaataccagagaatcataacagccatccacagggccatggtttccataagccccagcacctgtccaatctggtaataggccatgcggctgattaaaaacatggagccgcacagaaagccgattccctttgccctggacagccttcggccgatgaaatatatgctccaggacacggctgcgtttaacaggatgttaaagggcacgaaccaacccacatgattcctgaccactgccatctccagccaggcggccagataatacagaaagcggaaccgggtgctgcccaccggaaacacatactgaaggaaactctgctccccgtagcaggaccagaagtacaggtcatccatatataacccctttatttcgattcctctgttgacccacactgccatggcaagcagaatacccatgaatattacatggtccttccactcatatttcttttccatcctggagaacccaatcctggttctcgtactctcttttgcctccaatgtaagcgcctccttctggctgtcaatcaagttccgtcatgctgtagttttccctgaactcctcaagggcctgttgggaatcatccggcggtccggcgtcaagcgtaaccctggccgtcatatttccccattcatagtgaatatcagaaaggcttccctccgcaatcatatcctcaatcatctgcagggccctgtcctgtcctgccaggtatccggcttccacgaagaaatactccgtaccggcatatctcagaaactcctcaaagtatgccagccgctttaccagatatacatttcctccgcttccggttacatcgtagtagctctggacgctgcacggcagatccaggaccctgggatgcctcccgaatgcaaggacacggctcctgggtgtaaacatacaggaaagggtaaggctgccctctctggcccttctgtccagcatttccctgcggtggtcgtaatagcccatatgacgcaggctcacaggcgtaaagcccggcactccggcccagccagtggtacaggtcaccgctgtattcactgcaaaaaataaaaccagcaccagagacagggaccgtctgactgcgggtccccagttctgcccccatcccattctcagcgcgctgataaccagaacagcataaaacaggatgaaataattcccgtccacctgatacagagtatagatgcttgccagggaaccaagggccagaaccggaatcaggatacagtcaaagagattcaggggatgccggaggccccgtctccccgccttccaggaaacagcaagccagatgacaagaaaaaccgtcacaattccggttccccatgcaatgattacatgggccatatcctctgttacaggggcaaacaggattccccatacccgcgaccacagccgtgaacatttttctcccgcagtcagggcagacggatctccaatcacatggttaaaggtatagggatatttcaccctgcatcccgccttctcaaaaaatccggcaaatatggatgtaacaggcacgccggtaagaagccatgtgcggtaccacaatccggccgccgctgctcccggtatcagaaggaggcaaaagcctctcctgtctccaacccttaaacggcgggtaagaaacagacacacaagggccactccgcccagagccgttgaaaacaccagggccgtgggcttatacaccagggtcagcaggtaggtgctgacagccatggaaagccagggtatacttttggcagaactgcttttcttcccctgttccccatcccaaagtgcgaagcagataaagtcataaatgatgagctggtgcagcagcgtaatattatcgctttttgcagtggccgccatattcatgattcccggaatagcggcaaggatggctgctgccaggattccttttacctgcccgcagtatcttcccactatatctgctgccaggaggagaatccccacggtacaccacagagaaaaggccaggacaaatccataggttggagtcccgctcagagggagaaccaggacttccaggcctttgctgtaggtataaaccaggttaatcatgcccagattctcgtaaattccctttccgttatccagtacataggcggagcgcaggccgtagtgaagtgaatcatagtccagttcaatgttcatgcggcccgcctgaatcagaaccatggtaatgatgaaggcaagtaaggcggcctgggccatgctctcacttcttcccttatctgcactgttcttcacagccttcagccatgccccgggtaaaacctgtttgtttctgcgtccccaaaggatttccaggaccacggccgtcagggccatgactgcggccagtcccctccacagcatcagcccgccatgtcccgtaagggatacaaggcataccaaaaccatccacagggcgcttcccagcacaaggcacatggatgtacgctgcaaaaagggaatgggagcggaaagctgcctttcttctaagaacagccggagaagctgtctccctgccagtatgagaaccgccatatatatgccggataccgccaggggcaggaaaatacggtggcaccaggtaaacagcacgattcccgctgccagtcccagagccctgacacccctgtgtgaacctgtccctggctttctccctctcccgccggccagacagaacaggttccagaaaaacacaaggaccacctctgccatcataagaagggtccgagtattccgaagcaccggctctaatgggccccagagcagcaccccgaacaccgtcacagccaggacagccagccctgccgcccctatgatgattgcaagtatcttatcgtttttaccagtttccatgcaacaaatcctatccctgcatttttctttctgatccgtaccaatttccccgtcccggaaaccgctactcatactctccgtaagccttcttataaaagcccatgataatgtccgccaccggctccggccagaaacggcagaacatttcccgctcctccgcaaaccggcggttatccctgatacatgcctttgtggtggcatcctcatggacccggtaatagataagaggccgctcatcgcagataaaacgtcccggttcctctgccagcctcacaagattgtcccagtccagggcaaaactgtactctgagcgtacaaagggttcacccagcaccgccttgtgataggtggtggccggacagcatatggggttgcctaggacaaaggccagcttctttacccaggccctgtcgttcatctgcggaaaccgcaggggcgtcctcagaatccgcttaatccagagcatggcatcaccggtgatgagcgctccctgtttcacaatcacatagtccgttgtaaaaacagtcatatccggatatctcctatgggctgccagaagtctcgcgctgtaatcacggtggtacatgtcatcctggtgcgcaatggtaaccagctcgccctccgccatggaatatgcaaaattccagtcatcctttatgccgctctccccccgccgtacacagacctgcaggccgtatttccaggccagccggtcaatatagctgctgggagtggacgtgcagataatgatatgggacgggacggtctgggccttaagagagcggatgcactgctccagataaggcgagtccttataggcgcatacggcaaatacatgcttatacctcataaaaatgttcctccagcatcaggcacagggtatgatagatgggaaggtgcagctcctggattttaaatgtctcatcagaaggcaccacgatggagcagtcgcaggctcccgccatcttccccccgtttttgccggtaaggccaatggttttaatgccggacgcctttgccacggcaacggcatacatcacattctcagcattgcccgaggtggaaatacccataaatacatctcccttttttccatagccgtacagctgctgcgcataaatcatttcaccgtttacatcatttaagaacgcggtggccagtcccgcgtgaccggtaagggcaattgcgggaaggcctccctgtaggcaggatgccagctcttccccccgcttttcgtctgcttcctgaagcgcagccgcgaattcattggacaccgggcggcgttttacaaatcccttcatcagctcacccacaatgtgctcgctgtccgcgcagcttccgccatttcccgctatcatcaacttgccgccgcctgcgtaacaatcccgcaggatttcatatgcggccagcacatcgccctttactgcctccagaaccggataccggctggtcagttcctccagatactccatctctttcatcttacgtccgcctgtcctttctcaataatccactgagctgcctttacgagatcctccgcgtaaaaatcatataccggaggtatcccttccttctcctcctggctgcgaatcccgcttccataaccggttcccaccaaaatggtggtgaggccgtagttattcccggcctccacatccagcagtttatctcctatcataaaggaatgagccttatccacttcaaaccgctgtgcggcctcctcaaacatgccggtacccggcttgcggcagctgcactccttcttatatgggccgattccgtgctccggatgatggggacagtaataaaatgcgtcaatggacgcccccatgcactccaggatatggttcatataaacatgaaggttcttcacgtcctcctccccataatatcccctggccactcctgcctgattggtaaccaccaccagacggtaccctgcctcctttaacatctgcagcgcctccggcactccaggaaggagcttaaggtccgaagtcctgtgcagatagtgcacttcctcattcagagtcccatcccggtccaaaaaaacaactcgatccattgcacatccatcctgtatgttatattccttgtgtgaatcctgtccggtaatttaacattaaatgttaaaccggtactcgccgttaggcatatggaccttcacctgatcatactgccatctggactcgtctgccacccagctctgggcgccccgcagttcaaaattccaatccgccagctgtccgcctgcctgttccatacgggcagccaccttgtggcgcacattgtatggacagtacatgagtaagtacccgcctccgcctgctcccagaagtttgcctcccagggcgcctgccttcagggcctcatcatataattggtcaatctggggatttgttatcttgctgctcatgcgcttcttgctctgccagccatagtccagaagcttgccgaaactgtggagatttccctttaacagctcatccttcagggcataggccagggcctttacctcacacatggcctcaaaggcgtcctttttctcatagttttgcacctggtccttgataatattggcagagacatggatttttccggtataacagagaaggagattatactggagctcatgtatgatgtcctttttaatgcgcagagggttaaccaccacattgttgcgtccgtggaactcaataaaattgaatcctccaaaggtagccgcatactggtcctggtacccgccatcaatctttaaatccaggcgctccacctgataagccaggtcagccagggcataggcatccatcatcactcccttccagcgggccatggcagtgagcatagccaccataaccgtggacgaagtcccaaggccggatccgggaggcgcatcgcactggagatacacttcacagccctggtcaatacccatggcattaagagccgctgttaccaaatccagttttccgtcatacacataattttccctggtattatatttcactgtcatatcaaagtccagggaatgaaccacaatctggtcgtcctccctgggcacaatggaacagtaggcatatttattgatggtgcttccgatgatggcccctccctgctcctcgcagaatggtgccacatccgtaccgccgcctccaaagctgacccttaaaggcgcccttcctctgattaccatatgtgtctcctctctctgtctttcgtttaggttgtcaaatgaccactttattcctcacatcctcctgaaactggaaatacgcctccggaatgccaatgtcaataaaatatccgtcattgacaaagcctcccaggcgccttccctctgacagccacttagggatcatgtcattttccagcgacacctttccctcgggtatctcatccagcagctgctgtttcataaggtaaatgcctccgttgattgtcccttcccttgcatcctctgtcttttcattaaacccggtcaggaatccgtcacggtccaaaattgcctgtccgtaccgcgaaacatcaggcaccctgcgcagtaccagagccatatccagattctggctgtcctgctgtctcaggagccgggtataatcaatctggtaaaatgtatccgcgttcagcacataaaaacgatcctctgtaataaacctgcctgcattcttaatggccccggccgttcccagaagcgtctcctcataagcatacccggcatggaacccgaaagccgccccatcgccgaaatgctcctccaccatagttcccttatatcccacggcaaagacaatatccgtaatcccgtggcggaccagctcacgggtcacatattccataaaaggcttcccttcaatcaacgccattggcttgggccggtcgctcaccacactgcgaagcctggtccccagaccgccggccaacaaaatagcctgcattcaacattccctcctgtactgtgggccttaaacgcagctgcattatccagacatgccggctgtgcagcccacgcagccctgaagaatcaacgaaagtctccctctaccaccttccaggccccgtccagactgtagtgtttcttaatataatcctgggtcctgcggcaaagctggtttaaacgttcattgtcctgatataatttaacggtcttgccggcaaacagctctgcctggtcctctatttccagcacggtgtccgcaaagggaatcccctctgcccctgtggatgtggtcacaatgggcgctccgttgtatatagcttccactaccttacccttcacgccggctccgtatctgagcggcaccaccaccaccctgcaatggccgtaaagctgcgccagctcctcctcgcttacaaaacctttgataataattccattgcccggctcctccagggccttgatttcatctgtcaccctggatcctgccacataaaatttcacatccggcagttccctgcgtataagcgggaatatttctctggcaaaccacagcactgcatccgcattgggcggatgggcgaaaccgcctacaaacagcagtccttccctctctgcaaagtcatcctgtatgttatccagaaaggtgtcatagacatacgccgtaatggcctttgcgggaatgcttccgtcaatggcgtgtatggcattgatttccacataggaaggataataggaaacagctgccttgtgcatcatggtcagctccacggatttccagtaatccgcctccctcttgatgttgatatccccggtcagctcatattcccttcccagacgcagaaagtgcaggtcgtgtccatagtaaatcaccttcatattggtgtaatcttttataaaatccacatatttggtggcaatatggggacggttcaggtacgcaaatgatatctcgtctccatttgtctttaaccagtcccatatgcctgctgcgtatgtgtctccgtagagtacctcaattcccatttgcagaagggtggtggtatatggctcctcatgaaggaaattatctcccaggaactttaccacatagccctttttcagaaacatcttcaggtactggtaggttgtcttggatcccgcgtccctgtcaaaggtgggcacatagtggtccaccaccaggatgattttctttccctggctgcgctccctggccctgaacggattgggatttccggtgttgacgcactgctttttgaattcctcagcccatttctccttcagcttttcactgttttccacctggtagcgtttcaggccggttccgtttacatctgtaccgttggaaacgccctcaaagtggattaccttggagagaggctggtatacaaccctgcatccggcctttctcacctcaaaagccaggtccgaatcctcgcagtaagccggggcaaaccgctggtcaaatccgccgatctgcttccacagggccgtgctcagaaggatggctgcccctgatatatagtctacatcctttacataattatattccgccttgtccggatcatccagacggccgtagttccagccggaaccatcgctccagataatgcctcctgcttcctgcaggcgtccgtccgggtacaccagcttggaacccaccatgccaatggtggaatcggactcaatcaggttcaccagggaagagagccagccctctgtcaccttggtgtcattgttgaggaacatgatgtattttcccctggcagcctttgccgcctggttgcagttgcgcaggaacccctgatttgtctcatttctgcagattacaagaccctctgcataccggcccagctctgctgttgcatcggtggacacatcatcggcaatgatgacctcgtaggtgacatcctttgtaaactccaggatggactggagacatgcataggtatagtggacctgattataacagggaatcacgatggaaaccattgggccgtcccacgtttcgccgctgccagagtccatatatcctcccttgcccggtacactggggaataccagcctgccgtatttgagataatcctcgccaatcttaaaatcgccttctatctggttgcgtccctctttggtggcgtacagccttccgtaacgcaccgggtgcttcactgtgttaaaacagtagttgagtatcttgcgcttgcgggttccccttggaaatgctttgttgacctgggctcccagcttgcgccgggccttgaacacaagggcttcatgcccgttgagataggttgccagcttgcccagctcgtcgatttcatggcgcaggtccttaatcatcacttccagatttgccacatggttattggtcaggcgctgcacctcctgctctttgcggatctgcaggttcttttcctccacctctgcctgaagctggctgatgcggtcctttgcctgggagagagcctggtccgtctccttaagctcagacagggtcgtcactttctgctggtaattcaccaggtatccctggacagcgtccccgtggacataggactggaaggcgtcctccatggatgcgtacacagacgccatctcgcttcctatgccaaactcctgtaaaaattcttccaggccggcatatgacatcaatccctggtatttataatagaaataagccagattgcggtactgtacaaagcgggcaggaaccgggaaatcaaagacccattcatagtccaggcagtatagtttctcatccccgtccttttctgtaatcatcagattctcaaagagcccgtcaatgttgcttactttataagaaacatcatctatatccggaaccggcccaaaggtccgggtaaactccggcgtcacggcaaagggaacaatctgatcctccgccacatcataaagaaactgaagcgccgccttaatttcctccacaggcgcccttccgtcccggatgcaccggcccagacgttctgccagggtaatgccttccaggaaaacaaactccaccttgctgccgtctgcggatatctccggctccaggattctgaccctggggttgagctgccttaactgccggcacttatttttcagggaaaggatgtggtatcttcctgcgctttcaagggcagccttctccacccggcgctctccgtccagatcccccatggtggtgcggatgcggaattcctcttttctggtacggttatacttggcgaaaatggttttctcctgccggccgtccttagatgcaataatcaggaaggaattggcaaaccggccaaagtcattttcctcaatcagacggtcatatacctccccttcattgaggcaggcataccgcggaccgtcataggacacagacgggctggtgatgtctccctttcccggcagataccgttctgagtagagtgatatgggcattctgtggtcgggcaccggataatagaagtccgcccgggcaagtcctgcttcccggcaggcttcctccgcctgttttctggtacagaagccttcctcatggtctgcccctgccaggtacctgagccccaatgcattttcacacgcaatgaccagacggccttcctgtttcagaaaggaggcgccaaaggcagctgcgtcctgtatttcctggccttttctgagtccggccatgaccacaaggtcaaatgacggctccggctgtcctgtctcatcccctgccttatagccatatgtgatattggtgtaagtcttgttgcgctcctgatttacagccaggttttcatctacttcgtccatcactgccacatgggcgcacctggaggccagcagtcctgtcagaacgccatagcccgaaccaatctgaagcacttccccgcagccagtataatccagccactccagaagattctcccttatatcagacagggcgtggagcacctccggcccggactggctgtccagggccttcctgatgccctcaggactgcttccgtattgtctgaataaatctaatatttcataactgatgtccttcatggaaagttataatcctccgttcacagttgggcccgcattaccggcctctatcttcccggcctctatcttcgcagcctttacctgggactccatatcatacaccccaaccgtatttttattggaaataaccgtaatattggtcacgttgtacaggcggtggtacaccacatgctctccctgctcaaaaccggtgcagctcatgctcagcagatactccccgccctggagtgtcattttctgggtgaattccaccacatactcatccccgcgcttcacaggctggatttcggcgccttcaaacatggtgttggtgccggtaagctccgtaccctttttatcctttatagtataggtaaaaataggggactgtatctctgtattaaaatgaatccgttcttttatggtaaacatctcaccttttaacagaaggttggtgatatttcccctctcgtcaaaaagacccaggtccacaatctcggcccggccgtccccgtattctgtacggtcataattaatggtcagctggtctttcatgagacggcttccctctaatcccatcccgccggaaaaatcagacatttccacaccgccggattttgttcctgcccctgcccggctcccggcagtttccgtttcttctgttcctgctccggttagtaccccgctgcccgcatcttcctgcccgatttcccctgtcagactctccttctgctgtctttcccgctctaattccgcctttaaggcgtccagctgtccggccaggatcttcttatacatatccaccacccggccggcagggccttctgcgatgaattcccccttgttcagcagcaccacccggtcacagtatttgataatgcttcccatatcatgggtcaccataaggatggttgtccccttctggcggatttcctccatcctgcggtagcattttgactggaagaacacatcgccgacggaaagggcctcgtccacaatgaggatttccgggtccacattgatggccaacgcaaaagccagccgtacaaacataccgctggaataagtctttaccggctggtacacgaaatccccgatttccgcaaattccaggatgtcctgaagcttggcgtccatctcctttttcgtatagcccatcatggtgccgttcatatatatattttcaatccctgtataatccatgttgaatccggcacccagctctaacagagccgatatcttgccgtccacctttacctccccggtggtaggggtaaggaccccggtaatgatttttaatatggtggatttgccggaaccgttggtgccgatgattcccaccgtctctccctttcttaccctgaaggacagctggttcagcgcgtaaaaatcccggtggtaattcttatgggaaatactcatggattccttcagacggtcaatgggtttctcatataatctatataccttggtcacttctgcaacgtctatggcatatttattgtcctgttctttcactgacataacattctccatctctatgcatacttctccactttaggcataagtatagcatagaatgcaggatttttatacctcaaacaatatttttcaaaaaaagttaagaatccccttgacatatataactgtatatattatagttacagtatgaactgtacgagttttgattacagaataggaggaaacacatgaaaggtacgatttttacagctgtccttatatgcagcgccatcttagctgcctgcagccccgccgcccccagggaagccatggcctcaacacagagtccgtccccgtctcctgcagaagaaccggctgatgagacatctgatgaggcatatcataaaatcactgccgaggaggcaaagcagatgatggacgagggcaatgccacggtagtggatgtgcgcacggcggaagaatatgcggccggacatattcccggctccattctgataccggtggagtccataggtgatacgaagcccgtagaacttcctgacacggaagcagtgcttttggtccactgccgcaccggtatccgcagcaaacgcgcttcggaccagctggtggaattgggctacaaacatgtatatgattttggcggaattgtggactggccctatgaaacagtaacagaaaactgatttatattagaacagcttaatattgcaagcttatatataagattaaagaatgaatgttcggtgacttttatcacataacacaagtacaaaatgtggtatcctataatcaatagagcaaaacacaaaaaagagaaaacctggaggtaataactatggaattgaaacatttaaataaggatgaatttgagcaggctgtaaacgccggcgacgagctggtggttgtggatttctttgcaacatggtgcggtccctgtaagatgctgggtcctgtcatagaacgggcggcagacaaattttcagatgtacatttttataaagtagatattgatgaggagatggacctggcggcccgtttccaggtaatgagtgttcccacccttatctacttcaagcgcggcgaggtgttatccaagtcagtgggtctggtttcaccagctgatgttgataaagaaatcagcaagttaaaataataagccatcacacatttttgcattccctttttggcaggccggttcccgagatggacccggcctgtgttttatcccttatccctgtttctttaacttcccattgagcttggcataaatccgctggcgtatccacggctcagaggatgccttaagcgagtcctccaggccgaaccaggctgccccgctgttttcatctgtctttgaaaacagggcatcgttctcgtctgcctccagaagataggtgacattcagatgcaggtgggaacccacataggccccccgcttctcatgtccgtccacggtcaggacttccagactgtagatatcctccgataccggccgtaccctggcaagcccgctttcctcctttacctccctcacagccacctgcagcaggtcctgctcattgtccgcgtgtccccccagccatgaccaggatttatatatattgtgatataccatcagtacctttgtccggccgggattcaccacccacgccgaggctgtcatgtgagccaggcagtttcccctgtcaaatatatcctcttcctccttcaggcatttcagaatcatctgacggtctgtttcctcctgttcattatatgggcagtagctctctatctgcttaatcaaatccgcgcggtccattttatatacttctcctttccctggcatacatgttccagctccttttgtatttttactacagtttcctgtgtgaccccggtcaccgaaacctttcctgttttatgatatctttgatacatcaaataattatgaggtgttttatcatgagtcatttatccaagaatcttgcccgtgtggatgccggtacctgcgtggcctgcggctgctgtcttaaggtatgtccccgccaggccctttccgtgtttaagggttcctacgcagtggtcaatcaggacgcctgtgtgggatgcggcctctgcgcaaaggaatgtccggccagcgtaatatccattcttccccgcagccatcaggaaatagaatctgcccagacaggaggaaaccgccatgaataagccaacccttaaagcgaaaaaacactggtacgattatctctggattgcatccctgctgtacctgtttctggggtttttcaatatcatgtttgcatggctgggcctgatttgttttctggtgcccttagccatctccattgccaccggatccaagctctactgcaaccgctactgcggcaggggacagctgttttccattctcggcaaaaaactgcatctgtcgcccaaccgtgagatacccgggtggatgaaatccaaagcattccgctatggtttccttgtattctttttagtcatgttctgccagatgctctttaacacctacctggtgttcaggggtacatccggcttaaagcaggcagtcacagtgctgtggaccttccgcctgccctggcagcacgcctatcacggcaccggccttcccctgtggaccgcccagtttgcctttggcttctacagcgtcatgctgacctccaccattttaggtttggccaccatggtcctgttccgcccccgctcctggtgcgtctactgccccatgggtactatgacccagatgatatgcaaggcaaaggcgggagcgtgccctggtgcggcatccgaatgcgggacctccggctgcagttctttgggctgcggttcttccggctgcagttcttcgggctgcggtgcttccggctgcagttcttccggctgcagttcttccgattgcagctcctcccgctcaaacgaatctctttcatgactttgcagacagtccgttcccataccgcggcccctttatacctctcatcctttgacaaaatacaggaaattgtctacactataagaatatatataattacaccctgtatttaaactcccaactataaggaggagccgtccgccatgaaccatagccgcccgaacatcacagatactctgaaaaaatgctaccccttctgggaaaaactcaccgatacccagagggagcagcttaaaaccagctcctatatcagggattatgaaccaggaagctttgtccacagccgttctgaggaatgcctgggcattctgatcgtattatccggccagctgcgcacctatatacagtctgaggagggccgggaggtcaccctgttccgcctgggtccgggtgaggtgtgcaccctatcggctgcctgcatgatgcaggaaatcacctttgatatcttcatcgagtccaccgctgcttccacccttctcatcaccggcgcctccggcatccaccgtctcatggaggcaaatatatatgcggaaaactacatttaccgccagactgcggaacgtttctccgacgtcatgtggtccatggggcagcttctcttctccagcttcgacaaacgtctggccgcttacctggcagatgaatatgtcaagctgggctccgatgtgatctccactacccatgaacagatagccaagaacctgggcactgccagggaggtggtgtcccgcatgctcaaatattttgaaaaagagggcctggttgcccttggccgcggaaccattaccataaaaaatgtctccggcctaaaaaaactgctgtattgaaatagtcttcatagcctgtctgccccgttcccctctttgcacagctccatcagtgtcctggcactgcggggcagaaacttattcttgtggtaaatcacagaatacttccggttcagagccaggtcctttatccggaattcagcaagttccccttcccggatatcctggcgcaccagaaaatagggcagaatggaaatacccagccctgcctttaccccctgcaggatgacctgattgctggcgctctgccatatagggcggacattcagctcctgcgcggccagtataccgtcaaatatctcccttccggcgcttcccttttcccgtaaaataaaatcctgattccgtacctccgacagctcctccagagtttttccggcaaattcatggccggccggacatatgaataccagccggtcccctgcgaagctctcgctgaggataaagggactgtgggctaccccctctatgattcccacatctatatcattgtcaagtatctgctgttcaatggttcctgaattggcaatggatgcctccaccttcagggccggatactgctgtttcagcttcttgatataaccgggcagcagataggtccctatggtaatgctggtgcccaccttgagccgccccatggcgtccacgtcccggaccccctgctccatctcatccagcagatctatgatatgcctggcatactggagggccctgcggccgttctctgtcagatacagcttgcgggatatgcggtcaaacagctttaccccgtagtagtcttccatttctgagatggccaggctgatggacggctgggcgatgaacagctgggaagcggcggccgtcatgctccctgtctcacatacggtaacaaatatcttcagatggcgaaatgtcatgttcctcttttcctgaaccgcgcatggcagactgagggtacatccctgcagtctgacatagggcacatatataatacatct

SEQ ID NO: 3234 - DNA, 26831 bp, Unknown
  gut microbiota DNA sequence
cccccgctatttcactccccgctatttcactccccgctatttttcttcccgctatttcactccccgctatttctcctccaatcatttcccccagtcttttccccatctcttaattccctatcgtcatggcctgtcctgtcatctttttttcaacctattctttttcagccctttcactttcatcttttcctctctggtcatttttttccgggccacatctctttcagctattctgctctcctcctcccacaaaatcccattttcttactcacacctacattttccttcacataaaacagcactaaacatttttcctctccctaatccatctgaaattccatctcccattttcatcctcctccctgcaatccacaccgcccccgcaataacagcaaaacgagcctcacaatacataaatgcggatccgtcccccatttttcatcagcagatatttccatccgcgcccggttattaaccaacgcacagccaactcttataaagccccatggtttgacctcatatcagctggaataccggtttttctccgcccgctgctgctgttaagtttatttctggcggttctcccccgtcaccatccgcatacaccacctgtaaaggcaggggaattttcaccttttttagctaaaatgaagtttcaaggcgcgcaaaataatatgattcaattttcaagtacaaacaatccctctgatttttcaagaatattgattaacgaacacaactgactactgataaacagtactgattttaagaaacttacagatataatccaaacacaccgctgcatactgaataaggcaataaaacacgcatcaccaccttttttaatcatccctacgtgaaaaacggctgaaccagccaaacgatcatgaaactgctaataagaatcctgcacagagacttccgtacgattttatatagaatatcatatatacccttaaagcgtcaatacccaactcatttttatttctctccgcagaactatttctcttctgttttcgcgggagaaatgtaaaagtaaaatccgttgtcttccactcctgctaccgctgccatcaccacactccaccaacaatccacccgcccaccaacacccacacacccacaccacagccacacataccaaactccataaaccacacacaccatcgcccaatccaccactacaaaaaaaccggcatccaggctcttctgtccacaacagacataccccggataccggctttctatatttcagatactatatttacctatttatttccattaaggtattcatcaattcctcttgcacctgcgcggcctgcctccatggcaaggattacggttgcagcgcctgttacggcatcgccgcctgcatatacgccttccttggtggtcttgccgttgctctcatctgcaatgatacatttccacttgttggtctcaaggccttctgtggtggaagaaatcagtgggtttggagaggttccaagggacatgatgacagcgtccacatcaatggtgtaatccgatccggcaacctctaccggtctgcgacggcctgatgcatccggctcgcccagttccatcttgcgcactaccattcccttaacccagccgttgtcgtcggtcagaatctctaccggattggtcagcagattgaagataattccctcttcttttgcatgatgtacttcctccacacgggcgggtagctcagcttcgcttcttctgtacactacatgcacctctgcgcccagacggagtgctgttctggcagcatccatggcaacgtttccgccgcctacaactgctaccttcttgcccaggtagattggcgtatcgtaatcatcacggaaggccttcatcaggttgcttctggtcagatactcgttggcagagaatacaccgttggcgttctcacctggaattcccatgaacttgggaagtcctgcgccggaaccgatgaatacggccttaaagccttcctcatccatcagctcgtctatggtcacggatttaccgatgataacattggtctcaatcttaacgcccagtttccttacgttgtcgatttcaggctgtaccacgccggactttggaagacggaattcaggaattccatatgtaagcacgccgcctggctcatgaagggcctcgaagatggttacttcgtatcccatctttgcaaggtcgcctgcgcaggtaagtcctgcagggccggaaccgattacagctaccttgatgccgttggttttctctggcttagccggtacgaatccattttccctggaccagtctgccacgaaacgctccagctttccgatggatataggctcgcctttgatgccgcggatacatttgccttcgcactggctctcctgagggcatacacgtccgcatactgcgggaagggcgctggattctgctatggtatttgctgcatcctcaaattttccttcttttacttctgcaatgaactttggtatattgatagcaaccgggcatccctggatacattttgcattcttacagttaatgcagcgggaagcttcttcctgggcttcttcctggttatatcccagacatacttccttaaaattcgttgccctctcctttgggtcctgttcccttacgggtatcttctttaatacgtccattattcctcacctccgcagtttccgcatccgccgtgatgggtagcaccctcacgcagccttaagatggctctgccctcttctgtcttgtacatctgctggcgcttcatggcctggtcgaaatctaccaaatggccgtcaaactcaggtccgtccacacatgcgaacttcacttccccgccaacgcttacacggcaggcgccgcacattcctgtgccgtccaccatgattgggttcatgctgacgatggttggaattcccagctccttggtgagcttgcagacaaatttcatcataatcataggtccgatggcaacacagacatcgtacttcttgccctggttctccaccaaatccttaacaacatcggttaccatgcccttgcgcacataggaaccgtcatctgtggtaatgtagaggtttcctgcaacagatctcatttcctcttccaaaatcagcatgtccttggtcttggcgccttccaccacatccacgtcaatgccgcgctctttcagccattttacctgtgggtaaacaggcgcgcttcccacgccgccggctacaaagagataacgtctcttctttacttcctccaggtcatccttcacgaattcggaaggctgtcccaggggacctacgaaatctgcgaagctgtctccggccttcagtccggccatacgctctgtggatgctcccacaatctggaacacgatggttaccaggcccttctcacggtcgtagtcacagatggttaacgggattctctctcctacttcgtccatcttgacaattacaaattcgcctggttgacaggccctggctatacgcggtgcttccacgtccatcagatatatcttatctgccaggcattctgattttacaatcttatacatggttctcctcctagtaatatatactcgcgtcctcagctggatttcgccgcgcatccggacgtgacattcattgttattccacccggatctggtagctcttctgccagttttcccatccgggcaacgatatgattccccttctgtccttcaattcccccttatatccatctgatgcgcagataccataccatggttccagacatacaaagggatgggtggcctccattgtccatattcccaaatatgggaaatcgctgcattccaacgtcacataggggcttccatccaccatcaggctcacgctgctgacctgtgcttcatcaaacatatatgtaagagctgtatcgaaaaatccttttgtcagcggcacccggccctctgacagcttcaaatttccctgaagttcttccttctcatagccgtttgcattaggcgcaagataatggagacaatccgtaaactgtccctccctgcaccctctccggttaaattcaaaggtgaaatcgtatatgtttttcccttccggcacctgaaaagcaggatgtccgcccatcatgaacagcatctcgcctgaatccctattggcgaccttccacataacctcgatggttctgccttccagcctgtgaccaatctccacctcgaaatggaacggatacttttcatatgtctccggcgtgtccttcaaacggaaccagcattcgtccatatcacagagaaggggttcaaaatccatatcccttgcaaagccgtggggcgtcatgccgtattctttcccatcatggacatacgctccctcataacattttcccacaaacggaaaaagcacaggggcgtgtctgttccacacagacggttcagcgcaccaaagcacttcgcggtccgctttcttgtcataaatcctggtaagttctgcaccgcggcgggcaacagtaactagaagctcatcattttcaagtgtaaataatgttccatcctgtttcactatatattcccccgttctcctgttttttaagaagcttgtgagaatttaccctcgcacaagctttatattaacattttctgcttcatgttacaaccggtttttaaattttttcaaaaattattttctttttttcagcgtgttgaacaatttttttattacttttttctccggaacctccggaaggtataacagaggtcaaaataggtctgttcgtccccctcttccgccagataccatccctcttcctcttccaaatcaggaaagtatgcatccccgtcataggtataatcaatactggtcacatgggccgttgtgcaatagggaaggaactgccggtaaacgctctcccctcctatgatatagatatcaccttcatcgtaatccttaagcgccttaagcgcctcctccaggctgtggcagaccactgcgccctttaccttatactgcatatcatgggtcaggacaatatttacccggtttccaaagggctgtcctcccggcagtccctccagggtcctgcgccccatgaccaccaccttgccggccgtctccttaagaaacatctgccggtcggccggaatcgtcaccagtggcctgccgtccttgccgatggcccaatgcctgtccgctgtcacgcaaagattcaatatcccctcaccttacccttctgtatattctgaattcaaaggaaatgccctcatgctccctgccatcgctgaccgactccagtttccagttttcatcctgatccagattttcaaaatccgtgtccacctcaaaggtcctgtggatgtaggtcacatatgccttattgcagtagggaagaaactccctgtatatcatgcctccgccgatgatgaacacatcatcctcattacagtcctttaatgcctccagcacatcctccgccctgtggtacacctgcacaccctcaggagaatacgattcatttctggacaaaaccatatttacgcggttcttcaggggctttccaccgggaaagctctccagggtcctgcgtcccatgaccacggtcctgccactggtggtctctctgaaatacttcatatcctccgggagatgcgcaaggagaccgccgtccttacctattccccatttctcatccactgcaacaatcagattcatgtgtgaatacctcccattttcttccaggtatctgtttatccctgtcccattcaccggtcttgaccgattatatcatgaaaccctttgaaagaaaaggtgtcctctgttataatgattccatatttaaaatggaggacaatgaacatgagctacgcagaccagatattcatacagaactgcaacgatatattagaacacggcgtctgggatacagactatgacgtgcgtccggtatgggaggacggcaccccggcccacactatcaagcgctttggcatcgtgaaccgctacgatcttacaagggaatttcccgtcatcaccctgcggcgcactgcctttaagtcggcagtggacgagcttctgtggatatggcagaaaaaatccaacaacatccatgacctgaacagccacatctgggattcatgggcagatgagaacggcagcataggcaaggcctacggctaccagctgggtgtaaagcaccattataaggaaggggattttgaccaggtagaccgcatcctgtatgacctgaagcacaatcccttaagccgccggatcatgtccaatatctacaaccaccatgatttatgcgaaatgaacctctatccctgcgcctacagcatgaccttcaatgtctccggtaataccctgaacggtatcttaaaccagcgctcccaggacatgctgacagccaacagctggaacgtatgccagtacgcggtcctgctccacatgctggcgcaggtaagcggcctaaaacccggcgaattggtccatgttattgcagacgcccatatctacgaccggcatataccgatggtggaggagttgctgaaacgggagccttacccaggtccaaccctgtccatggacacttccatccagaatttctatcagttcaccactgacagcttccggctggaacattatcagtatcacacctttagcgagaagattcctgtggctatataggcaggaaataaggaaagacggatggaccgtgggaatggtcatccgtcttttcttatttccatctgcctctccccggcgcaggtgacaccgtatttttcttaaaacaacccctcattcttctgctccagcaccttaattccatggtagaacatttcattataaggcgtaggcactcccagctcacggcccatacggatgatggtgcctccgaacatttccacctcggtcttgcggcctgcctcaatgtcctggagggtggacggtttatttttaggaggcacgtccttaagcacgctggcctgtttttccatatccttttccgagaggtcgattcctttcttttgcgcaatggctatgacctcccgcatcagcttctcacggataaaattggcatctgcgctgacactccaggccccaaaggggatgcccaggacagcggcgctctggttctcactgacattgcacatgtatttataccagatggcccgctccatatcctccggaacaacggtacgtatgcccgccccctcaaacagctccttcacggcctgtaccctgtaggacactgtctcattgtgcttctcccccatttcaatccgggcagcctttggattaaaggaggcgcacccgtccttcatgaccacgcttacctttgccagggaatacagcagattatcccatccaaataccgctgccaccttttcctctgcctccaccccgtttaacggggccatgataagggtatccggcccaatctggtttctcatgtcttccaaagcctgggacagggcaggaaacttggtgatgataatagctaaatccggataatcctgaccgcaggtttcctccggggatacgatgttgaaatggtggcggaccccattgaccatgacgccttcctgttccagacgttcacggcggctgccccctgcaatcacacgcagattatctcccatcagaggccccagatgactggccaggaaacagccaatggctcccagtccaatgagggatacggttcttatttctcttttctgattcatcctgattccttctttcatacgtttatactcatctgaagcgcaagggaataaataatgcgctcttttacatgtttctcagtcagctgggtcaatgcgcgctcataatagtccagctggactctgtagcgctctgccagcatctttgccccctgttccggacttccctccggcacatggtctgttttatagtcaatgaggaccagtccgtcctcttcctccagataggcgtcgatgattccctggataagtaccagctcgtcggaatcaccaaggcccatttccctggcaggtatgcctatgataaactgctgctccttatggatgcgtccctctgcctgtgctttcgccatacgggttcccaagggactggacaggaaattccatatgacattgggattaataaagtcacgggcttcctggtccagaaatccgttctccagaagctcatccaccaccggctttacctctgacaggctgtgtatctcatggaaccggatatgctccagaaccgcgtggtatgcggttccccgcagagctccgcggtttgggccggatgaagatggtttattctgttctcctgattccctgaatccggggcctgccacatcctgttttcccctcagcgccgccagctcaccaagggctgccccctccagattgtcacggtccgtgccaatggcatcctctgcccgtcctatctggctctgttttttgagctcggatacagacaccatggcgtacagtccggtatctgattcataagggtactcatattccaggacttttctgagatgtgttccaaatgctgcatcatacaccctctccccatccagattcagaaggtcttcctttttcatcttccgtatgatttgccgggtaatttcctcgccaatcagatcttttacctgaatctggcgcatttccatgtgggcggcaggaatagcgggctgggccataaggagccagtccaggcaggaattggctgaagccagtatggtatagggcagctggccctgggacaggggaatgtccttccattttcccagcttattctccagtgacttatccgcggctgtcataatcagcttttccttggccctggtcatggccacataaaggaccctgagctcctcccccattgtttccagctccatccggcgcttcaatgcctgctttttaagagtcggcgccttgacccgcagctccaggtccaggaaatctgccgcagcccctaaatccgcatccaaaagaatctgtccgtacgcatcctgcttgttaaaacgctttcccaggccagccagaaataccactgggaattccagacctttgctcttgtgaatactcatgatgcgcaccgtattgtcctgctcaccggccacgctggcctcaccgaaatccgtatcaaatttcttcagtttttcaatgtaccttacaaaatgaaacagacccttgtagctggtggattcataggcagctgccttttccaccagcatgtccaggttggcccgtctcgtctccccggccggcatggcggatacatagtcgtaatatccgctctccttgtatacccggtacagcagctcatggatgggcagatgccttgcctccccccgcagccgttccataaggagtgacagcttaagggatttaagggaaatggaatgggctgcctctgccggtatgctgcataatcccactgtgattaagccttcttccctgtcaggattttcctccggccccagaccttcctcctgctccggttcttcctccggccccggcccttctcccggcctcagcccttcctcctgctccagttcttcctccggcaccggcccttcctccagccagagcctccatgccccgtatacgccccggtcctggccctttttggaattccgcttgtaggcggccatcatccaggccatctcctcatcatccatccccacaatgggcgagcgcataacggctgccagcggaatatcctgcatgggattatcaacaacagacagaaggctgagaaccgtctccacctcaaccgtgttgaaatatcctgtcctggtctgggcaaaagccgggatgccttcattcatcagcacatttacaaatacctccgaccatcccgtcatgcttctgagcaggataaccacgtcgccgtaacgggccctgcggtaagctcccctggatttgtcccacaccaaaatcccctggccttggcttaccagctggcgtatccttccggcaatcagtctggcttccagctcttttgccgtataatcaagggagtcttcatccagctgcttcagtgcttccgcgcccgtatccaccatgagaagctctgtaggcgttcctgcaaggaaggaaaccgggccggattcctgcgtgtcagacaccccctcttccagtcccgggccacaaaccgttttcctgttcacttcctcaaataccgctccgggataaagggctgtctcaggcgtgtatgtgattcctcccagattctttgtcatgatttgataaaacacatcattgacactggtcagcacagactccctgctccggaagttctgctgtaattcaatcatctggtacggtccgccctgcctggaatatttttcatatttatccataaaaagctccggcctggccagacggaacctgtatatgctctgcttcacatcccccaccataaatacgttgggataaccgaaccgctccctggaaatgctggtaatcaatgcttcctggacataattgctgtcctggtattcgtccaccaatatctcctcatactgccggctgagctcgtctgccacctgggacggacagcgggaaaccctttcttccccgtttccggtttcctcccgcacatacagaacctccagcgccagatgctccaaatcattaaaatccagcacgttccgctcccgcttggcatccctgtatgcctggtcgaacatgcctgtaagccttaagagctcccggatgacccttctggtccctctcatgctttccacgacttcctgcggactctgctggccgtagagctccctgcattttgccacggccttcttgacccggtccctgcatgcgcttacaaatgccttcttatcaccgtcaatatccttgctccggatggatgccagccggtcgaagctcatgttctgcaggctgttatacagggcttcaaagctgcctgtggaagcggcccttcctatggcctcgattttacctctgtcgcttatgagcatgggctcgtatgccagggggcctttttcctccaggcacacattaagggcttcccccagctgcccggaaagctctgccatctgtctggccacatcctccatcaggaacaccatccaggggctttcctccatttccccgatgctttcctcctccagctccttctgacaggctgcaagccattcctgcggccatggatggctctgggaaaactgccatgcctggagaatcacatcctcaattcccctgtctgactttccccgtccgaaatgctccacgaaccttccaaactcctcatccgcctcatcgtaacagttttccagcatttcccccatgcagtccccccgcagaagggacagctccccctcatccccgatacggaaggccggatctatgtccaggctgttataatggctgcggatgatattcaggcagaagctgtcaatggtggtaatctgggcctgggggatcagggctgcctggagccatagatgctcatcctcaggacgttccttcagcttctgctccactgcggcgcctatcctctcccgcatctcagccgcagctgcattggtaaacgtcattaccagcagctggtcaatatccagtgggcggtctccttcgcttatcatctggatgatacgttccaccagcacggccgtcttaccgctgcccgctgccgcggacaccagaaggttcctgtttctgctgtctataacctcttgctgtttactggtccaattcactgccatctgtttcctcgtctccttcagattccaattccgcccagatttcctcaggcttaagtcccttgagcttgcggtatccatagcctgctgtcttggtatcgaacccgcacactgcatggtaggggcaatagtcgcaggctgtcctgtttccctgtttgtaaggctttaagtccacatttcccatcagtatatcctgccccgcttccctgagcctccggttcacaaaccggcgcagatcctgaaaacgtctggtgctggccacggacgagcggctttcctggacatagccatccttaatcgctacgggtatcacatcggattccttctctatctcccggtccagatgccggataatgtccagttcactgtttaccagaccgttcatcctgagctgctttaatatctgtttttcgatatccctttcatccattccttcctgcttatccgctatcgggtcacctatgtggtagtagaagataccggcaggaaccacctccttgtccggatgtctcctctcctccatctccaccgccgcatccatatagaccaccagctgaagctgcaatccataaaacagggcagccaggtcaaaggatgtggttcctgacttatagtcaataatctttacatagacatggtcctcatccctgcacaggtccatgcggtcaatacgtccgcgaagctgcagctcttcatcctctgacagaccgatgcgcatggccttcaggttatcaatggctgaaaaggacacctcgaatcccaccggctcaaagtccccctttttcacctgctctgccagagcccatatggtgcggtccgtaatccgttccaccctgcctgccagatacgcgttgcgggctgagctggacatgattgtgttgccgtattcctccgttacctgggtcacgcattcctttacaaggctctttctcccctcttcggtcagctcccgccaatcctgccctctgtccttcatggaggcaaagcatctgtcgatggactggtggaacaggttgcccatgtccactgcctccagctcgtactcctgccgctccatcagttccagaccataccgcaggaaatgggcgtaggcacaggaggcgaactgctccagccgggttacgctgccctgcagttccctgccgtaaagggctctggcagctgcccgtccgattcccctttcctcataggaataaaaagcagcgtccaccagctgcctcaccttatcccggtgctcctgcgatgtataaaaatgctggaagagctgcatataggcagcgtcctcccgctccctgtcatcctccccctgttcctgcattccccgaagcccctgtataagcagctccctggcatccctcccggtccgcaccggccattccacggaatgctcgtccagggttttcattccgggaaacagctttcccacttctcccataagattggagggtctctggctcttgccgtccggcgtaagtccggcataggtgagcaccagctgtcgggagggctttgacatcataagatacagataaaatttctggatgcagccatcctcctttaccgtgggagccagctctatatccattttcctgagagccgccctgtcacggtccgataaaaggcttcccccgttctttctctggggcaccgttccctcgtttactcctacgaaaaacagtaccttcactgcttccagacggcttcgggtgatatcacccaccataacctggtcaaccgtggccggaatcacacccacctggatttcctgaaaaccggcgtccagaatctggatatagttcttcatatccgctttttccccgcccaaaagcccttccagccgctcaaacagttccagtacgcggtcatagacctggccgtattccctggccaggttctcatcccccggctcttttcgctccagaaagaaatccctgtactcctccagcttttccctcagctccatatgctccaggaactggcgaagagctgccgtcacagaggcaatggtggctccctctgccttaaatgcctcccgcagaggccgcagaggctccagtatccacatgcggtattggttcagctccttcaggttcagcttttcaccgcctctgtactgccgttcccaacaggaatcccagcgcttccacccccggatgcccagggcccgcacataattttccagccggtccgtcatctgctctgcatgttccctggaaccgtcgaatccgctcccagcatctgcctcccctgcatccccggacgtatctgccgctgtatctgccgccgctctctcctctgtatctgccgacgcccactcctttgtatctgccgacgccctctcctttgtatctgccgacgccctctcctctgtactcccagccttatcatacaccagtcctgttttcagataccggaacgcgctctcataagagaaatccttcaccatctctaacgctgcccgtatcagctccaccatgggattttccagaatactcttcttatcatccaggaaatagggaatcccggcctcatcaaactggtgggccagctcccgtccataggatggaaggtccccggtaatgacggcggcatcccggtaacgcatcccttcctcctttatcatctgctcaatcctgctgcacacgtaggcagcctcccctgccgggttgcgtcccttgtacacctggatgcgctcttcctttccctcccaggtcctgccggagtaccggtacaggttctgttccagaaaatccagctccgggctctcatcatatctccaggccggacgccggctgcagattatgtcctccttcttcgggattccatgctgctttgccatggaggccacgcggcacaccgtatgacggctcatataaaacagatgctggatactgctctccttgtaggcgttttccctggaatcaatggtaaccgtacataccacctccctggcgtgcatcaggaacagctccaccagcctgtactggaccggagtaaagccggtatatccgtccagaagaatgatgctgtctttgaggggttcccactttggaagctccctgcacaagatgtccagaatctcctcagccgtgatatagtggctctctatatactccctgaaaccgctgtaaatcacctccaggtcctcaagcttctgggccagaagaggagaatccgcctccccccgcacgtccctcagcatatccggtgtgataccgtactggtacagctccgagatctgggacttaagctggccgatgaagccggtctgctccagatgcccactgtagagggacagctttcctctctttaacccggccaccttgcgcagcaccatggattttcccatatcatccagcacaaccgggattctgacccccaggtcctcgaatacccggtaagccagacgcttaaagctgaggatatctatattcataatcccgtgtctgggatggagacggatgatttccttctgtgtctgcatggtaaactgctccggcaccacaaccaggtacttttgttccggatgctccatggactcctttatgacccggtcatagagcattctggtctttcctgagcctgctcctcccaatataaactgcaacgccacttttctctctccttccagcagacgggacaacgaaaacttctcatatttccccgccctgcaacataagctttaacaaactatcttagaggtcctgactatgagctctaaaaccaaaattgtggtactaaggatgaaggaaatcatctacaccgcaatcttcgtaggccttgccatccttttaattaccctctgtttcatcatgttccggcctgggaaggacaacgtttccgtttccgctgaacctgccggctacctgccgggcgtatacagcgcggcactgacccttggcagcgaagatgtgaatgtaaaggtaactgtggataagaaccgcatcacctccattgacctggttcccttaagcgaggctgtcaccaccatgtacccgctgatgcagcccaccctggatgatctggccagccagattataagcaatcagtccacggagaaccttacatatcccagcacctcccgctatacctccactgccctcctgaatgccatcaacacggcgctggacaaagcaaaagtggattgataaaaagcgggcagatgtttcccaaagcactccggcacgtctaaaagctcctgccccttgtcatgaaggcgggggcttttccgacgtaccaaatgtaaaaaaacggcagattgctctaccgtcttatcctacaaaagaatatgttttatcgtaccatgattcccgacccgtgtcaagttggcaaacccaagacctgaacctacacaacccccaagacctgaagcagcagtttcgccgcctcaggccttcattctatcacagttttggtatcaggatcccaccttttccatgaatcccatgtagttcatctggagccggaatatgtcgttggctgtcagcccctccagggctccctccatgaagtagcgttccccggccatatccaccttatcccgcctgacatcgccgccggcaataaaggtggggacgccatccccgctgtgatcccccaccttacagggtgtggaatggtctgccgtaaaggaaatatagcattgttccaaatccagctcattaagaagatatcccagcatttggtctgtctgttccacaatctccttcttcttatccggacggttatcgtggcccgccagatccgtgcccttgatatggagcaccacccagtcgtatttcttttcctttagaagctctgccgccagcctggcctttcccataaggtccgtgtcaaagcttcctgtaaagctgtccctgatatagtaatccatacctgccagccgggcaatacctcccactgttttatctcctgccacacaggcggccctgattttgtacctgtccttcagggaaaccatctccgtcttctgtccggctcccctggtcaggatgatattggccggcttaagccccttttggatcctctccttattaatgggatgctcctttaagatgccatatgctttttttgtgaattcccacagggcatctgctgtcttctgcgccttctcactgccgtccaaagccctggggccggataccttcttcccctcctccgtggtaccggggtccgtacagctgatagcatcgcttaatccctctcctctgagaaccactgcaatccggtgctccgtcagttcttttgccagcacccgggtcccgtcagacagcaccatgccgtttacggcctgtgccagaaactccgtaccctggctgattcgcccggccctgcggtccaccaccgccatatcctctgtaacggttgcaaaatttcctctgaacgccacgtccccgtccatcagctccagcccaccactgctggcctctaagggtcccctgcctctatacaccctgctgctgtcatagccgaatatctgcagatggcccacatccgtgcccacgggaatccccggcgcaatggggtatacatttccgcacatacccatttgaagcagacgctccatattgggggtggaggcgctctcaagcggcgtcattccccccagcaccggatccggtctgtctcccaggccgtccatgatgattaataatccctgtttctttctcattatgagttgcctcccatcttctttttcgcagccagttcctttgcctccttcagcatccccttatttttatacaggaaataagctgaaatcagaatcgtggctccccacatggacagcgccagattgcctcctgctttctttatattcaccgtcatctcacattcccggccaacgggaacctccccaaacacataggcgccgtactttacgccctggtccgtaaatatgccatactcctcctcggggtcgtatccaacgattcccgccagttcatatccctctggcactgccagttccaggctgtaggaaccgattgacaccggtgccgtgtttaccatggaatatgtaactgccttcagattgcccggggctgtgccgcttgtcttggccgccttcatcttgtaagtcccttcctggtgccagttcagggtaagttccaccggaaaatccgcctcatcaaaatccgctaccagataagatgtcatgcctgaatgctgctccttcggttcacccttaagggtacctgcccctgcctggacagacaccagctctgcatcctggtacattggtactgccagacgtccctggctgtcggtcacgccttttatatgggagataacagctgcatcctccccctccggcgccaacctgtccgccatctctatcatggttcccagctgcgcaccgcccggttccccactgcctgattcctccgccatggcagtgaccgcaaggcccatgctgagtgctgctgccaccataaacgtaatatatccttttcccttcatattgacctcctacataatccctatcattttaaaccaggtaaatgacgccgccaccataatgccccattttgccagcagggtcaggacaccgtatgtcatttcctccaggaccgtgaattttcctgtgctgtaatatgtcaggttcaccttgctgtgaggcggaagcgtgatggtatcgcatatcatgaaggacgccggcagggccagggccacaggattgaatcccgccacctgcgcaatggatataatggtgggaatcagaatgatggtacgaaccgtcttgctggtgaacacaaagtgggagaagcttgcaataaaaataattaccgcgtaaagaaccatgaagctcatatgctccactcccagcttgtcaaacacgctgtttaagacccaggtagccacgcctgtatcgtccagggccagccctcccgcataagcgccgcagctgaaaatcatcagatcccagggtatctttgcttccttccaggtcaatatccctacatggggcatgaggaagatggctgccgacacaatggctaccacaaccagggatatgtcgaaaccaaacatggctccatggtactcgtctgttgcccacaaaaagatggtgataagaaagataatcagggcccgcacttccactccgttcatttttcccagtcccttgtactcttcctccagggccgtcatcttctccgcggaagcagaacggtttcccgtcttaaagagcatttttccgataaggaagctggctgccagtgtgataatggcaaccggagcagaggcaatgaaccacttcatccaggaaatctccgtacctgtcaggtccttgataaagctgatagccagaatctgggaggatgtagccgtcacaatggctccggtggaaaggttgttggcctgtatcccctgcaatgccataagctttccaaaattccggtcctggggcgtagtgtttcccacctcaaagacctccataatcatcatgacaatgggaagaagcatcacagccctggctgttgtggacggcaccacaaaggcaatgaggaaattggttaccatcagcacaatcagcactgtgttgacgctctttccaaaccgcgtgaccagaaacaatgccagacgttttgcaagtccgctcttttccatgcccgaagcaatgacaaaggctgctatcatcagccagattacttcatagccaaacacgcccagggtggctttttctgtccaggcccctgctgccggaagcagaaaaatcacaatcagtgaagttacatagtttggaatcccgttgctcacccacagaatcagtgcaaacgcaaagatgcccatggccatcttgcctgaataggacagtcccgcgggagtcctcatggtccaaatcagcgtcagtgccaccaacgctgccggtagcccgaaatacgccatgcgcatttcaaaagggcttttctgtttttttacctttgccggtacgctgctcaaaataccactctcctttttgtaccgtctccggtactctgtttgattttgtattgctttgatgttaccattgtagtcttaatccctggtcagatccaatcaataatccttatatcctgtcataacagaacgttatagttaccattttagtcccgcctcccataagacttctttatagttggctttttccctttgatttctcattaaaaatcctatactttttcctctgtttccgctaaaatacaattaataatgtttatggattggaggaaacacacatggatttggaatccctggagagttttctggaggtggagaagcataagaatttcacaaaagcggcagaaagcctgttctgtacccaggcagcggtctccatgcgcatcaagcgactggaaaccgccctggaatgcggcctgttcaaacgctgcggccggcgtgtggagctgaccagagagggagagattttcctgccctatgccaggcagatggtgaatacctggaagtctgcgtcggaacacctgctgcagaccaggctgatggaggaaagcgagatacggatcacctcctccagcacgcccggaacctacatcataccctcgctgatttacctgttccgccagtcctatccctacataacagtgatcaaccacatccagtacacccgcagcgccatatcagatgtgattgggggaaatttctccctgggcattatctcccagcccgcctcggtgggcacggacgtgctttgctgcgagccgctgatggaggacccccttgtgctggtagtccatccccagcacccgtgggtggaaaaaagggggattctctttaaagaaatcacggaagaaaccctgctgatttccaatcccaatacgtctctggtgaattatctggaaaaggagggccgcctttccttagaaccttccaggctttatgtggccggcaacatcgaggccatcaagcgcgggatacgcaaccaccagggaatttccatcatgtctgagtatgcggtgcgccaggaactggagctgggccttttaaagcaggttccccttctggatcatccgggactgaagcggcagctctataccattttccgtaaggatatccggtttaaactgtccaccagtctgtttttggaatttttcaggaaggccgcggaggataaccggcttctgtcccagttatagacaggttcatgcttccatacttaaccatcagttaagaaaatcctcccgctgtttaacggcgcctccattgtgcagcgccgttctatggtttatactaaccatatccggccggacaaatatgttttagcgaaggagagattataagatggatataaaactaggtccgcgcattgcgtcactgcgcagagccaaatccatgacgcaggagcagctggccctttccctgggcgtatcgcctcctgctgtcagcaaatgggagacaggcgcctcctgcccggacatttcacttttatgccctctggcccgcgctctggaaaccaatgtggataccctgctacagtttgaggaaactcttacagaagaacagattgacgcccggctgaacgaaatcgttgagacagccagaaaccatgggtatgaagctgcggacggcatggtacagtcgcttctgcatacctatccctcaagtatccccttaaagtccagggcagttaccctgtttgacctgttcgcgatgctgtttcccgcccagccccaagagattaggaatggctggacgaaacagaagaaacagcttttagaggacgtgcgggcaagcggcgccgctgcctgctggcaggcggcagtatcccacctggcctccatcgccatttcggaaggcgagctggagaaggcagagagccttttaaaggaactgccccagcacaccactgactccacctctatctgggccatgctgtacctgaaaaaaggagaagcttcccaggcattggaggtcatacagaaacgcctgtatgtgctgacacgccaggtacaaaacttcctgattcagatgatgaacccggaaatgaccccagacaccgcaaggacactggaactgtgcgttatttaccgccagctggaggagctgctgggcgtgggaaacggcatgagtcccggcttctttgcccaggcttaccagcgggccggacaagaccagcaggcgttggacagcatgattcagtttgtggacgccatcaccggcactgtccagaagcccaatcccatcctgttctctcctgcggtaaagatagacggggaacatcctgccgccacaaaggaaatgcgtgaattgctcctgaagagtctgctggatgatgggtattataaacagtttcatgataataaacggtttatggacacagtggataagctcaggggtagtattcaggaagacacagcctgagcatcttatatggaaaaaggacagccgcttggtaaaaatacctgtcaggctgtcctttatacattttttatatcatcactgcacatcttccacccagcacatcttggcggacttctcaatatgagccctcatgactgcttccgcttcatccggatctcctcgtttcaggctgtcaatgattctcttgtggaattcaattccatcctggtgtccctcctgctgcgttacaattcctctcagcagaattgtcttccaaagactcaccatggagttaatgaaacaaatcagcagcggatttccggttgcctcggctatacagatatgaaactggatgtcatagtcaatgcgtttatcccatacatccttactttcaatcattccctgcagatactgttccagcttctcaaaatccaaatcatcctttttttcagccacaaccctgctggcatagggctccagcagcttgcgcatctcatatacatccatatatccgatatcatccagccgcagcatgcggttgagaatctctgtaacacttccgctttcaggctttgctataaaggtgccttcaccgttcttctgcacaatcagctgtctttccttaagcagtttcaaagattctctcatgacattacggctgattccgaatttcaatgccagctcctgctcacttggaagccgttccccctgccgcagcgaattactcagaatcatgtcctccatacggtcagccactgtctcatataaatttttcttctttactttgaaatccagatcttccatatacattacccatctctatcttattattctaaaaaccccggcggttacatgtccccctcctacttatcttaatacaacaacagaaaagttacaagaattttatcggccaaagagtctcggcagccacataatgacatccggcacaaacgttacaagtatcagcaccaggaccatcacaaaaaccatgggcatgacttcttttatgatggtgttcatcttctctccgctgattcctgtcacaataaataatagcatgccaaatggcggtgtacaaagtccaatcatggtattcagcgtaaacaccaccccgaaatgaaccatgtcgataccaaaggactgggctatcggacataggataggcagcaataccagctgtaaaacagctgaatccagcagcatccccagtatgaacagcagtatgttgacaaaaacaaggaaggaaacctttgtggtggcaaaagacagaatcagatttcctgccagagacggaagattctccactgcaatcacataagaaaacacataagcagcacccagcataatgccaatctgtcccgtagacttcaccgtattcttcaatacctggataaactctgacagtgttatggaacggtacgcaaaaacggatatgagcagggcgtatagggctgccactgccccggcctctgtggcagtcatgatgcctgtataaattcccatcagaaggatgatgggggttaggagggcaggaaccgcgctcaccgtcattttgatgaattccatcccggcatattttcttccgctgggataatttctcttattagcaatatagcagacataaatacacagagccagggccagtataattccaggcaccatgcctgccagaaacaggttgccgatggatgcgcctgcaatgaccccgtatattaccagggggatgctgggagggaagatggggcctattacagcggaaccagctgttatggctgcgctgaacccgtcatcatatccctcctttcgcatggcctcaatttccatgattccaagtcccgatgcatcagccaccgcggaacctgtcattcctgaaaatatcagggatgcaatgacattcacatgtcccaggccgcccttccaccggcccaccagaaccttggaaaagtcaaatatcttatccgttaccttgctggaattcatgatattcgcagcaaagataaaaagcgggactgccagcagaataaagttattgtacatcttactggtaaaaatttccaccaccacactggggtccatacctttcacagccagatagagcgtggaggatataatcattcctatggctatcggcatcctgatgacaaaacacaccaccagcaaaccaagggaaatcatcatggcatggctcatactgcctttcctcctttccgaaattccttataacagcctgccaggtccccgcagtaccggacaatggtaataatctgaaacacgaaaaatcccagatatacaaatcccagaggaaccttgaaaaccgtgctgtacctggtaaaataaaacctgtaaaactccagtgccggcggtaccagatagaccagcaggccaactatcaggatatcctgaaggaaccggaacagcctcctgaccttctcccccacaagttcataaattacagaaaaaacaatattatcatctgtccgctgtgcatagcagcatcccaacgtaataatccatacataggaaatctgcgccagctcataaggccataccaggggattattaaatatgtatctggatataatctgcaggatgaatgccacaaacagcagaataaaccagcacataggcatgtaaatctctataaaatccatgacagcctgaaagcatttcttccatacgtccattcagaatacctctcattaatatttcaaatcctttatctgatgatacaattccatatcccaatcttttaccatatccttgtcgttcaaataatagttctcagaatactccatgaacgcattcaggtccggttcaataaccgttaatccctgctccttcaggaacgtaattgcttcctgttcctgcttcaggtttgcctcatcgcaccacgctgtggctgtcttaactgcctctgtcatgatatccctgtattcctggggaagagactgccatttctcctcattgattgcgatgcacataggctcaatcacatgacctgtaagaacaatctggctggtcacctcataccatttctgtgcaatggtggtaggcagaggattctcctgtccgtcaatggcgcctgtctgaagtccctggtatatttctgcgtaagccataggtgtgggattagcccccagcgccttccccataaagagccatgcagaagaattaggcatccttaaattgacaccgtttaaatcttccggttttgtaatctctctgccaatatccctcatatccagatggcgggctccgcagtaaagtgctgacagccagcgcacatttaatttctcagccacatcatccgctaccttctggccaatctctccatccataactgccctcatgtgctgttcattctgaaaaatataggctgccgtaaacatagtcaggtacggcatctggtcggatatcaggaacggtgagctgaacatcatgtcaaggcttcccctggcaacagcatccacctctccctcttgggtcatcaggcttccgttttcgtggatttccattgtaaatttaccattggttttttctgatatctcatctgctatcatatgcatggcctttacataatttacatcgccgctggactgtgtggaaaataccagctttacctccggcagctctgcgcccgcatctgtctgcggctgctctgaggcatcaggggctgcttctgtctttgcctgcgcctgcgatgggctctttgtctcagatgtcttttggccgcacgcagccagacctgcggtcattgcaagcactaatgcgatactaattatgcgtttcttcatagcgtttatcctccctattttgcctgaatctgtctcaacatgtttagttcctttcgggcaccgtccataatatgtacataatctgaaccagccgatatcacgttaatgcccttttcatgccagtagcgtatgatttccgggtcatcgctgcctgtggatacgccggaagactttccgctctcattgatgatcgccaccgcctcatcaaccaggctgctggtatggtcctcaaatacacggttcagctcccctatggagccggacaagtcgcagggccccagaataaagcagtccacataagggttcttgaccatttctttcagattctttactgctgtctttgtctcaatctgtacacaccggaccagctgctgcctggatgactctataaatgaatccgcatcatccagcccgtacctcactgcccgcaaggggccaaatcccctaatcccataaggcggatacagggtggcctgcatggcagcgtccagctcctgggctgtattgaccattggaatgatgattcccgtagggcccatctccagcactctttttgccaatacctggttattccatggaatacgaaccagtgtatccgtaccgcctgcctttgcacccatcagatggtacagcagcacctggtaatcaatggctgtgtgctcggtgtcaatccacaaaaaatcatatcccaatccggcacacatctcactgatacagggctctgtcaggcatatatgcatccctgacaattcatccctgtctctcagcttctcctttaaagttttcatgtttacctcctccaatgtacttacggcattagctatacagctatactactagtatatagctatacagctttttgtcaagtaatgatgtgtgattttatttaaatccagcattttaccccaactattttgtgcacttttaccacaacagccgtcgttcaatcgagtaggaggcggtgattaaccgccgtcctctcacaccaccgtgcgtaccgttcggtacacggcggtt

SEQ ID NO: 3235 - DNA, 1340 bp, Unknown
  gut microbiota DNA sequence
tagtctgcaaccacatatttggctggtcggccatgttaagcggaacaggaagtatgaatctcctaaggcagatggcagaagaaaacttggtgaatgcaatttttctgtacactgtgattacggttgttggatgtgtggcgctaacgcttcccggagtcacctttgctgttctggccggactgcttttcggaccggtattgggaacaatttgttgttctattgctaccatgataggagccatggcagcgtttctggcaggccgcttcttcctgagggatagtattaaaccggttgttatgaaaaaccgataccttaaaaagtggcttttcgatgaagcaggaaagaatgaactgtttgtgctcatgattaccaggctggtaccgctgttcccctataatctccaaaattttgcatatggtgttacagatatccctttcagcacctactctatattctcactgatttttatgttgccggggacagccatgtacaccataggaatatcaggattggcggataaggaaaacagggtactttatatcagtattgcggtcatactggcggtaatagtcatgggcatgggggtgttcttcaagaaaaagtttgtggtgcagccagagggagtggaggatgtcaatggacaggaaagttaggataaaggatggggacaagtgtatacactgccatctctgtcagaaacactgttctttcctgacaaagtacggggcagatatcggtgatacggttaaactgagggagctcgcatatcattgcttcttatgcggaaagtgttctgaggtatgtccgatagggattgatggccgtggtactatattggatatgcggcggacggaggtagaagagaacggagggaagtgccgagaaaaaggatatgcaatgctgttgttggaaaagaaaaattatatattccggaatgaacggcatatgacaggtaagagtgtactgtttccagggtgcaattttccatccttttatccggagactaccaggaaattaatcaaaatactgaagaatgaggtagacatgggagtgctgtttgactgttgcggcaaaccggtctcggaacttggactgaaagaacaggaagggaaaataatcaggcggcttaatgaaagacttcgcaccgcagatatacaggaaattgtcattctctgtcccaactgctattatttcctgaaggataagctggaaatacaggtccttagtatttatgaaaagttatcacaactcggaatagggcagaaagtagatgggaagggaagtttgttcctgccatgtccggacagggaagaccagcagtgggtatcatggctggagcc

SEQ ID NO: 3236 - DNA, 10235 bp, Unknown
  gut microbiota DNA sequence
ccaatttattgaatttttatatttatttaataaaaatgctctttatttttaacggctgtaatgatatcctataatagtttatatgtaaactatctggggaagtacaaaaattaagagaatcgggaggaaggttccttatggcgtttattaattttaaggaccagtggtttcaggagcttcgcaaggtgaactggctagtccgggaatgtgtggaggaaaagtgcaggcccttcggcattaccccggaacagggaagggtgctcaaccatctctttctggcggacggacaggtaaacctgactcagctgagcaggagtctccatgttacaaaaggaaactgctccatgttctgccggcgtctggaacgggctggtcatattacaatggtaaagaatgacaaagacgcccgttttataaatgtggcccttacggaaaaagggcggtcgttggtgcagggcatgatagagcagatgggcagtcattctgagaaggatactatgagcaaagaagatttggagactattttaaaagggttaaaatgtctggaaaagtatttgcagagctgaacagcttttccggatgtttttattttgcaagaacaaggaggcacaacatgaaaaaaatatttgcggagctgaacgcgttccggccggaacttctatgcgtgctggtcagtgtggcggccggagtaggagccacgctggggcttcccacctatctgtcagatattatcaacaggggaatcgcggataaggatatgaattacattcttcacaccggcgttattatgctgggaatcgctattctgggaatggtatgtaatattaccacaggcttttttgcctccagaatcgcgttgggtttaggacggaatgtgaggagcaggatttttacaaaggtggaatatttctcccaggccgagatcgacacattttcaaccgcgtctttgattacgcgcaccaacaacgacattacccaggtacagaatttcatggtcatgtttctgcgcgttattctgacagcgcctatcatgtgcgtggtgggcatcatgctggcttacagcaaaaatccgaaaatgtcaagcatacttgtggtgtccatgccggtgatggtgctgattatcagcctgattggcaggagagccatgccgctttccagaaagatgcagacaagaattgaccgaatcaacctgattatgcgggaaaagctttccggcatccgggttatccgggcatttgggacagaggattacgaagaaaagcggtttgacggcgccaacaaggacctgatgaacaatgccatgaaaatgatgcatgccatgtcgctgttgggaccgtccctgatacttatattaaacctgaccgtggtggggcttctctggcgcgcgggccagggaatcggtacggagcctgtgatgccgggagatatcctggcaattatccagtatgtcatgcagatcatgatgtctgtcaccatgctttccatgattttcgtcatgtatcccagatgcgctgcttcggcggaccgtatctgtgaggtgctggatactgaaaattccatcggggatccggcggttcccaagctgtcagacgggcagaggggatatctcaccttccgcgatgtaagcttctattttccgggggcaaaagagccggctgtcagccatgtcagctttgaggctaagccgggagagaccacggctatcatcggaagtacaggaagcggaaagacggcgctggtgggattgattccccgcttttatgatgtccaggagggcgaggtcctggtggacggagtcaatgtaaaggattatgacaggaggaccctgcgccggaaaatcggttatgtgccccagaaagctctgctgtttaagggcaccatcatggaaaatatccgttttggggatgattcggccagcgatgagcgggtgaaggaagcggccgccattgcacaatccacggatttcatcgaagataaaccggacggatttgactcatccatttcccagggcggaagcaatgtctcaggcggtcagaggcagcgcctggcaattgccagggccattgtcaggaagccggagatatatgtgtttgacgacagtttttccgccctggatttcaaaacggattctgccctgcgccaggcattgtccaaagagacgggaaatgccactgtggtaatcgtagcacagcgtgtcagcactatcatgaatgcggaccggattatagtgatggatgaagggaaggtcatgggaattggtacccacagggagcttttaaatacctgcggcacctaccaggaaatcgtccggagccagttgtcagaggaggagatgagtgcatgaagcaaatgaatgtgagggcagcagataagaaaatcaataccaagggcaccatgggccgtctgttccgttttatgaaaccataccgaatcagaatcattctcatggtggcctgccttgtgatgggagccgtgtttaccacccaggggccatatacccttggcagggccatggatgcgctggtggccgtggacagcgccggggtcctccagggatttagaacgttcatcactgttctgatacaattgggctgtgtgtatgtactggcctttctgttcaactattccggccagtacattgtggcaggagtggcggagcgcacaatgcatgatctgcgcatggcagtagacaagaaaatccgccgtctgccgctggcctattttgacagcaatacattcggagatgtgctgagccgcgtcaccaatgatgtggacaccatagatacctcccttcagcagagcatcagccaggttatcacagccgtctgtaccatggtatttatattcgtaatgatgctggtggtcagcccggtgctgacactgatcggcatttgtgttatcccggtttgcggcctggtgagcatgaaggtggtaaaacattcccagcggtatttccaggggcagcagtccgcgctgggggatcttaccgggtatgtggaggagatgtacaacggacagaacgtgattgccgccttcggaaaagaggaggacgtcatcgggaattttgaggacataaacaaccgtctctacaacaatggctggagagcgcagttttcttccagcatcatcatgcccttaacacaggccctgaccaacatcggttatgtgggggtggcggttgtcagcggatggctctgtatcaacggcaggctgagcatcggtatgatacagtcctttatccagtatctgcgccagttctcccagcccatcaaccaggtatccaacattgccaacatcatgcaggccaccatggctgcggcccaaagggtatttgagttcctggatgccgaggaggaggtgccggaagcagagaagccgcaattccccgaaatccgggaaggaaatgtggatttcagccatgtgcggttcggctacacagaggaccggaccctgattcatgatttggacctgcatgtacacgcaggcgacaagattgccattgtgggacccaccggagctggaaagacaacgctggtcaatctgattctgcgtttttacgatgtaaacggagggagcattaccattgacggcgtggatgtgcgggatatgaaacgggaggccctgcgctccatgataggcatggtgctgcaggatacatggctgttcgcaggtaccataaaagagaacatccgctacggaaggctggatgccactgaccaggaggtgacagacgctgccagggcagcccacgccaatggattcatcatgtctatgccgggaggctacgacatggagcttcatgagggggcttccaatatcgcccagggccagcgccagctcctgaccattgccagggccttcctgtcagacccggaaatcctgattctggacgaggcaacctcatccgtggatacaagaaccgaggtggcaatccagaaggccatgaataaactgatggagggccggaccagctttgtcatcgcccaccgtttatccacgataaaggatgcggaactgattgtgtacatggagcatggggatatcaaggaagtgggaaaccacagggagcttttggcaaagggcggttactatgcagccctgtataacagccagtttgcagcagagaacgctggataggctgtttggaacaaaggatagtgtgcctgtgataaaatcaggatataagggacaggagggtttgtcacttctcctgtcccttatattgtcaggccagagacagttttaactcactgtctctttttaatcttcagctccgcataggcgataatctggtacagcacccctgacacaatgcagaggatcacaatggaggtcaccaccatggtcatggcaaaggtctgggagccataggtgatcagatatcccaggcctgcttttgcgctcaggaattcgcctataatcacacccaccagacacagcccgatgtttactttcatattgctgatgaccaggggcagggaaccgggcagcagaacctttaagagcacatccttccttccgcctcccagggaataaatcaacttgatttgctccgtatccatctgggaaaatccggtgtataaggttagaatggatccaaatacagccacggacacggcagccaccacaatggtccgcatgttattgcccagccaaacaatcaaaaggggggccagggcggatttggggaggctgtttaacaggacaagaaagggctccagcacctgggccacgcttttgctggaccacagaagcagggcgcatgccaggccgaagatggtgcaaacggcaaagctgataagggtttccataagggtgacccctgtgtggaggaacaggcttccgtcctttgccatggaaaccaggcatttggcaatcatcacaggggagctgaaaataaagctgtcaatccagtgcatgtcggccgccaactcccacagggccagaagaaggaccagcagcatgacgcggcatatggtcacctggcggtggcgccgtatttcacgggccacatattcctgctgtgccacggacatattgcaggctgatacaggctgtttatctctattcataagtcttcagctccttccataccatattaaagtaagtggaaaattccgggcagttcctgcggtccagggagcggatgcaattttccggaaaatcaatggacaggatttttttgacccggccgggacggggagacaggaccaggatgcggtcagccacgctgatggcctcagacaggtcatgggttaccagtatggcggtcttgtgtgtctggcgtatgatggagctgatgtcgtcgcacacagacagccgggtctggtaatccagggctgaaaatggttcgtccaggagaagaaggtccggcttaagggccagggtccgtataagggccgctctctggcgcataccgccggacagctccgaaggtttggcatattcaaagcctgccagaccgtaggctgccatcatttccagcagttcctgcctggcaggttcgtccaaccgcttttgaatttcaaggccaagggatatattggagaaaatatttctccattcaaataaatgatccttctgcagcatgtatccaatggcagaaggagatttggtcagggggacgccgtctatggtgatggtgccgccctcaggctttgtcagtccgcacagcatggacagaagggtggacttgccgcatccggaaggtcccacgatagccaggaattccccgggtgacacatcaaatgatatatggtcaagggccagcgtctcaccatctaacgaatggtaggaatagctgaccccgtttacttccagtttgggaatcatgaagaagctcctttcaattagaaatcaattccttgatttattatatgtagacaacgggaaaccgttcgcccggagcaggaaaaagaaaacaggcccctgccgcttgataacggcaggaagcctgcatgataacaatatgagcgtgggaccttaccccctacttctggtaactccagcttactggcgtgggtctggccgaatcaaatacctgggctgcgtcaaacagatcagtcagtcgtttcttggacggatctgtctggatgaggtcctcatacagccggtagccatccaggttccttctggccatgcggaagtagtttgtccccatctgcgtccagtagggcttgctggcatccacattgcagaaatagcggaatcccttggattccagataggcaaagcggggattgtcctgatggtaggggcgccagtctgcaatgtcgttgccgtaaggataaaggatgatatcagtgggcccgatgagggattccacctcagcctcccatttgtccgtatcagcccggaaccgttcctcgtcaatggcaaatccgccctccggatcatccgccacccccaggtggagatggccccagctgtgggatgccagctcccagccgttatccttcagacactgggccactctggctgcctgctcacggtcagcctcataggtggggctgtcctggtaagaggaggcggttctgtaccccagtatgccttcatagccggtaaacgcgataatggctcttgcccctttgtaggaaaagtcagggtgttcctgtataaaatcctccaaaagcggaatcaaatcataggaacccgtggaggtggtgccgtcgtccatgaccatctcacaggtgggctttccgtcctcgccaatcacgacccgtttggcaaacccgtccccgtccatgtagggatagtagcagacatcgtcctgggacatgacaaaaggcttctttccctccgggagcatgacgcttccctttacaaaacgcacgtttccattttcatcaggttcctcataggccacatcgtggatgcggaccagcacatagcccttctggtacatatcctccagtatcttaagaaattcgtccttggtggtcatgactgaattatagttggcgctgtccgagtccccgtcaaaagccttggaggtatccatgataagggagtggaaaaaaatgtgggtgacagcgttcatatcagctggaaccagggcggccttctgtgattcataccgtgccagcgcctccttcatgcgggagtcattcaggtccaggccgctggagttgataagctctgccgccttgtcataatcataccccatggcgatacggtcagcctgggctatgagccgggaaatgtcgtcctggggaatttcggcaaaaggctggtttgatgagtcgccgccggaagcggggccggaaccgctgtcgggatagcggtcggaattgctgccctcgtccggattaggggagccgttccctgatgaggctatgacctggaccgttccgtccggctgtttcgctaaaacaaaccggtagagggcgaaaatgccgccccctaccagtacagtgattgctaataataaaataaatgtaggaagatgccgtgacatccgtgcaagcttctgcctgcgcctgcgggactgccggcgtctgaaatctgctctgctcataaaatttctcctgtaactggtacttgcctacctattatagcatagattccatgaagtgggtactatgaaagaaaaaacaaatattggaattgaaattcaacttgttccgtggtatgtttaagttggtatgaataaacataaaggagaacaggaacatggaagatatggtaaaggatcctaattgcgcatattgtatgcagggcgaactggtggctaagttcggttatcctgtgtgtgagatgaagacaggctttctctatgtatttaaggagcagagcaagaagggaagggttgttctggcgcataggaagcatgtcagcgagctcattgacctgaccaatgaggagaggaatgatttctttgcagaggtagcccaggtggcccgcgccgtacataaggtattccagccggacaaggtaaactacggcgcttacggcgatacaggacatcacctgcatttccacattgtccccaaatatgagggcggtgaagaatggggcggcacctttgagatgaacagcggaaggaccatgctcacagacgctgagtacgagaagatggcagaggacttaagacaggccctgaaggaagtataattataataaggtaggaagataaagcagtatatgcagcaggagccgggagacaatcacggcctgctgcatttttttgcggtaaaaatcaaggctttgcgggcataagctgtctgtccactcccatacaattagtagcagatgattttattggaggaaaatatgagacggattgcagcgatattatgctcggcggcaatactggcctcctatcccgggattgccgccctgggccaggaaccggcaatcgccatccccgtgggagcgggggtatcagggagcagcctctatggacaggaagatggatggacaggggaggatgtacaggcggcggaaagtgcgcagacggtagatgtgcagacggcgggggacgcgcgggccgcaggagatgttcgggtgtcgggaaacgcgcaggcggtagatgtgcagacggcgggggacgcgcgggccgcaggagatgttcagacggcgggagatgcccaggcagcgcctgcggaccagagtcaggcagctgtccagatagccgctccatcggccattctcatggaagcatctaccggacaggtaatctatgaaaaggatgcagatgaaaagcgaagcccggccagtgttaccaaggttatgacgctgatattgatttttgatgcccttcagtccggaaagatccagctgacggacgaggtagttaccagcgcccacgccaaatccatgggaggttcccaggtgttcctggaggaaggcgagaaacagaccgtggaaaccttgattaaatgcattgtcattgcatccggcaatgacgcgtctgtggccatggcggagtacatagcaggcagcgaggatgagtttgtacggatgatgaatgaaagggcagccggccttggtatgtccaacacccatttcgtggattgctgcggacttacggaatccccggaccattacactacggccagggacatcgccatcatgagccgcgagctgattaataaatatcctcagatacatagttattccaccatatggatggagaatataacgcatgtcacaaagcagggaaccaaggaattcggcctgtccaatacaaataagctgctcaagatggcaactaattttacggtcacaggccttaagacaggttccacctccattgcaaaatactgcctgtctgccacagcggaaaaggacggggtgcgcctgattgccgccatcatggctgcgccggattttaaggccaggtttgcagacgcccagacccttctcaactatggatatgcaaactgcaagctctatgaagacaaggaacatctgccgcttccccagatgccggttaccggcggcgtggaggatgaggtagggcttacctatgagggaacattttcctatctgagccttaaaggggaggatttgggagctattgagaaaaagctggtgcttttggaatccgtacccgctccggtggaaccggggcagaaggcaggtgtgctggagtactccctgggaggcaaaaaactgggagaggttaatgtgctgaccaacgggagcatacgggaggcaggttatatggattatctgaagaagcttgtgggggcctggaagctgaaccggcagtagctaatagctttatgtgcagaggattatttgcaggggctgatattcagggtaatgaaataaggggtattaatttcgctgtcatcctgatggatggcagcctttttaacggggattaaaatgccgcaaatgtttttgttaactgtttctatgtgcccctatcaacttctatatattccatcgcattctatgaccttcggcaaaatatatgaggctctgtggagtaacggattggggatatggggatggataagaagcttgtattttgggcagcgtaatggttgattggcatggagcgcttttgctggcaaaacatggtgagtaaagaagcagaaaacagatataaactaaatcaatgacagaaaaggtaaaaagcagcgaaaaataaaagacagcaaggaaaatgacaacaaaatcagctaaagggcataactttgttagctggttttgttgtcgggcttgttgtctgccgtattgtcgattgattgcttttatttgtttggcctgctgtttgttctact

SEQ ID NO: 3237 - DNA, 17494 bp, Unknown
  gut microbiota DNA sequence
tgtgtggtcacaaggtcttcatagggaacacgtgccgacagttcgcctgcctcttccagaatgttttccagaagctcaaagctttctttttcaaatacggtgtcatccttccatgtatcctggtccttataacggcctacgataaccgcgagtttatccaccggtgtttctttaaactggggctgtatggttttggctatttcttcggctgaatgggagtttacgtagtccatgcctttttgaattgcattggtaaacttctgaatgatttccgggttctgttccacgtaactcttcctggcacagtaagcagtgtaaggtacatatccggattctgttccaagagaagccaccacatatccgcttccttcgctctccagagtggttgcaaaaggctcaaattccacggtatagtccgcatcatcgctggtaaatgcagctgcggtcagcccgaagttaatgctctggtcaatagaaaggtctgttttggggtccataccgtgtttcttcaagatatactcaaagaccatctgaggcatgcctcctgcgcgtccgccgagaaccttcttgcctttcaggctttcccacttaaaattatcctcaggctggcgtcccaccaggaagttgcctgcacgctgggtcagctgggcgaagttcaccgcatagtcctgggaaccttcctggtatacgtagatgctggcctcggagcccatgaagccaatctgggcgtcaccggagataagggcggtcataaccttatcagcaccggcaccgttgacaagggtcaggtcgatgccttcgtcctcaaagtagcccagttcgatggctgcgtattggggggcgtagaagatggaatgggctacctcgttgaggaccagcggggtgttgcctgaggatgaactgccggatgattttgaacagccggttagggcagcggcgcccatagctgctgccagaagaatgctaattgcttttttcatcaatatgctccttatatgatttggtatagtatagtctattagggctggagggaatcggtgaataaaacattgggaactgagaaattagttttaattgcctgtgatgtcaaaaaatgatatgattgacagtagtcatgtaaatagaggacagcggccggattatttaggaaaggatgcatttgtattcatgaatgattcattacaatattacaaccaacatgcaaaagaattttctgacagcacaagggatgtggagtttaaggagatgcaggagcgtttcctggcgtatctgaagccgggagccagaatcctggatttcggatgcggctccggcagagatacgaagtatttcctggacaggggatttgaggcggatgccgcagatggttcggaagaactggtcaggatagcttctggatatacaggaattgaagtgaggctgatgtattttcaggatttagatgaaaaggaagcctatgatggaatctgggcatgttcttccatcctgcatctggcttatagagaactggaggatgtgtttatcaaaatggcccgtgctttgacatcacatggaatactgtatacatccttcaagtatggtaccgctgagggtgagcgcaatggccgttattttacggatatgacggaagaaaagatggataagctgttaaaagatgtaaattcgtttgacatattggagatgtgggtaacgagtgatgtccgtccggggagagcagaagaaaaatggctgaacatgatattgaggaaaaaatagaatcgctgaggcagattcaaatggaaatcgggccctgtgaggtcattaccgggggaagggataaaaaaagatttctgttataccagctggagctcagcatgctaaaggctgagcggattgatatgattgtgtcgtttctcatggagtccggagtgcgtatgattctggatgatttggagcaggcgctgaatcgcggagtaaaaatcagaatcctgaccggaaattatctgggaattacacagccgggggcattgtgtctgataaaggaacggttgggggaccgggtggacctccggttttacaacgaaaagggacggtcgtttcaccctaaagcctacatattccgaagaaaggattttggggaaatatacattggttcatccaatgtatcacgcagcgcccttacatccggtatagaatggaactatcattttgatgaaaggcgggacagccggaattttcatcagttttgcggcacttttgaggatctgttttataaccactccatcgtcataaatgatgaggttctgaaacaatattccaaagaatggaaaagaccggcggttatccgggatatggaacggtatgacagccttgacgacgagacggacggggaagtggtatttcagccaagaggagcacagatagaagctctgtacgcgctgaaaaacagccgattggaaggagcggagaaggcattgatctgcgccgccacaggtattggaaaaacatatctggctgcgtttgattctcagccttatgaaagagtcctgtttgtggcccaccgggaagaaatactgaagcaggcagcagaaagcttcaggaatgtgagacattccgatgattatggctttttttatggtaaagagaaaacaagggataaatccgtgattttcgcttctgtttccagtttgggtaaaacagattatctcaatgaatcatactttgccagggattattttgattatattgttattgacgaattccatcatgctgttacagaccagtataaaaaaatcatggaatattttaagccccggttcctgttagggctgacagccacaccggaaagaatggatggaagaaatatatacgcgctatgcgattataacgtaccttatgagattggcctgaaagatgccattaacaaaggtatgctggtaccatttcattattatggaattctggacgagacagtggactattccaagattcgcattgtaaaaggaaaatacgatgaggaagaactgacaaaggaattcataaagggcaggcagtacgaactgatttataaatactatatgaaataccgctcaaaaagggcgttgggattttgctgttcacgcacacatgcggagcagatggcaaaggaattctgccgtcgcaatattccggcggcagctgtatacagcgattcagacggcgagtatgctgttgagagaagtgaagcgatagagaagcttaagcgtggtgagttaaaggttattttttctgtggatatgttcaatgaagggttagatatcagcgaaattgatatggttatgtttttgagacccacagaatccccggtggtatttctccagcagcttgggcgggggctgcgtaaaagcagggataaggaatacctgaatgtactggattttatcggtaattatgaaaaagcaggctcggcaccgttctttttaagcggaagaagttattcaagtgcggaagccggaagaatgcagcagcaggattttgagtatccggatgactgtctggttgatttcgacctgcgtctgattgatttattccatgagatggcaaagaagagggcgaaaaaggaagagcggatccgcagtgaatacttccgtattaaggagatgctgggcggcagagtgccggcccgtatggatttgtttacctatatggaggaagaaatactccagatatgtaatggtttgcagaacagtccgtttaaacattatctgaggtatttggatagcctgggtgagctgggagacagaaaccgtgccatatttaatagtattggcaatgattttctggagatgctggagaccacgcaaatgaccaagtcctataagatgccggtccttttggcattttataacaatggcaatgtcaaaactcagattgatgaggatgatatataccggggccataaggagttttattatacggcaaataactggaaggatttagcgaaagataagagtacaagtgacttccgtacatgggataagaaacgctgtaccagagaagccttaaaaaacccggtccgctttttgctgcagtccggaaaaggtttttttgtgcgtaaagagggctatgtactggctctgaatccgcagttatatgaggcggtggaaatggacgggttttccgaacagatgaaggatgtgattgactaccggaccatggattattaccggaagcggtatgaagggaaaacagaataagcattagacagatgaatcggttgatgtaaagcgccggtattattactgcaatattcctttgcggtaacaataccggcgcttttacattgttccttcccgcccgtgcagatagctacccgcagccaactcccgccccgtcctttaagatattctgcactacccccgccaaatcccattccatcatccaaacaaatattcaacaaaaacccttgacaataccgataaaatgtagtaaatataaatataaggacatgttatggacatgaccgaaactaaaaaatccaaaagactgcagcttttggaaaggggaataaccaaggaggtcagaatgaacgaaagtgttaattatttggattatgccaacagccctctgatgtgggcagcagcggctttggcagtagcggtggtagtatttcagtcaattctgtttatgaaaaggtctataaaggcagccagcgagtcggcccttaccacggaccaggtacataaggcaatcaagagcagcgtgatatcatccattggcccgtccgtagtaatcctggtcaccatgatatccctgctggttaccatgggtgcgccggtggcgtggatgcgtctgtcatttatcggttctgttaactatgaggccatggcggccggattcggcgcccaggccatgggaaagacacttcagaccatggataccatggcatttgcctgcggcgtttggaccatggtgtgcggttcgctgggctggctgatttttaccttcctgttctgcgataagatggacaaggttaaccacttaatgtcaaagggcaatgccaagatggttcccatcatttccgcaggcgccatgctgggtgcgtttgccaacctggcttccggcaacttctttacggcagagggttcccttaccttcaccaacgcaccggcaatcgctaccatagctggctgtgttatcatgatggtactggtgaagctgtcaagggccagggatatcgcttggctcagggagtgggcatttgcaattgccatgttcagcggcatgttcatcggatatgctgtcagcgtaatctaaggagggttagaagatgaaaaacgattattattctggtacatatatccccggaatcgtgaaatggggaaagattacactgctgctgggcattttcgcaggattccttcctgctcttgtgatggccttccggggctatatgcctccggtgtccgccattatcgccggcactctgatgcagatcagcgtaagcggagcattttacattgttgagcccatttcctacttcccgattctgggcattccgggaacctaccttaccttcctttcaggcaatacctccaacatgcgtgtgccgtgttcttccgtggctcaggaggcggccggagtggagatgggtacggaggaaggctccattatttccaccatcggtattgcaacgtccatacttgtcaatgtggtgattcttaccgtgggggctgttgcgggcagcgttatcctgaacattctccctgcacctgtaaaggaagcccttaatttcctgcttcccgcgctctttggcgctgtattcggacagtttgccgcaacacgtcccaaacttggcgtggtggccgccatcatcgccattggcatgaactggcttatgaagctgggcttcttaagctttataccgggtaatccatcctatgtggtaatcctggtggctgtgtttggctctatctatgcaggcaagcttctctacaagaaggagctgcaggctgactgataagcagagctagataaggtaagagatagacaaggaaaaggaatagataagaaaaagggatagacaagaaaaagggataggatactttgcacaagcgcccggggcatgggcgctgtgtgcacatgaaggcttatataatgaggaggataactatgctgtcacgcgaacggatgcaggaacgttttttggaattggttcagatttacagcccttccggcggggagaaggagcagtgccaatggcttatggactattttaaggagagaggaatcgaggcctccatagatgaagccgggaaggcatatggaggaaacggcggaaatattatcgcccatgtcaagggagagccatgtaatcctcccttctgctttgtggcccatctggaccagattgagccgtgtaaggatgtgagaccggtggtggatggacatattatccgcacggacggaaccaccaccctggggggagatgataagggggctgtggcctccatactggaaatcgtggaagatattgcggagaccaacaggccccacaaggagttttatatcatgtttactgtctctgaagagacaagcatgcaggggaccaaacacatggacccgtcccgcctgccatgtaagaacatggtcatagcagacgcaacaggcccggcaggaatcattgcctataaggccccggccatggaggccataaggtgcacggtgaaaggccgtaaggcccatgcgggtattgaacctgagaagggaatcaatgctgtcgtggcagcgtccagggcaatcagccggatgcatattgggcggattgaccaggagaccacatccaatatcgggcggatcgagggaggggcagccaccaatatcgtgaccgatgaggtgacatttaccgccgagatacgttcccacagcatggataagctgagggatgaagtggctcacatggaggaatgcctgaaggcagcctgcctggagatgggggccgcttatgaaatggaacatgaactggcatatccttccctggaggtaagtcttgacagtgatttataccgcatgacagcccaggccatggagaaggagggaatcgaacccaggcccatggttatcggcggcggcagcgacggcaatatattggccggatacggctgcagcagccttatattaagcgttggcatgatggacgtacatactgtgcaggaagcattggatatggatgaactgtggaaggccaccagggtcatgagccggatgacagaactgtaagtatagatgacaaggaatgatgatatggacaaagaagaactgaaacagagatgccttaatgtgattgaggaacaccgggacgaaatcattgccctgggaaaggaagcttataaaacgccggagctgggctttaaggagttcaggacgggaaaacttatggaggaagctttttgcaagcttgggctggagccggagacaggtgtatcctatacaggctgccgtgtgtcctccggtctcaagggaaacgggcctagggtggcggtgatgggagagctggactgcatcatgtgcgactcccacccggatgcagctgagggcggaatggttcatgcctgcgggcataatgtgcagctggcaaacatgtacggggcagccataggtatccttacgtcaggcgtcatggagcacctggggggcgccgctgactttatagccataccagcagaggaatgtgtggattatgagtacagaaaccgcctcatgagtcagggaaccatccactatctgggaggaaagcaggagcttatgtaccgcggtggcctggacgatacggatatggttcttcagtgccatatgatggagatggagccggggaaatgctgtatcctggacaccaagggcaatggattcatcagcaaaaccgtgcatttcctgggaaaggcggctcacgccggttttgccccggaacagggaatcaatgccctgaacatggcggagctggccatgaacaatattcatgcactgagggaaaccttcagagacgaggacaaggtgcgggtaagcattgtaatcaaggagggcggaggcctggtaaatgtggtgccggagcgcgttaccatggaaatcatggtccgtgcctttaccattggcgccatggaggatgcctcccataaggtgaaccggagcatgaaggcagctgccatggcgttggggggcaaggtggagattcacgactgtatcggctatctgcctctgaacacggaacgtcagattgcacgattgtaccgtgacaacatgatggcttacgaacatgccggggaagatgcgtttgtggaggactgggagacagccggctccacggacctgggggacatttcccagatcatgccctgtatgcatatctgggcaggtggcataaagggcggtctacacacggagaattaccggatggacgacccgtacaccgcctacattgtgccagccaagatgatggcccttaccatcattgatctgctgtgggatgagggcgctaaaggaaaggaaatcataagggatttccggcccgcactgacaaaggaagaatatctaaatctcttaaaagaccatcaggtggttgatttatacgatgcttctgatttataatcggtataaggcgcgctgtgcgcaaagaatcgggaggttgacagtataaatgatagtgggagtagtggggccaagggaatcctgcgtaatcatcaggaaagcaatacagcagattgaccagagtcatgaggtgcgtttatatacaagagagctggtaagggaggccgtggatgtcattgatacctgcgagcaggagtgcgacggcgtgatatttaccggaagcggcatctgcgactatgtgctggggcatcaccagatgcagaaaccttacacatacatcagacggtccgccagcagtattgcggaagtatttctgaaaatggtcagggaagggcgggaaatcgacaccttcagtattgacgtggtggagaagcagattattgaggatatcctggatgcctttcacatacagcccaggaatatatatacctgcccgctgcttgcaggtgtggcggaggaagagtatgttgcatggcatatggagctgctggagaagaagatgaccgatgtggcggtcactgcttatgtggcagtctatcatatgatagaagaaaagggcggcagggttttttacctggagcccaaacgctcccaggtcagggatgccctggccgatctggaaaagggctgggccctggcccaggcagagtattcgcagattgcggtggaattgatacagatgtccaacttcccggagaaggaggatcagtattacagtgccatggcaagcaaggctgaatttgaagtggaactgatacgctacgtaaggggaatccagggatctgtattcccctttgggcgtgatgaatacgtgatttacgccaactccggggtggtgaagggaaaaaagaaccacaaggacctgaggattcttcagagggagggaaagaacctgggattggtggtaaatgcaggcctgggcatgggcctgacggcttaccaggcagagatgcatgccaggaaagccctggaatattctcttggcaagggagagggagggatcttccagattgatgaggaggagaagattcagggccccctgggcctggagcagcagcttcagtacagcatgatatcctttgaccccaaaatacagacgatttccgaaaagaccggactcagtatggaatccattttgaaaattcaggctattgcggatgtgaggaagagctatgtgtttgacgcttcggaactggcggaatgtctgggcatcacggtcaggagcgccaggcgtattctcagtacgattcaggcagccggactggggacggtctgtgccagggaaagcgctgccaagggcggccgccccagggctttggtggagctgaatttcggtctccgggataagactcataaggattagctgataaggatgaatacctgttccggttgtcactgcgctgtatttctgataaaatggttccatggaaacgcataagcagataaccggaaataaagaatcggatacaggagagaaaaggcgatggactacaagattatcgtactggatttggacggtacactgaccaaccgtgacaaaatcatcacacccaggacaaaagaggccctgatgaatgcccaggaagcgggaaacgtggtggtgctggcatccgggcggcccacggccggcgtggagccgttggcaagggagctggagctgtcacgtttcggcagctatatcctgtcctataacggcggaatgatcacaaactgcaagacaggtgaaaccgtgttttcttcactgctgcccagggagtccaatcagaagattatcgggctggcagaggagcacagggtagatatccttacttatgagggtgaggaaattattactaacaatgtggaatgcccctatgccattgccgagtccaacatcaaccacctgcccctgcgtcaggtggaagacatgaagtcctatgtggattttaaagtccccaagttcctgatgctggatgacggcgattacctggtgactgtggagcctaaggtaaaggctgccatgggccgcgatttcagcgtgtaccgttccgagccgtatttcctggaaatcatgccaaagggaattgataaggcccggtcgctggcccgtctgctggaagtgctggggcttgaccgggagcagatgatagcctgcggcgacggttacaatgacctgactatgattaagtatgccggtctgggcgtggctatggaaaatgctgttctcccggtgaggcaggccgctgattatatcaccgcatccaataatcacgacggcgtgggacttgtggttgagaagttcatgctgtcctgaaagggtcagggaaaatagcagaaaacatacctggaaaaagtgcggagaaagcgccggaaaaaatgcccttataaaatctcccgtcacgtatggactttcagactttaatatgctaaaatgaacaagtatggggcttatatgacctgtaatcattttacaatacacatgcggagggggaaggccgtatgaattataaggagagataaccaggacatgaacaagaaaattaaaacagaagcagtggaccatctatttgatgccatactaactttaaagactccggatgaatgttataagtttttcgaggatgtgtgcaccatcaatgaactgctgtccctgtcccagcgctatgaagtggccaagatgctgcgggaaggcaagacctacctggagattgcggagaaaacaggcgcatccaccgctaccatcagccgggtaaaccgttcgctgaattatggaagtgacggatacgacatggtgttcgccaggctcacagggggaacgcaggcagacaaaggggataatgaaagctgagtatgataaaggatgtattaaaaaacggatattgcggcaggattgctgcgatatccgttttgttttctataggtatgccggcagccccggcaatccattttttgtccgccaaggcggggctgacaggttatggaacctatttcttgcggggggcaggcgcatcctccctgagctgatccgcgatcatttcaatcatctgtgtcttcagatacacgtcaaaggacagctcgcagataaaggcaaacagcttcagatattccctgtccttgtcatccacaggagcatctgaaaatgtatcctgggcacgggcaaacttagccgccacatcagacttcagattattcatctcgcccttttccaaagtaaatacttcgttgtagatatcttccagggacagttgggatgtctggcctgagaaatgctttgatgtaataggacggaaaagctcttcaatatcactaaaggacagaaggtttttaaaataatatatgaacacaagcatcagcatgtggtccttggaatacttcttcttcaccgggggaggcagaagattattcttggcataattgttaatcatggtcttggtcaggactttatcacccggatggcgtctcatatcttttaaatggctgtccatgaaggtggtaacctggtccatgtacaaatcaatatcaggaatctcgtccgccttgacatgggacaggttccccagataggaaaacaggtcctgcagacgttcttcatttgtcttcatctatgtgtcacctctgtcattcttatcacattgctatatctattatatagtattgaatactagatgacaagggggaaatgaaaatctatgcgggtttatgggggaatgcctgtaagacaggaaacaggagatatggcaatggagagacagctgcctgtaatgcggctgcaatcgtccgaaaggcaggtcttgcaggatggggttcagaatggtatacttaataaacataattgcagttaaaaaggcggtacataatttatgagtatttacgatacattgaatcccatgcagaaggaggcagtccttcaaacggaagggcctctccttattttagctggggccggttccggaaagaccagggtgctgacccacagggtggcatatctgattgaggagaagcaggtgaacccgtggaatatactggccatcacatttaccaacaaggcggccggggagatgagggaaagggtggaccagctggtaggctttggggctgagagcatctgggtcagcaccttccactccacctgtgtgcgcatcctgcgcaggcatatagagtatctgggttataccacgaatttttccatctatgacagcgatgatcagaaaaccctgatgaaacaggtgttcaaggccatggatgtggataccaagcagttcaaggaacgttccgtgttaggcaccatatcctctgcgaaggacaagctcaccggtcctgaggaattcctgttaaatgcagggcaggacttcagacagcgcaggattggagagatatataaggagtatcagaaacgtcttaagaagaacaatgcactggatttcgacgatctcattgtaaagacagtggaattattccagaataacagtgaggtcctgaattattatcaggagcggtttaagtatatcatggtggatgagtaccaggataccaacctggcccagttcaagctggtcagcctgctggcttccaagtacaggaacctgtgtgtggtgggggatgacgaccagtccatttaccggttcaggggggcggatatagggaatattctgagctttgaggagatgtttcccggggcaaaggtcattaaactggagcagaattaccggtccacccagaacatactgaatgcggccaacggcgttatacgccacaaccgcgggcgtaaggataagaccctgtggactgccaatggcgaaggggatttgattcgttttaaacagtttgacacagccagagaggaagcggactttgtggccagggagataagggacagcggctatgcctatcaggagcaggctgtgctctaccgcaccaatgcccagtcccgtcttctggaagagcggtgtatcttttacaacgtaccctaccgtctggtgggaggcgtgaatttctatcagagaaaggaaatcaaggatattctggcctacttaaagaccatagccaacggagtggatgatttgtcggtgctgcgcatcatcaatgtgcccaagcggggaatcggcgccaccaccatggggaaggttaccatctttgcctctgaacatggcatgagcctgtacgatgctctcagggaggccaggcagattccgggcttgggtaaggctgctgaaaaaatcggagcctttataggacagatggaaagcttccgggccagggcacagtcagatgattacaccatccaggacttgatagagggcatcatggacgagaccggctaccagcaggagctggaggcagagggagaggtggagtcccagaccaggctggagaatatagaggagctggtcaacaaggccgtgagttacgaggaagacagcgagcatccatctctggatgaattcctggagcaggtggccctggtggctgatatagataatatggatgaatccgagaaccgggtcaccctcatgaccctgcacagcgccaagggactggagttcccgaaggtgtacctggtaggcctggaggatgggctgtttcccagtatgatgtccataaattccgatgacaagacggacatggaggaggagcgccgtctctgctatgtgggtatcacaagggccaaaaatgagctggtgattaccagcgccagacagcggatggtcaacggcgaaaccagatactgcaagcccagccgttttatggaggaggtgccgggtgagttgctggaagaggagcgtctggaaccagtgctgggaagctatggcagccggaacaatggtgccggtgcaggcggatttggcaagaccggtatttccggcgaggcaggcctgccgtggaaccagccggcagcggggaatacgcgtacaagcacctttggaaagggatataacgcatatgcatccggctcatcccagcccttgtcaggtctgggcaccggcagcacagcgggaaatccgggatttggcaaggcatttacagtgcagaaggcagcaaccctggattacagcgagggagacagggtcaggcacatcaaattcggagagggaacggtgaagtccatcagggacggaggtaaggattacgaagtcacggtggtatttgacggtgcgggccagaagaaaatgtttgcatcctttgccaagctgaaaaaggtctgatgggtgtgctggcatctggaatgcctggcggtaagcggcatttgctcagcggaatcgggcgcctgcctggctgaaacaggtatctgtctggccgaaacaggcatctgcccagcagatttctgccaggactgggatttaattaaaattggattgaaacaattggataaaatttgaataaattgggatagtaaatcaagagcttccatgatataataattaaaaacaagcaagagggcagcagtgcttatatataagaaaggacgtgggtagaatgaacagatttgacagagacaggtttgatcagatgggcaaagaggcattaagccgtgtagaagaactgatgaattccagcaggatcaatgaactgcttcacaagagagaagaggacgagaagaaaaagaactgtattctctgggtactggccatcattggagcagttgcagcagttgcaggaattgcatacgctgtataccgtttctttactcctgattatctggaagattttgaagatgatttcgatgatgattttgacgatgacttctttgaggatgaggagcctgaggaaaagaagacagaaaaggctgaatagcagaggctgccttaagaccatcataagatacacagtaagatatacagtaggatgatagaacaggatagttgttgggaccgccgcggaagtggcggtcctttttgggtctggcttgatgcggaccctattgcatgatataatgatacggcaaaagaggaccataaaaaaatgcctaagcagcgggcagaacggagatattttatgaaaaaaggcgatatttacgaaggaacagtagaaaaaatcgaattccccaataaggggatccttcatatagatggcgagagagtagtggtaaagaatgccataccaggccagaaaatccagtgtgtgattaccaagcggagaaaagggaagtcggaagccagaaccctggagatactggcgcattccccggcagaaaagccggaggaggcatgtccccattttgggatatgcggcggctgtatttaccagagcctgccctatgaagaacagttaaacattaaaaaggagcaggtaaaatccctgctggacaccgtggtagaggacggtacctatgagttccagggaatcaaggccagtcccatctcatcaggataccgcaacaaaatggagttctcctttggggatgaggtaaaggatggtccgctggcattgggaatgcacaagaggggaagcttttacgatatcgtaaccactccggagtgccggattgtacatccggatttttgcagaatactggtagccacaaaagaatattttgaggagctgggggttgcattctataaaaaattacagcatcaggggtatcttcgccatctgctggtccggagagcggtaaagacaggggaaattctggtagacctggtgaccagcacacagagggattatctgggtgaaaggacggaggaagaggtactggcagagtggacgaaaaagctggtgggccttcctttggacggcaagctggcgggcatcctccacacagaaaatgactccctggcagatgtggttcagagcgatgctacccacatcctttatggacaggattacttttacgaagaactgctggggctgcgttttcgcatctcgcccttttccttctttcagaccaattcccttggtgcggaggtgttgtacgatacggcacggggattcgtaggcgatacaaaagacagggtggtattcgacctatacagcggtaccgggaccattgcacagatactggcgcctgtggctaaaaaggtggtaggcgttgagattgtagaggaagcagtcaggtcagcccaggtaaacgccaggctcaacggactggagaactgcgagttcctggccggcgatgtgctcaaagtgattgatgagcttcaggataagccggatttgattgtagtggatccgcccagggatgggatacatccaaaggcattgggaaaaatcattgatttcggagtggaccggattgtatatatatcctgtaaaccaaccagtttggtcagggatttggtggtgctgcaggatagagggtatagggtggagaaagtttgtggggtggatatgtttccggggacagggaatgtcgaggtggtgataatgatgcggaattgtggtttggaaggaaagcacaggggttaaaccacaagatatagtggtttttggcgaaaaatcgagggaaaaatcgggcaaaaaatggccgtttttgaccccggttttttggccttttcatagatgtgagacgggtaaaagaggatatggggtaaaatttcaggtcagccagatcaaaaaatggctggcctttttaatagagtatcaaaaaatagaaacggctatatgtgaaaggacagagaggggaatttaaatgtttaagatttttttgagccggacagtaagccctggtgtaggtatcagtctgccggctacaatcgaagaaataagagaagcctattctcttctgaatggaacagatacagttccgttggaaacagctaccgcctatgtggaatcgtccattccaaatctgcgccattacctgtatgaggtcccggtgacagaaaaaagattggaggaactgaactacctggcctatcgtgtgaaatggatggacagccaggatgaggcggtattcggaaccgtgattgagatgatgaaa

SEQ ID NO: 3238 - DNA, 36128 bp, Unknown
  gut microbiota DNA sequence
ccccgccatccccggacgaagaaaacggaaagggagaaaccccgccatccccggacagagaagatatagagggagagaatccggaacatccggattccggacaaacaggccataatcaggaggagttagagaatcccggagatatccgtcagccggaaattcaattacagatgattgagataccgctggatgaggaggtccagtgcggcactgtggaggaacttttaacccttctggagaccggggaggagatttgccttacaggggatattcttgttgcaggttcagccgatttgaatattgctccggaagatgaagccgtggtgaatatgaatggatattccatcgttgtgtctgacaaggggaatttgtttgtggacggccccatccgtttccagggcgcggcaggagacaaagcgctgtttcagatatccggaaaaaccacctttaaaaatggtgccggggtatgggcagagggcgacggagcggttgcagtggagatttcagaaacgaaaaacggtaaatatgcgcttcagacagataacgcttatatcggagtttccggggacaacagcattgccttaaagtggacgggaaagggggactgcagcctgcagtatgcccatattgaggcagaaggggaaaactcagtgggcattgaggcagacacgccggtagagcttaagctttgcctggtggaggcggagggcagttccgttgtcacggataaagtgctcatcgtggacacatcgcaggtgactcccttgcccgaacagtctgaggtgattacaagggagatttatcttgatggccgcctggatgaaaacggggtcagcgtagaagcgggaacagactgtcaggggctgtatgataagctggcgccgtcggcgtcatatgtattttgcgatcccacaggggaaaggaaaatgtggacccgggattttacgctgaactggaaagacctgcctgaggaactttcagagccaggggtttacagggctatggtagaagcggagggatatcccgactggttttttatagagataccggaaattgagattgagatttatgttgtggaccctaaaacggtccatattgaggaaatcttcaggatggaggatatggctgtactgtattttttgaatcctgtagaggacgcacagaggattgagctgttttgttcagcagatggaggggatacatggcaggacgcagcctctatgcccggatgctctgtgcagatagatcccttgacaatcactgtggagggacttgaatttaatcatacataccggttctgtgttgctgtcaccggaggttccatggaagggctgtcatcggtgaaatcctttggttattatgagaatgactcagaccggtttggccatggagaccgtgacggggatgaccgggatgaccagggagaccttccgccctggaacagcgcgcctcctccgggggatgaatttggcggttcaggggatcctgacagtgacggcaggggaaccgcagaagcagacggaacatccggcacgtcagatggggacggcactctgtccctggagccatctgctgtgaagtgtgccgggataccagagccctgtactgcggacaggatcggtacacagagactctccacgacggctgccgccgatacacaggagccctccgcggcggctggctcagacccaaacgggcctttagctgcggacaaaatcggcagacaggaaccttccatagaggacggcatggccgcgcgggacgcgtctggcgcaggcgcaggggataggccggggacctccggttcagcgcttggagaagacggccgggcatacggtggcggggaagcagaagactcctttcacgaagatggtttgaggacagggaatctgttggaagaaaatgccactgaaaaccgggaggaacctgccggagagggtacggatgcggactccggccgccttcaaagggataatacttcaggattcatcttccgtactgtcctgggagcggcagcgggtatagcggtgttatcctggtacaaaagaaggagcaggaggaagccatgatgaaagtcagagagaagcaggcgttcctgctgataacagctgtaatccttctgagcttcgcttttttctattactgctatgaaaaggataataaatatacccgtcctcgcccatattccagggatggtgttatatggctggaggatcagtggtacagcaggcaccctatgttctatcttacagacggctggtccttctaccaggacaagttgctgtccccggatgaaattgaaaaccatactccggacgcatatttttacataggcaggtatggaggctttgacctgggggatcgggaggcttctccccacgggaaaggaacctataggacagtgatcctcacagaggggcatgagcaggaatacggactggagctgacaccggtctactctcgctggagactttgggtgaacggtaagctgaagcagagcgtgggcatggacgggaacataaacggggacatggggccccgtcccccggtgagcatggtaacattcacagctaaggacagaattgagattgtagttgaggcggaggatgacagccatttttacagcggcatggtatatccgccggcttttggcgtgccgcagctggtgtccagaacctctgaactgcggcttttaatccatggcgctgcaattatggcggcttttctcattggagccatgtgcctgtgcctgggggctgtcagacggttttccaggccatatggggcgatggcgtttctctgcttctgtttctgcggcagcacggcctggcccctgttccaggtaatgtcggagagtatgtactgggtcctgctggcggagcgcttctgttattatgggatgtttttttctatgatgtggatccagtggcagatctgcggcctgcctgggagagtatatgttccctcctgcgcggcaggttttttaatttgtctgagcgtccttatccagcctctgattccggctgagacagcgggagccttgtacacatatggcaatatacttggattgtataagtggttcactgctttttggctgctggccacttccggctgggctgtctgtaagaagcgtccctgctgtcttgccgtgctggccggaaacagtgtttttatgtgtgcccttgtggcagggaagatgttcccactccatgaaccggtgctgacagggtggttcgcagagctggctggcggagtcattatcctcataacaggcgggattatgatatatgatgtggatcggacctataaggaaagcctcaggcttaagatggagcagcagctgtcccaggtccagctggaagccagagccagatacggtgcccttcagcaggagtatatcaggggaaccagaaagcagcttcatgaaacccgcaaccggcttactctgattaagcattatctggatacaggggagaccgataaactgaaggaatatctgaaagggcttgtttcttccacggtggacatggagaatggggaatatacaggccatatccttatggactccatcctggcggtggagcttggaacggcaaggagccaggggatatacgtggaagcagagggggacaggctgcccggaagcctggcggtccatgacgcccatctcactgcgcttttgatgaatcttctggataacgccatagaagcctgcagccggcttccggaggatggggagaaatggatttccctggagattgggcgggttggaaccggccttactatcttgtgcaccaacagcagcctgccccgtgaggaaggcagaagtaccagtaaggaggacagccgggcccatgggtatggtatggagcttatgagccaggtggtccgggagtatagggggacatttgagacaacatggtatacggatagtttttccgcccgaatattcctgccggacgcagtgaaagacggtgaactttaaattttgttaaacgtggtaaaaatcccggattagcgtggtaaaataaaatacagatggtttaatgcaaagagcaccggtttccttcagctaaagaaggaagccggcgtttttgctttcaggatgaaccgtccgcatatggaatgtgccgttttcagggaaaacagaccgctgtttttaatacaaaagaagaggaaaaaccaatgattatagcagtagtggatgataccatgcaggacagagaactgcttaagggtatgcttgaccaatatttttccgggcatcagacagtacctgagattcaagagtttgaatccggagaagcatttttagaggcttatgagccggggcattatgacattatattctttgatatatatatgggagggattaccggtatggagacagcctctctggtatatgagcgagataaggactgccgtctggtgttctttagctccagcgcggattacgcggtggacagctaccgggtaagggccgcctactatctgatgaagcccctgagctatgaggatctggccctggccctggactgctttaccagagagcttctggaggcgggacggggacttgcggtgatggtgaagggcggagtggaggctgtggtgccctttagtaaactgttgtacgtggacagccttaaacgtatggtgcggatacataccagcgataccgtactggaggctgcggagtcctttatggctgtgtccgggcggctgatgccggattccaggttcctttgctgcaaccgggggatttacgtgaatatggactggattcaggaggtgggagactctgttattcgtctgaaaaatggggaaaccctgcctgtacgggtcagaggcagggcccaggtgaaaaaggaatatatggaatatgccctgaaggatctgcggaggtaagatgaaaaatcagaaattggtaagtttacggcctattattgttattactgcctcagccattctctctgttttattcatacttattctttactatgcagataataaatacacggtggggggaaagcagccggaattgggaagactggagctgacgctgggggatatggaggagaatccataccggtatcttgttacgggatgggagttctatcccgatctgcttctgggaccggacgcgttcgacggagcggagaaacctgccggtgtaactgcggcagtaggaaaatatggacagatgaggcggaatcaaaggggaacaaagggtacataccgcctggttttggagctgccggaaaagggcggtccctttgccctggaactgcctgagatagaaggggcaagcagggtctatatcgggggagagctggtccgggaatggggaagcatagaggatgtccgctccggtatgaagcggtttgtctttcctctcacccagggccgggacacagagcttatcatacaggccgcggctctgggcgcctttcattcccagaacttcagtccgccgcttcttggagtctacgatgccgtgaccgggatacgggatgtggggctgttgctgaaggtgatggttctggggctggctgtgtccgccgccggtctctcccttcatctggctgtgaaaatccgctggtggagaggctttctcttctgcctgttctgcctgtgcttcgtagggtatcagctgtggcctctggcgcgggagaggattcagctggggctgcagccctggtatgggatccaggtgttctgcttttacgccatgctttggctgatggtcatattggaaaatgacctgtaccgcatcaaagggggaaaggtgtccgccgccatgggaatattctgtatactggccctggtatacggctgttatgcccagtatgggacggcggccgcggcggatctgttcagctatattacccagtggtataaatttgccattgcatgtcatcttatactggtggcatatatggcgatggcagagggaatggagcgttcccagaccctgctggtaattgcggttgtacttgtttccgccctgtttatggaacagcttctgccgctgtacgagcctataataggcggaagcttcctaaccattggctgcgtggtcattatggtgggaatgttgagtattctgtggcaggatatggcggacgcgttccgggccagaaccttttttgtaacagagacaggacggatgaaccggcagctagctatgcagagagatcattaccgccagctcaatgccagaattgaggaaaccagacggatccgccatgatatgcgccatcatataagactgctgcaggcctatgcggcggagggaaatttggagcatgtaaaggcgtatctgggacagctttcacctgccatggattcgatggggcctgttacatttaccagcaactatgcgctggacgcagtactgtgccattacactgccctggcagagaaggagaagattgaaacagatatccgggttatggttccgggccggaccgttcttcctgatgatgagttatgcgtggttatgggaaatctgctggaaaatgcggtagaagcctgcaaacggcaggagtcgggcaggaagttcatattcttaagatgccttcaggacgacagccgcctgtccattgtgctggacaacagctttatgggggatgtgcagtatgaaaggggatatttccggtcttccaagcgggagagcgtggggattggagtggagtcggtaaaggccatcgtaaaacgtcacggggggattggcacctttgtgccggaggagaaggtattcaaggtttccattatcctgccgctaaaggatgagggataagggcggcgcggcttcacggctgtgccgcctgtttttgtgtacccggcgggcatatgttctaatgggcggggaggcacttgtaagggtaaatcggaagggggattgagtttcggtcggaaaaactgactttcggtcgcaggctattgtttcaggataaatgctattgtagtatgaaagcaataaaaaagcagtgattgtccgagattttatggacagaaggcatatggagcatatacgaaagcgggagggccctatgataaagaagatagcaggatacatattaggaggtattgtggtggtgatggtgttggggtaccttaccgccatgatgctgacggagctggttccggccattttaacccgggattggggaagactctggaatccgggccttctgcttaagccggctgtctggatatatggagcggtggtcacggtaatggtttatatgctgtacctggtattccacgtgggaactgtaaaacgggccaaacgtctgatgaaggccaaggaggacagtattgaaagttccctggagaattcacgctttatgaccgacaaggagaaggatgataatttctccccgaagcgttttaccagacttaaagaggaaaaaaaggacgggattcctgtatacgcggtgtacaacaagaaaaagaaggagctcaacatcaacattgccaagcccatgcatggccttgtaatcggcgccacaggcagcggtaaaaccacatcctttatcaaccccatgattcagatactggggaaatcctcagccggttcttccatgatctgcacggatcccaagggagagctgttccagcttcacagcggcatgctggcggaacagggctataaggtaatggttctggacttaagggatccttacagctccttccgctggaaccctttgggagatatctatgacaggtaccagctttaccttaaggcgggacagggaatcttccagtgcgacacggacgtgaggcaaagcggtttggagctggtgaatgaggcggaccagtataaggatgtgtggtacgagtataagggaaaagcctacgctgtgcgcagggagctgctgactgttatcaaggtggaaaagcagaagatatatgatgagatttacgaagatttaaatgaccttatcagcgtgatctgtcccattgaatcccaggacgatcctgtgtgggaaaaaggagcccgttccattatcatggcagtatgcctggccatgctggaggacagcgagtatccggagctggagatgaccagggagaagttctgcttctataacgtaaacaaggctatcagcaattcggaggacgagttcagggctttaaaagaatattttatgggacgccccaagctgtccaagtcagttggactttcaaggcaggttctgtcagcggccgataccaccctggccagctatatgtccattgcgtttgataagctctctatgtttaacgacgagggactctgctcccttacctcggagacggatatcgatccccagcagtttgcagccgagcctacggcgctgttccttaagataccggatgaaaaggatacccgccatgccctggcggccgtattcgtactgtgcatttacaaggcgctgattaaggtggcctccgccagggaggatttaagccttccgagaaatgtatacttcatcctggatgagttcggcaacatgcctaagatagacaagttcgacaaaatgataactgttggccggagccgtaaaatctggttcaacatggtagtccagtcctatgcccagttagacaatgtatatgggcagaccataagcaatatcatcaagagcaactgcggcctgaaaatgtttattggttccaatgatatagaaacttgtgaggaattctcaaagctctgcggcaacaagactgtttccacacagagcgtatcctctactctgggggacaagacagggaacatcaatgtatccagccaggtgcagaccaggccccttatatacccttcggagctgcagaagctgaacaataagaacagcaccggcaacgccattatcgtaacctttggaaattatcccttaaagacccagtttacgcccagctacaagtgtcctctctatgagatgaagaccatggatttaagccaggtacggatgaatgcctttttcggggacgaggtttactatgatttggatgagcgcaattatatcattgccagccggcaggaaaaagagatggaggtgtctgcggaatgaacagaggaataaaaaagggactgctgctttttgcaggctgctgtatggcggctgggctgccggacagggcgctggcagcttcctataacgatgacacggcagactcctatctgtccaggatttatactgaggcagaggactggatatcagagggaggggcagaggacgcattcaacggaccgggggcggcgcagaccgctctggaggaggacagcgctttggcgggtccaaggatacatgaggtgtccatgggagagaagtatcacagtgactatgatttatatgaacattccatagacggcagatattttatttattccaatgtatccaacggaggaataacggatcgccccgtatatgtggagatacctgtggacgtgttctgtacagctgagaaggacggcgtgcccatgaactatacatccggccagctgttgtcggacagagggacctatgttatgcgcttaacagcagtatatgataagaatgttcccctctcccagcaggaagagtacagaaccgtattccggttccgcattgatgagaaacggcaggacgcgtcaggcgccgtatcaggagccgcaggcgccctggcccggcagatagacggactcaccggaagtgataccgcaggactgctgaaccagattacttcggagtcagggattgccggtgatgacattgcggcagccttggccggccagctcttttccgaatccggggataaaggagaggcaggggaaggaagcaatgacgggacagataatgaggcagggaacacggaccaggggcttcacgcatcttcggaaggcgtcctgggccagggagaggattccggccaggaaggtgcgggccaggagaaggattccggtcaggacggtgcgggccaggagggggattccggtcagaatggttcagaccaaggaagcggttccggcagggaaggcagagaagtctccgggagaagccaggtttatctggaggatgaaaagatgtacctggtaaccctggagaacggctttacgttccggtccagcgtgccggaaggaatgctcattaaccagtccgtggcaatctatccgggtgaagggcagtacactctctacagaggggaggaggaaacagccctgaacgagcggcaggaggcggcggaatacggaatataccgtctggtatccggggaatatgagtttacctttgaaatcagcaatacatatgttaaccgggatacctttagcgcgcctgaagggaccaggatttcagcagcttcctttaacgggaattccctggacacaggagagggaactctgctcaccatggaggccgacggaagctaccttgttaccctgaaaggagattacggggagactctggaggtagagcttaaccgggacacggagcctccggcagtggaagtggagatagaggggcagacggcccggataacctacagttccacggatctggcctctgtgaccctggcaaagaacggcggggaaccgcgggaatttaacggatttacgataaccgaaacaggcagctatgtactgacagtaacagacagggccggcaaccagacccttaaggaattctcactgcggtataaggtaaatatgtatggggtcattgccatagcggcgatagtcatatccataacggcaggagcagtgatgctggttcggaaaaaaaggaatctgacggttcggtaaggagttgatggaatggaagtggcaaagggctttactgatgtgctttataccacaatggtgcttttatttaacgaaatatttgtgccggttatgacggaaatcctgtccttgttctatgaaaaagcaatgtatgtactgtcccacagcgtctccatcctggcatacttctttttgattacagtgtgcaagattctggactccctggaaacaatgataggcattttcgcaggcactgagaatgttattgtggataacaagccaatgacctttatggagatggtgttcaaccaggacgcggtcagcaaaggctttctgatgataactctggtggccgtaggcatatgctttttatttaccatttttgccatagtgcgctccatgtcctcctccacgctggaaaacaagaatcccatcagccaggtgctgaaggatgccatgaaagcctgtgtctcctttatgctggtaccctttttgtgcattgccctgatgcagctgagctcggctctgataaagcagaccaaagcggtcatacaggccgagtccggcaccgcaggggatccgagcatgggcctttacatcttcctgacagccagcttaagagccggaagggcagattttgagattcctgtcttacaggagacggcagatgttgcggaagggctgggcgataagtttacctatgagatactgaccagtcttgattcggccttccgtgttgaatacctgccgcccagtatgagcgacgacctgcgccgcagttatctgaacggtgataaggattacctggatttcagggattcgggctctgatttctccgcggccaaaattgattatcttctgggcttcagcgcaagcatcttcatgattatcatgctggcaggcgtgcttatacagtttatacgcaggctgctggaactggtgctgctgtaccttgtagccccattttttgtggcgacaatccctctggaccggggggatatgtttaagcgctggagggaaatgtttatagccaagtttttggcgggatttggagttatctatgccctgaaaatattcatgctgctgctgcctttgattttcagtgataacctgagccttggcagctcctttgtaatggaccggctgtatgcgggaggtgtctatgaccagaccaaagataagttttttgataatctgagggagcagaccggaggaattgaacttccgggctccggtaaccctgcgtatcaagaggaggtaaaccgcatggaagaggctgtggatttcgcctgggaaaaaacaggcatgagctatatggagaaccactcggccatggacagcgtactggtgaacatgggccttgtggacaggaattcaccttctctggaggaatccatgattgattccatacttaaaaccatatttttcctgggaggtatgtttgctgtatataaaagctgcgccatgttcctggagatcctcaaccctaaagcggcagaggatgccaagacatccaccatgctggccatgggatatacggtgggagcggcaaggaaggcggcatcgactggcgttcagctgggtgtggctgcaggtgtaggcctgggcaccggtctggccaccggaggcgctggcgctgcggccacagcgggagcggcaggagccaaggcagccgccacagcaggggccaaggcagtagggacggctgccaagacggccggcagcacagctaaaaacgcggttaaatccgcagccaaatccacggccaaaaacgctgtgggggcggcaaagcagggggtccagggggcggcctctggcgccgcgggagcggcaaaggattccggggacagagacggataaggaggtgctgataaggtggagatgtcatatctggggatttatgagtgggtatatgaaaaggtcctctcaagtattgtcacacctgtgtttgattttgtggtttcgattataaacattgcctggggatatgtgtttcagtacatcctggggcccatactccttcctgtgctccaggttgtgttctactgggtgattcgggtagtagaggtgctgggcgcctttatgaactatttgcagtttataggatatctgatggtggtggactgtctggaaaaggcgtttgatatctttattggcctggagccggttacctactatcccaatggcagagagggagctgccgtgacagggagccttttagaggtgctgttcaccagcaccgccatctctgaggccttcaaggttatcaccctgggaggcgtgggtattgccctgcttctgactatattcggggtggcaaagtcgtcctttgacttggattttgaaaataaacggccggtaagccatgtgctcaagcagctgtttaaatctgttctgggcgctttcctgattccctttgcggtttggttcatgatacagctgtccatgattatacttacaacccttaacaccgcagtgtcctttgatgacaatggagggaggagtactctgggcagcaccatatttaccattgcatccgtaaacgcggcctgggacagcgagaataatatgtccaaatggggaacggtggaactggatgagggctttggctttaaggtgctggacaaagccaacccggattttgatataacaaaggagccgagaaagaacttttatttgaatgacacttatgaaagatataccaacatccccaatgtggttctcaattttgatttaagcagatttgattatctgatgggaggatggaccgctattttcctgtgcgttatcctcttcctctgtttcctgacggtcatacggaggatatttgaaatccttctgctgtacctggtgtctccttactttgtggcgatgatgcccctggatgacggggagaaatttaaacagtggttcgggatgtttatgggaaagctttttacaggctacggtaccgttgttctgatgaagatttatctgatgctgatgcccctgattctcaggggaggaataacagccgagggcatggggggagagagcaggattgtcatggcagccctctatgttatgggcggggcctggaccgtgtacaaagcaggcagcctgctgaccggtctggtgaatgaagccgcaggacggctggagcaggagagcaaccgggatgcctatggagcggccatgcttgccgctgccccattcagggcaattaagaaccggctggagcagaaggtatccggaaagctggaggagaagattaccggcgcaggtaaggatgtgggaacccggcttcagggcggagatcctaaggggtccggggcccggagtgaggtaaggaccagccgcctgcgatctaagccgcctaagcagccaaagtttaagaaggccgttatttatgacgagctgaaaaacagttccggctttaccataggcgggcaccgtcctgccagaggaaggtcaaggcagctggagcctgtttcaaaggcagcccttaagaatgtaaagaagagtaccttaaagcatataaactttgaaaatgataagaggccttttaaatacggttacgaccaatttagaaaggataatgcgtttataagaaataaggacggcaccgtagactttatgtaccctgctaaaaggaagagcgccgtacttgcgcaaagaaatgaaatcgtcaaggtcagggaggaggctttgtcttattccgatcccaaggagcggtcccggtacgttacaaattggcttcagcaccagtctgatgataaaaacagtttaatgtattttaaccctgccgatagaatgcgtctggagcgcacctttggttgtaagattgacaaaactcctataagcagcggaattaataagggacaaatcgccttctatccagagaagcccaaactgcccaatggtacaaggctcaatccagataaaagcaaaggggataaaaaatgagaataataccaaaaaaaaccagggtttccatggaattttttaagggaattgaactgctggacattatgattgcggcagcaggggtgaccctgaccctttttatgcttctgtccaacctgcctttgcgatggatggccgccctgattgtatttattgtcttttcagcctccattatccctctggatgatgagaaggcatataagagtctgtattatgcaatcagatatgccatgagctataaagagtttgtaaagcatccggagaaaaagggacagatacctgtagccggggtgaccccgtttacaggcatctcagatatgtttattgaatatggaacctcttacctgggggtagtggtggagattccctccattgagttcagattccttacggagccgcgccagaaccagcttattgaccaggtgtatggttctatccttcggacagtcaatgacacagattccgccgctatggtaaagctggaccgcccggtgctctatgacagctttatcgaaggcgaagaaaaaaagatggaggatttaaaagcagcctatatccgcggactgatgaccgatgaggagctgacggtgcgtatcgggattatacaggaccggatgagccagctggagctgtttaataataaagagacggtatatctgccctttcattatatggtgtttttcgggcgggacagggggcgtctcacagagcaggcacagaacatggtggataccttaggtccccatggtatagaatgcagaattctcaaagagcaggagctggctatattcctgaaatacaactacagcggagtctttgacgagcgggaggcgtggaagctgacaccggaccagtacatggactggattcttccggataagctggcggttacatccaggacggttgcctatgacggccttgtaacccataatctgcgggtaaccgattatcccattgtggtacccaatgcatggggccacgccctttttaaccggcctgatgtgcgtgtaacgctgaagatgaggcccattgacagatataagggaattaaacagattgacagggcgattgatgaactgcgggagcagggagccagcaccggaaaaaccagccgtctgatggagctgggcagccatatagatacccttgctgaggtgctttcgcttttgcagggggataacgagatactgatggacgtgaatattttcatcacagcctatgactatgaggcgtctccggagctgctgggaccgggatacaggcccccgggccagggaatcggcatgaagcgtcagatccgcagggaactgtcggaatgggggttcaaatcctcagatatgttcatgcggcagtttgatgcctacgcttccggccatatatccgccttcgacgcattttccaaggacgggcggggaatccacagcggctctgtggccgcggcattcccatacgtgtataaggtaatgatggaaaagaaagggatctgcctgggaaagagcgcagggcgtcctgtattcctggacttttttgccaggaacaaggagcgggtcaacagcaatatggtggtgattggaaagtccggttctggtaaatcctatgcaaccaagagtattctggccaacctggccgcggagaacagtaaaatattcatactggatccggagaacgagtatctggggctggcccgttcccttaagggaaagattatagacgtgggaagcgccaccgagggaagactgaatcccttccacatcatcaccggactctcggatgaggaagatgaacttgacggggatgaggaagagaaccagattccgggtgccaaagtaagctttaatatgcacatgcagttcctggaagagttttaccggcagatactgccgggaattgaagcggacgcgctggagtacctgaataatattaccatccggatgtacgaggcaaagggaattgacgcagagactgatttaagcgggctgacacccggggactaccccacctttgacgatctgtatgagaagatactcaatgattttcagatgtccaccggggattacagcaagaagaatctgacggtgttgctgaactacatatccaaatttgccaccggaggaagaaacgcgggactgtggaacggtgaagcctccataagcacccaggaaaattttattgtgtttaacttccagtccctgctggccaacaagaataataccgtagccaatgcccagatgcttcttgttttaaagtggctggataatgaaattatcaagaacagagattacaacttaagatacggcgcctccagaaaaattataatcgttatcgacgaggcccatgtatttatcgacagcaagtatcccgtggccctggatttcatgtaccagatggccaagcgtatccgaaagtataacggaatgcagattatcattacccagaacattaaggactttgtgggaacagaagaactggcgagaaaatctacagctgtcatcaacgcctgccagtattcctttatttttcccctgtcgcctaacgatatgcatgacctgtgcaggctttatgagaaggcgggagccatcaatgaaagcgagcaggatgaaatcatcaacaacggccggggccgggcgttcgtggttacctctccgtcggaacgcagcagcattgatattgaaacacctaaggatattgagcggctgtttggcatataggcgggaagattacagctatgaggaaaggattgcagcttttatgaagggcatagtgaggaaaataaccgttgccgcggttctcctgtggatactcccgggcctttccggctgcggggataaagacagggtggatgagattaaagcccagggaagccttgtggcagccatgcctgaggaaggggagcggtctgcctgggatcaggcgtatgccagggagctggagcagcaggttctggaggaaatggcctcagatataggtgtcaccctccggattgagcgggtaaaagagcaggatcttgtcccggcagtgaaacagggaagggcccacgtggcggtgggagtccctgtgcttcccggacgtcaggacgagggatattccctggcttatggaagaagggcctcttatctggcagtggcagacggcacggttctggactcctggggggcgctggcagacggcattgtgggttattccgtaaacacggggcctgcggtgctgcggcagcttaataccttaagcggaattgagcttaaggaggtggaggcaggggatgccgtcagcgggcttgcgaagggggacatcacagcttatgtgtgcggcgagacggaagccagggaatttatggcggcagaaggcatccagattcaggaactgcccggcctttggccggaaacctataccttttatacgggtgagctgcagtaccggcttctgggacttgcgaaccagggcattactgataagctgacggagtaatggaggaaaaaatggcatattttgacagccccaagaacagggtcaaatgggagattgaattggaggagctgcggcagcagaaggaggattttgcagcaggaaggcttcatgatacaggtgaaataaaaaggggcgccatggcggagggacagcacagaaaacctgttacctttgaacagctggagagggaggaggcttctgcttcccgcagaagggaagcgggaagccgggatatgtctcccgggaggaaaagggaggtgtcaaagccttcccccagcccgtccattggccccaaagggggggtgataggatgaaacgaatcagaagtccgctccttttggccgccatggctctgctggccgcaggcctgacgctgtggggctcggcggacagatcttttgccggtcagacagaccagggatacggcgccggcggtgaggctagagaactggacaaagaggcgcaggagagcatgttttcctaccaggtggaaggagaaccggaaagtccctacggagaaggcagtcaggaactggaacggctgctggaggctctgggaatggaagtccctaccttactgcctgaggaagcagcagggatggagaaggtagtggatccgcccatgaacttccttgtgtcaaagacagaagggcttctggattatacgttgcccgatggcagccggttttccgccagtgtgccccagggaatgactgtaacggatccggtgacatttaagcctgtggagaatgccatcctcactatcctgcgtaatggctccggcatcgaaacttccagggatggtatctacagccagcctgggaagtaccacatccggatggtgattctacccacttcttcagagggaggaagcagacttttggaggtgaacttccggtttaccatcctgccccgggaggtgtctttgctgaatctgctgaaggccccggagggctttgccatagagaagatggaactggacggaagaggtattttacccgataatccccgatggcattttctgcatggggatgggcgctataaggtgagattcgcccaggaaaacggagggctcttctatgacatttcctttaaacgggatacccaggcgcccctttttacaatttctcctgttccggacaaaaaggagatgaaggatacggtcttcctggagcttacagaggacatgacatctctggaaatgtattataacggaaggatggcgcccatccccataaaacggctggagctggccggactttaccagttccgtctctgggacagggcgggaaatgaacggtattaccagataagaattgcagagcggctccggccgccctcgccaaagacaattataataaccattttaggggtgggagctgcagccggatggtttttctatcagcgcaggcaccccaggtttttataatagatccattttaatggatggaatgaaaaaaatatgcaggaggatatgatatgaatgtaccggtaatgttattaaattcaacaggaggaaacccttttgagcaggtatccaaacccgtggttgaactgcttaacatggctcttactcccgcccttggaatcgtaggggcgctgggagcgatttattgcatttttcttggagcaaagctggcaaaggccgaggagccccaggacagggaaaaggccaagaacagcctgaaaaacgcaattatagggtttgtgctgatatttgtactcattgtggtattgaagattggtatggatgctatgtctaactggatgaacagcgccatgagtaatgtaactccatagtccgcagataacgggaaaacggtgctgcgccttataaggcgcagtaccgcccatgcgggacaggacacacaagggaagcagttgggaggaggtgcgctttatgaaaagaaaattaaggaattgcctggccatccttaccggccttagtctttttttcacagggtgtaaaaaccaatcagtgaatctctacatggaaacactggtgcctgagagcgccagccctccccagaggccggtggagacaaccggcacgccggccagcctgccggatgtggaaaaggaagtgggggagcaggcgtctgtgtatctggagcagcggtttcaggagcttacgggtccaagagcattttttttcccagaaaaccattcactgagccataccgatataaaagtgtttcaggtcctgggactgctggaggggagattttattattattatgtcacaaaagagataaacacagggcaggaggtacatgcgctggcctcatacgaatatgaaacagaaagatacaagtccctctatgagaacaaggtagatcccggagcagcggggacggatacagactcacaatacagcttctacggccatctcgccgcggataaactgggacggctcagaatcagcctgtatgatggcggaaatttattcattcttgacggggagggaaaggttgttttttcccggacctcggaggatgagggggaggattttctttatctcatagattcaatctttggcgtggggggaacgaatccgtcttatttcagcaaggatattacaaatgtcaccacaaacgggcgctattgtttttatgttcccattactctttataaaggtgattacaccagggaggaggagataggtgaagaggagtatatactgcagtatgcatactctcctattggagcaggtacctttcccaatacagaatatcttctccaggcggatttaaactggaatcaacgggttctggagtggaaggccatagcagactcagggaacagcgaacgggatcctgaggaggactggaaggacgccctgaagaaatatccggtgaaatggggtccctattatgtgtccacaggctatgactgggcgcccgcctttctgtaccggctgatggagtggaaaaatcagaaattcaggaattttgtggaaggaaagaaagggatttctactgcagacagcaaggaaaatgagggatatgccgaactttttgctataccggatgaggaatccatcttcacggatgtgtgggaactgaagacagggcagaaccttgtgaaattctttttcttaagccccggggaggggtactgccctctggtgggcaaagtgggccagagatcggatattttaaagacagagacaagaacgtatacgattacaaagaccaacagtaaaggtgagagcgaggagatagaaattgaggatgaaatccaggcggttatccgcagaaaggccctctttgcggagggggcggctgtagagcagttctatgtcctggataataaagccggaataggagtgacagccggacctgtatggaggagcggaaattattccatgggtatcaatataggccccattctcctgtgcattgattatttcaaagaccagaccgcaaatgaggcagtattttttcccgcagttacccagtgggagatgcagatgggggagcaatatgagggaaatctgagcttttgcatccttggcggccgggcgggagacagctatcctatggcccataatctggagaaggagattataagcatatatgcaggggatggtaaatacataaccataaaaacggatgatttaaatgcttccggttatggacagacatctgccgatcaggaactgctgagcgaggtggagaagcggaaagaatacagggaagagaagggatttaacaagaacagcacttacaaaatagataaagagaatgcctataccaatcctgaccggtacggcagggataacatactggtgataaagaatggtgattcaaagaatcttttgtttaccagcttctataacgggatgctttattttgaaacggagaggtacagcatgagtacggagctttccaccggaaaagggtatcacctgtctgaatggactctgtatcaggcgtggcagaccggggaggatgagataacctgcataggctttcagcggacagatgcagtttactattacatggatatggcaatggcccgggtttataaactcagtttaaaggagtttaaggaacaggcggccggttatcagattcctgttgaaaggaaggctccgccggaaaacgaggctcgggagcccagtctggatgaaggggtgactcttcctgcccttccacaggatatggaaagaataaagcaggatataaaagagaattccattccccccaccagctccgcgtccagggaggaaatggaaaccttgccggatgtgaccattaccgagacaggagctgtgggagacaggatgtggaaggatgcacaagagagaatgagaggagaggaatagaaatggcagcagacaacggatttaagattgtacagttttcacctgaattgattcaggccctgacgcagatgggcgagttaagaaccagaataaatgattacgcggtggaggaattcaaaaactacaagggtgaggaaaaactggatcaccgggatttcgtggagatgatgaacctgtctccggagaaatcggagaaagagcagaaggaatatgtgcgcaacttcgttagagactacaccagcggagatccgcagcttcgtaagaaatgcctggatgatatctatgacagggatgacagctttaatcccgccagcctggatctgtcctgcctcaagggcacggacaccggccccagggagccgggagggcttaccggcagtgaaaaagattttatgagccttataggcgcctttcgccgggagcaggcactaagtgtaaagctgaaggagaatcccggttatgcgcaggagcggtacggttcggattcaaggaagcgggcggaatttgaggccaggcgcacggctatgatgaacggcttaatttcatatacggacaatatgttgaggaacaacggctttaatgagcggctgcaccgggggaacgtggcgccgatggccggggacggcgaatatgtggcggcggatcttgctgtaaatctttacagaaattccatggaccggttgcagggcggacatacaggggagaaccggttaaatttctctctggggccggagaacggcaatatatatggattgtccaggcagctggcagcgggaaatctgaccaatcagatgaaaaccaatgcggcggcagcatttgacacatccctggcaaccctttaccgctccgggcttccggctaccacaatgaatgagatgggggttgacgccctggatttaatccatgtggacggtctgtcagccagagagcgctatggcaataaatatgccaatctttcggagtgggaacagaacaaaatgataaaggcggaggtcatgggcgccattatggacggacagcgtgtggatgccgtcaccttagggctgggagccaggggaaggatgcaggctgtcacccatacgctggaggcggatcttcacgcctacgaccagatggaaaagcgcagtgagcacagcggattcaggcgcctgttcgactgggggcccggaaagatacggacaaaagcagataatgttgacaggaaaaaccgggaagacaggcagaaggaggaacgcactggactgattacaaacagcattgcttccagactggaggccagagagtccaaacaatatctcatggagaatctggggatgtcccccaaaccggtaacgccccagatacagagacaggaggaaaagctgcggggaatcgaaggcaggattggggacattgaaaaacagaatttttccagctatgaagagatcgggaatataagccgggaactggagcgaagaaaggtatatgagggagcccgggaaaaatttaacaaggcaaaaagcaagctggacaccacgaaggctgttatggataacggcaatttgctggaggtagatatacgggaagtcatggatccgattataccggattatgggccggagcagaaggaaaaacttggaaattcttacgacaatgactttttaccggggtattacaaacttgatgaaatacgtactgccagggatttaagccaggagaagctggaagcccgaagggacaggcttaacgcctctctggatcaggggcagaagaagaatgaatacaggctggaggcagtgaacaggcttttagatgcgaaaacacctgaggaaagggagaaagtgattggggacaccctggaggagtttaagaagggggctcaggcacatctggaacaatgtgaagatacgctgaacagccatccctgcggtgaaatgtctccggaacagattcaggaaaaggaaaagaggcttcaggttctggaggaagggctcacaccagttccccaggaactgctgcaggagcgggccatggaggaggcaaggctgaaccagcttaaggagatgaacggggaagaccgcacgcctcagattaaaaagttcaatcaggcggaactgctgcacccggattatattcctcctgccacaaaagaggaggcgctggcgcggattggcgagctggacgcaaaatacggcccggagatacagtatttggaccggagggaaatggttaagaatttcagagctcaggatctgtctaccattgatgagacaaagccgtactgggctaaggagcaggctgctatgacgctccgttatatggacagtatacccattgataccagcggcctgagtgacaaggccaagcagacattggcagaaggacgcaccgccatggaagccatagcgggagccaaggcaggaaccgtttcactggcaggcagcaatgccaagggaatcggaatcagtattgcttatgaggaggcgttaaagacagatcctgcctgtgccaaggcggcagttaaaggcgtggagtatgcggagagcttcagtgcccagtgggaaatgcgccagcttctgatggatgacctgaaagagcttgtaaaaaaagagccggtgaagaatatgaaggctgaggcggagaagagcgggccggagaaggccggggcagagaaggctgaggcggagaagtccggggcggagaagactgaggcagagaaggccggggcagagaagaacgggccggagaaggctgaggcggagaaggccggggcagagaagaacgggccggagaaggctgaggcggagaaggctgagaaggaaaagagcgggccggagaaggctgaggcagagaaggccgggccggagaaatccggcggggccaaaggcaaaacggaagtgactttcgtggagcttgaactttcagagaaggaagccaaggcggccggggcagctgcaaaaccccagagctcctgggaaaggcatgatttaagccccttccacaaagaaagcagccggtccttccagaaggagagcggcataggcagccaccgtcaggataataaaaagccggccaagtaggaactggagcgggcaataaccatcagaggaggtaataggatgaaagcaggaaagttgacggcaggtttctgccttacagtgctgctgacggccgccgccgcagtcacttccatggctgcgccgggaacttccggggattggcggcaggagcaggatggacgctggtattattatgatgaaggaggaaccatgtgcaccggatggattgaggtagggggaaaacattactacctctatgaggacggccactgcgccatgaacgagataaccccggatggtttcagggtagacgcagacggggcttggtatgaggcaaagagggagcttctggggcaggaattccctctgccggccggattccagaacagcatcagcctgggagacggatggggcggcgcacaagccgccctcaatggagccgcagggaagataagtgcggattccggcgggaaaaggaagctgttgattgacagtacggcaattgagtataagtcagctgtcaagtctgccaaggatgacgcaaggtacatgggcctttataaggatagtacaaccggaggctacagactggatatctttattctactggacagaaacagcgagacacaatcccttggagaggcgctggattatgaagtctttaaggccatgctgactactgtcagctccacccccgaccagctggaggaagctgtatacagcagctggcagggggacaatagctggaacatatccagagccgcaattacatctgtgggagactgcagcgtgatatatgaggcaggacaaggttacgggcggtattatctccggccctcgggctagtattgctgaagggagtgcagaagatggatatagacagattgctggccctgaaggaagtgagggaactgtttcccgcagatgagaagggaaacctgccggagggaagctgcctcctgctctccgccatggaggagcttgacttccccccgggccgggatatagtgacctgggggcaggcgggggaggatggaatgtacatccttatggagggcagcgcccaggtgttagattgccatggagaggagattaacactcttatggggccgggtagtattgtaggggaaatggccttaatacgggacgagcccagaggcgccacggtgcgggcaatcacccgggtccgggcggcccgcctttccagagtccagtttgaggaggcggccggaagtaaccgcaggctgtatggagaactgctgaatgtggtctacaaaaagaccaccagtcttgtccgggagcaggcgcgcctccactctgagctggatattgccgccaggatacagactggacttcttcgcagagactttggggggctggaagaacagctgggtcttcgggcctgggctttaatggaacccgccaaggaggtgggcggtgacttttatgacatattcccggctgctcccgggaaagcctgtattgtcatagcggacgtgtcgggcaaaggagtccctgctgccctatttatgaccatggctaaaacacatattaaaaactacgctatgctggatatgcctttggaggagctggcattccgggtaaacaaccggctctgtgaagataacccggaggaaatgtttgtcactgctttcattggaattctggacacggagcaaggtattctcacctttgtaaatgccggacataaccatccatatgtatcttcggagcagggaccgtttcaccaggcggcctgccattcggactttgtactgggcctgtgggaggatatgaagtacagggaacaaaaactggagctgggaaaacagggaaccatttttctttatacagacggggttacggaagctgaaaatcccgaagaagaaatgtttggggaacagcgcctgaaggcggtgctggaccgctgcgctccggaggaggacccaaaagggattatcagccgcatatccatggcagtgaaggatttctcggttaaaaaaggggctgtgcagacggatgacattaccatgctgtgtgtcagggcattatgccggaaagaagggaatgagagataaatgctggagaagcaggtgccggccggaatggaatatatggatggggtgctggaggcgctccgtgagtatctggaagaagtaaactgtccaaagaaaacagcgcttcatctggaaatcgccctggaagagctgttcactaatattgccagctacgcctatgggggagagcccggaccggtgcgggtatactgcggactggagggtggggagctggtgttagaggtggaggacaaaggtatttcttttaatcctcttgaccgggaggcgccggatttacagcttcccctggaggaacgccctgtggggggattgggaatctatatggtgaggcagtttgcggacagcgttgagtaccagtacagggacgggtgcaatattctccggctgaagatatgcatacgcccataattatatgcccttctgcggcagaatcgaggtaagttatatgacagaggttaagacagcagttaaaatcagcgtggctcaggctcctgaattggaaaaggcccttaaatccgtgctggaaacagaggaaaaagagattgtggtcaatatggaggatacgatttatatgagctccgttggactgcgggtatttgcttccattcaaaaaaagataaacgcatcggggaaaaccatggtgcttaagaatgtccggcctcagatgaaggaaatttttgaggtgacgggatttgtaggcgtactatcgtttgagtgacaggggagacgggaatggataacaaaactttgacctggcagcaaagggtgtggaaatggataggagactttgtctacgggataaggccactgctcctttatctcttactgcctcccgctatctctgctttcgggctttttatcgccgggcttaaggagcatatagagtttttcctgtggcgcagcggccagttttacaggactctgggcctgattcttgtattttatctgatgcggaggaaatgcagaaagcggggagtgtccatctgggatgaaaccactctttactggagaggggtaaacgcaaaaaagcttctcctgcttatgggagccggggcaggacttaacctttttatgtccgccgcccttacggtgattccctttcccgactttcttataggcccttatcacgagatgacctatgaagtgttcggtaaggtagataagattttggctatcctgtcggttatgtttcttgcgcctttggtggaggaactgatattcaggggatatgtgctgaaccgcttcctgcgcaggtttgagagccagacgtttgcagtactgctctgtaccggcattttcgcggcctgccatgtaactcccctgtgggttgcgtacggactttttatgggtctgctgctggcccatgtgtccattgtggaggacaatattatttatgcggtggctcttcatatgggttataacataatgacgctgccggtgtggtttgccaatgagagccagcagatttccatggtccttttcgcatccccggcactgattggggtttatggagtaatcggaatctcagtggctgtgctttgtctccggcagtatcctttggatataagacagctggcggaatattttcctcggataaaaagaaagggagagaggtaaatgaaaactatctggaaaagacgtggaatgaccggctgtgggacgaaggcgctgggctttgtcctgtcattggtatgttccggatgcattctgggggtgagtctgtcgggtgccgctcccttttttgataatacaggggatggcttctcaccccgggtcatggtacagggccgggagggatgttttctggcggcggatggatttaacaaggtaatctggcaggtgacagaggaaggccgcagtatctatgcggggcagaagggagctgccgggaagtatggggaaccccgtggcggctacagggacggaagccttggggaaatgcttatcggcgagccctgggatatgattccttatctggatggatatgctctgtcggacaggagcaatcatgtagtgcgctatatttccccggagggcgccatgaccgcggcgggaaccggaaaagcaggttatgaggataatctggcctcaaaagcattgtttgccgccccaacgggcctggctgcgggacctgacggaatactttatattgcagacacggataatgacgtagtccgcagcctgtccctgtccgggaaggtggatacctatctgcggggcctgtccgcgccaacaggcatatgcttttatgaaggtgcgctgtatgtggcggacacaggcaacaaccggattgtgaaggctatggacggagccgtggtctggagcgcgggaacaggagaggacggatttgcggacggccctgtgtcgcaggccatgttttcaggacctcagagaattaccgcggcggaggacggcgccctctatgtgtcggatacaggcaacagtgtggtacggaagatatggggggacaatgtttccaccctaccggccgccgatgcggcggacccggatctgaccatcgcgtccccggaggggatgatggtaatgggggatcatatttacctgtgcgacagttttttgagaaaggtgtttgtgctgcccagataacagggaatagatgggaggcagtatggataaaaaattgataaaggcgtacctgccctgggggttatgtgccgggatatttaccatagcggccgcgtccggattgttctatgagatggataaccgtctgtcagacgcgctgtatcaggagcggcgggggacagacggcagaatcgccattgtgggtattgaccagagatcccttgaagcgctggggccttttggcacctgggaccggcggatactggcacagacggtttcctatctgaaccagggggatatccgtcctgcggttatcgggctggatgtacttctggcaggagaaaccgggacagaaggggatttacttctggcagaggctgcggggaccggggaaaatgtggtcaccgcagcagcgggaacctttggttcctctctggttacagcggcggacggcaccttttatctggatgattttaccgtgaagtcctttgatgaaccttacaaagccctgagggacgtgaccgcccagggacatatcaatgcaatgtatgataaggacggcatcctgcgccaccagctgctggagcttgggctgccggacgggcgcgtatttccatcctttgccctgaccatagcaaggaagtatatacaacaggaaggaggccgggaggccggtcttccgcctgtggattccaggggcttctggtatttgaattattccgggctgccggaggattacagtgagttcatttctatagtggatcttttggaagagaatattccgcctgaatattttgcagatcggattgtgctcatagggccttatgccgcagggctgggagaccagtatattacctccgcagacaggggagaccccatgtacggagtggagatacaggccaatgccatacatgcgcttctggagggtgattataaggaggaaccaggcgctggcatccagctggcggttctgttcctggtgctggcggcagccggcgcgtggtttaagagcagccggctggcagggggaggggcagtgtggctggcaggctctttcgcatatgtaatcattgccaaggctgcctatgagaaaggaatggtcctgcgtattctttggattcccctgggattgaccctttttttcggggcgtcggtgatgatccattatggaaaggctgtcctggagaaacagcgggtgacggccaccttcaaacgttatgtagcaccggagattgtggatgagatactgaggcagggaacccagtctctggagctgggcggaaagcttacacagctggctgtgctgtttgtggacatcaggggattcacctccatgtctgaggcgttggaaccgggacaagtggtggaggtattaaacagttatcttaccctggtttcatcctccatcaagaaccatggaggaaccctggacaagtttattggggacgcggccatggccttctggggcgcgcccctggcacaggaggattatgtgatgaaggctgtcctggctgctctggatatggcaaaagaggcggaccgcctgggggatcagctggaggcgcgtttcgggcgcaggcttacctttggaaccggaatccacacaggtcccgctgtggtgggaaatgtgggggcgcctgaccgaatggactatactgccatcggggatacggtaaacacggcttccaggctggagtccaatgcccccgggggaaagatttacatatccgcagctgttgcaaatgcgctggagggaaggattaatgcaaaggccataggcagcatccggctgaagggaaaagcaggggaattccaggtgctggagctggaagggcttacggaaggaagctccggcagaatgccggtgtcagagggtaagaaggcggattaagtattggaaaggtgatggtatatgagagagcgcgggagaaatctgatacgatgcggggctgcttttgcggtgtcctgctgtctgctggcaggaaatgtgtttcctgcggcagccgacacctctgtaagcggggcaaccatgcgtctttcttccagagagggcacggtaaatgtgtcgggaaaaggaggaaaggcggttgcggcctttgataacatgcggctccagagcggatattacctggaaacagaggctgcaagctacgcaggccttgccctggatgacgtaaaggccgtgaagatggatgaactgagcaaaggagagatccggaagaaaggaaagcagctggagctgcttctgtcagaaggaagccttctctgtgatgtaaccgcgcctcttaagggggaggagtccctatccatccgcacctctaccatgataaccggaatccggggaacggtagtatacgcggaagtggttgacagcaatacgagccgcgtctgcgtcctggaggggcaggttcttgtaagaccggtgaatcctgtggagggtgaccggaatgggcagtacatagagaagggccggcaggcacttattatcggtcctgaccgcatggagcggaagggagagatacagacgcttccccttacgaaaacagatattgccccttatgtgctttgggaaatccatgaaaatgaggagctcgccagaaggctgagagaggcaggctgggatgtggactggatgattgaaaacgcggagcggcttttaagggaagaagaggataaaaactcccaatgggcagagaatgggcagggaacatcaggttctaagcctggcgggaaggatattcacacccctctttttaacggaggggattccggttctgattctggaaccggcacacagccgggcagacctacggtggagcttactatgccggtgagcccggaaaccatagaggaaaagctgcggacatctgatgtggttcttcacagcgctgcggacagcaatccccttatcattgataacagcctgaccgtaccggcaggcagccggctggaattagccgggggaatggggctggtggtgggaacgtcggcagcattgcaggtggacggaactttgattgtggacggaaacctggaaaacagaggaactgtaacgaataccagtatgaataccctggatattaaaggagattatgtgggaagcggaacactgaataataaagggagagtggcggcaaatggttcctttatgcaggaaggcggcagcttccaaactatcggacagggccggcttgaggtggagagaaaagctgttattgataatgcagcctttgatttcggtaccggaactacattgtttcatggtgatttgacagtcagaaacgctgacggggaatttggcgataacctgtgtgtggaagggatgcttttactggaagacagcagtattctggtaacaggaggattttacggcgggggaattaccgcagtaaagaaacaagatggagagaatctaacatatgaagagctgaacctggagggaggaaaggttttggctgaacgtggagtcaaaggggtaatctttgcagaaaattataagctgaatgtacaaagcggtatcttggaaaggtcagatgatgggattccttttataaccggtacaggtattttagaaatggatggagaggaatataaaattgaagagttgacagagtccatgtttgagagcgaagagacagagacgggctgggttttaactggtattgtccaggaacaaaaaaaacaggcagaggtgcatacttctatccctcttcaggcagatgctgaaaaactgccggatgtgaatgaggaagagaaagagctacaggagggagagaatttgccggaggaaggagaaccggaagagggcggaaaccagccggaggaaggaagtccggaagcgggcggaaaccggccggaagaaggagaaccggaagagggcgaaaacaggccggaagaaggagaaccggaagcgggcggaaaccagccggaagaaggagaaccagatgagggcggaaaccggccggaggaaggaggaccggaagagggcggaagccagccggaggaaggaagtccggaagcgggcggaaaccggccggaagaaggagaaccgggagaaggcggaaaccggccggaggaaggaagtccggaagaaggcgcaaaccggccggaggaaggaagtctggaagaaggcggaaaccggccggaggaaggaagtctggaagaaggcgaaaaccggccagaggtaggaagtctggaagaaggagaaccggaggagggcagaaatcagccggaagaaggaagttctgaagaaggcgcaaaccggccagtagaaggaattccggaaaagggcaaaaaccagcctgcaacaggtaaactggaagagtatggaaatctgccgggataaggaatctatggaagaaataccggaagccggacattaatgacaatacggagtaggtaaaatgaataataatataaaagtcacctgctgggggagccggggatccggcccggctccctacacagagcagatggaatatgggggaaacacctcctgcttcaccatagagacagggcagatgcttctagttctggacggcggcactgggctggcggcactgggccgggagatgatgaaaaatccggatgacaagagggatatccatatttttataagtcaccttcatttggatcatattataggaattccgctgtttaagccactatttcagactggacgccgcatctgtttttatggagagagccgcaacggccgttccttaaagcagcagctgaacctgtttatagggcctccttattggcctgtttccctcagccaatgcagtgcgtccattgagtactatgaagtggaggccgggaaaatcctgtcattgccactgccgcagtccgtacagattctccccatccgttccaaccacccggaccagacggtgctgtaccggatacagctagaagaaaccatggtattctatggacttgactgtgaattaaaccaggagatgacggatgtgctgtcaaactatgctgagaatgccggacttctgatttgtgatgtccagtactcaccggaagactatatcttccacaagggatggggacattccacatgggaagctgctcttaagctggcagaagccagcagcgcgaaacggatctggcttactcattttgactgggaagcggacagcagtaccttgttctgtctggaaaggcaggccacactttgcaatcctaactgcgaatatgtacgtgaaggtatgacggtctggctgtaaaggtctgataatacagctgtactatagaccggagccgcagagaataaccgttttctgtaactttaatcctaaccttgtaaattgtattgaaaaatcccgggtgatatggtagattttaattaatacatctgcacgggcaatggatgagcaagggccggctgctgcaaggaagggtgggatttatgagaatagaggcgttaaagtaccagaccgacaagaaggaggacatcattatttttgtagattataatgaggtgtacagcgagggatatcatgtacaatggtctatagccgatattgcctaccggaggccgccttcgagaaactatatctttttgagcgatacataccgggacgacagtgagtactatatactgtccccggaagaaaagacagcatatgctttaaagagacaaaaagagtttgcaggtgaggtaaagctgaaagaggcactggtttccgcctggaatatcatccgccctgatacggattccatattgggaatgtgagaaggggaaaatttggggacatattttatatagaacaaacggggcagtgccattacggcattaccccgttcgctttttagtgcgcccggcggcgcacgtctctaactggtgaaagtccggaatccgcccggtggtgggaaggatatagccgaaggcaggggtgttcatcgtgaggtgaaatctgaaggaagccgga

SEQ ID NO: 3239 - DNA, 6840 bp, Unknown
  gut microbiota DNA sequence
atcttatgggcctgaaactgggatgcgggcagggggcctgcggctgctgtacggtaatcatggatggccgtgcggttacttcctgcatggtgcttaccatggactgtgacggaagcagcattaccaccattgaagggctggcggacccggagacaggggacttaaccgggctgcagcaggcttttgtggacaattgcggattccagtgcggattctgcacatcgggcattattatgacagccagggccctgttagatgagaagccctgccccactgaggaggaggtccgggatgcgctggccggcaattactgccgctgcgggacccattacacggcagtggagagcatcatggcttatgtggagaaaaggaggagtgaagaatgaaccaggattacaaggtagttggcagggaaatcaagcgtatcatagcagatgacattgtcaccgggaaggctgtgtttacggatgacctgcgggtgacaggaatggtttatggcaaggtgctcagaagcccttacccccatgcgcgtattaccaggattgaggtggacagggcaaaggcctgtgacggggtccatgctgtggttacatacaaggacataccggacaacatctatattacaaaccaaatgactccggcgccccactaccggccgttgaatgaaacagtccggtttgtgggggacccggtggccctggtggtggcggacacagaggacattgcattggatgccatggaactgattgaagtggagtatgaggaactgcctccggtattcaccattgatgaagcgctggcgccggacgcgccccagctctatcacgtgtttccgggcaatatagcgccccctatctttccgggactggatgaccttgattttaaggtgggtgatccggaagcaggatttgcccgggcggatatcattgtggaaatggacggggagattaaaagcggccagaacgccatgccggcggaagcccctgtgtgtattgcacagtggaatgatgatatgctgaccatctacggatccatcgcggcaccgtccaactgccagacttatgtggctgcgtccctggacattccctatgagagggtgcgtatcgtggctccctgcgtggggggaagctttggctccaagctgtttgtgggcaatgtggttccgccggtgctgaccgccatcatggcaaaggcatccggacggcctgtgatgttttcttatacaaaagaagaacattttgcatgccaccagacgcgcatgtgcaccaaatcccatgtcaggcttggggtgaaccgggaaggactggcaaccgccattgagatgacccagtatgcggatgcaggcgtctgtgcatccacccaggaaaacatgctatctgtgggcacggccagtctgccccttctgtgcaagacggataacaagcggtacaagggtactgtggtagtgaccaacaaggttccctccggatcctttaggggatacggatacatggaatcctctgccctggtaaaccgggcaatcatgagggcgtgcatcggcctggggcttgacccggtggtgtattatgagaagaatgtgctgcgtcacggagagcggtattacaatgcattgaaccagaaggaaccgtggcagtataatgcgtcccctgactggaaggacaccatccatgctgcggcagagggattcagatggaaggaccgtttcaagggatggggcattcccagcagagctgacggaagcaggcggtacggcgtgggcatgggactgtcaggacactcggatatcggcggcatggcctccaataccaatgtaaccatgaccagcgcagggggagtcatgattcagaccgttatgacggaattcggcagcggggtccgggacgtataccgcaagatcgtggcagaggaactttgcataccggtggaccgggtgcgggtaagtatttcagacaccagcgcagcacctctggattttggaagcattgcctccagaagcacctactccggcggcatctccgcccagagggcagccagggatttaaagaaaaacctgttccaactggcagaggaacggctgggaataccggcatccgactgggactttaaggacggtatgcttaagcgcctgtcaaatccggaggaggtacacgaccttcatgaaattctcatatatccggacagcttaagcggaaccggacactggcccggcatcgacaatgccaccatcatgcatgtacagttcgttgaggtggcagtggatacagagacagggctgatagagataaccgaccattttggaggatcggacgcagggaccatcatgaacccaagggctgcctataaccagatgacctccttcttcgctgggctggacgtggccatccgggaggagacggtctgggataaatgggacaataaggtgctcaaccccaacctgattgagtacaaggccagaaccttcaacgaggcgccgcctcatgaccatgtgtgcctggagtccacaaaggggcgggaaagtgacttcccctttggggcaatgggaatcggggaacccatcatatcgccgtccgggccggccatcaccatggctgtctataatgcctgcggcattgaactggaggaatacccatacctgcctgcaaaagtacttgcagcgttaaaggaaaaggaggacagggcataatgaaaaattttgaatatataaaaccgtcaaccgttacccttgccagtgagctgttaaagggggagcatacggctgcctgcgccggcgggacagacctgattgaccttatgagaaaccgaattctgccggaatacccaaaacgggtggtcagccttaagggaatagaaggcctggactatatacgggaggagcatggcagcctgctcataggggcaatgaccacactgaataccattgcacgttccgcccttgtaaaggagaagaatcccatgattgcccaggcagccgaaagcgtggcatcccccaacctgagaaacaccgcaaccataggcggcaacctgtgtcaggatgtgcggtgctggtactaccggtatccggacagcctgggcggacgggtgaactgtgccagaaaagagggacatctctgctccgccatgatgggggagaaccggtaccattccatctttggggcagccaaggtgtgcatgactccgtgcacacaggggtgtccggcccatacggacatctccgcctatatggaaaagctgagggaaggagatgtggacgaggcggcccgcatcatcctgagagccaatcccatgccggccatcaccagccgggtatgcgcccatttctgtcaggaaaaatgcaacagggagcagtacgatgagcgtgtcaatgtaggcgcggtggagcgctatgtgggggattatattctggaacaccatgagcggttcatgaaggcgccaaaacaggaaaatggaaagagggccgccattgtcggatccggtcccgccggactggcagcagcctattatctgagagagagcggttatggggtcactgtgtacgagcgcatgaaggaggccggcggatgtctggcctatgccatcccggcctaccgcctgccaaaggaaatcgtgcagaagtttgtatccgtcctggaaggcatgggagtctgttttgtgtttaacacaaaggtgggagaggatattgagctggagaccatacgcagtgaaaatgacagtgtgctgctggataccggcgcatggaagcgtccgttaatcggaatttcaggtgaggagctgacacggttcggcctggatttcctggtggaggtaaacagctatatccatgagcggcccggttcagaggttgtggtggtaggcggcggcaatgtggctgtggacgtggctgtcacggcaaagcgcctgggtgtgccaaaggtcaccatgatctgcctggaatccagggaacagatgccggcaggcagggaggagatagaacgggtcctggaggaggggattgagattaagaacggctggggccccatggaaatccttaaggaatccgtatcgccggaggaggacaggataacaggcgtccggtttaaggcgtgtgtctccacactggacggggaaggacgctttgcacctgtctatgatgaagccagacagatggaagaaaaggcggatgtggtgtttatggcagtgggacagcgatctgacctgagcttcctggacagtgtatgcagggttgagacggaccggggaagaataaaggccagtgaggaccacagcaccagccaggagggaatatttgccgccggcgatgtgaccacaggaccggccacggttgtaagggcactggccggcggccgtgaggcggctgtcatgatgaaccgccacatggagggagcgccactttctgttgagacaggtgaatgccgccaggggctggcgggtttccttccggagtgcgggaacatcagctgctccaatgagccggacctgctgccggccggagagcgtggggtgaaccgggaagaccgtaagggatattcgtacaacatgttgaacagcgaggcgggacggtgcatgaactgcggctgtctggccgtgaatcccagcgacatggcaaccgcgcttctggcatcggatgcagttatccgcacaaacctgcggactctgggggcgcaggagcttctgacctcccatacacgtatttccgacaccctgcttaagggggagcttatcctggagatacagattccatgggacgcagcaggcaccatatcaggatacgagaaattcaggctgcgcaaatccattgatttcgcagtggtggccctggcttacaggtatgtgctggatgacggtgtgattacagatgccaggatgacgctgggcgctgttgcacctgttcccatgagaaggaaaaaggcggaagcgtatctgattggaaggaaaccttccggggagacggcactgggtgccgctaagctggcactggagggggcgcttcccctttcaggcaacgcttataagattgatgttgccgaaacactggtacggcgttcactggactggagcgggaaggatgaataaagaatacataacagaaacagcccttaagggtgagtacaggggaaagccccaaacatgcatggggacaggggcctgccaggacccctcctgcagggatgtgctgacctactatttctcagcggacagagagcttataacctccatctcctacacaatcacggagacatcctgttttccgtccaaggcgtgtgccgagacagccgcagccctggtcaggggaagacctgtactggaagcctacaccatagacagcagtgccattgcaacggctcttggagggctggaaccggaatacatgcactgcgccatgatggcggaactggcccttaagcgcgcagtactggattatgcaggtaaacgaaaggaagggcagcctgtcaaagctgcccctccgatgtaagcttttggattaaatagcgttttaaatgactgtaatgagccttcatctgaagctctgcctctgcctggtcgttatcctctatggccttcatgatcagaagatgttcttccacaaatacgcggttcattttcatggacgacgaggtgatgtagcggaagcggtggaatggatccacggtggagcagatgatgtcggccagcctggcattgccgcagtaatccgtatagtactgatggaaattgacatcattttcaatgagcatacccgtgttttccatgcgcaccgcgtcgcgcatgttatcggcaaaggtgcggagcatggcaatctgatccttggtggcctgtttcatgaaggacaggagaacagccggatcaagaagggcacggatttcatatatttcctcaatgtccctgcgtccgatgacagatacatagatgcccttgccggggacaaaggtggcaaggcccgtgtggcacaggtccataagggcggcgcgtatgggggtgcggctcatgttgagggaatcgctgagggtgcgttccaccagaagggaaccgggcttgtattcgccggatatgatgcggtccttaatccggacataagcctcgtcctttttgctcagagcctgtacggcctgtgtgttgtcttccatggtgaagcctcctttaacctgattcgtcatctgatataggaattataggcaatgatttgggaaaatgcaagaactgttacctttcatgaacgatttctgctgtgaaaagcagaaggaaatgaggtggaaatgaagataaaccgttatgcaggcgcatttctgacaggaggcgctatctgctttttatgccatttcctgacaatggcataccgcatggccggcgtaccggaactgtttgctgtcagtgtaaccgtattcacactggcggccgttggttctgtcacaaccataacaggccattaccaaaagcttactgattttggggggatgggagccatgattaccatgggaggcttctcgtccgccatcactgacgcggttcacggagccaggaaagagggcatgggagcgggccgggcgttgtggcggggtgtgaaggacgggctgttcatattgtttgcaggatacctggcggctgttgtgtccgttgttgtgatgtatgcggctggccggatttagccggccttaccatttggaaaatgggggaattaattatggagctggttaagatttttattgcaggcggagtgttctgcatgtttggtgaaatattgtgggcaaaaacagggctgggcgtggtgaaaaccctgatggtctgtattgcagcaggggttgctctggatgtggccgggatactggggcctgttatcggattcgg

SEQ ID NO: 3240 - DNA, 85199 bp, Unknown
  gut microbiota DNA sequence
tactaatttccattatcgtgtcctccttctatttctgctatcagtatacccaattattcggtttaccacgcttctaccatcataatacgtttttcgacattttacaagtccaacatggacttacatatttttcatattaaccataattatcaaggcttgttaaaaaatattatcactatgccctcttgacgtgtatacaatgtgcataatataataagtgttgcaaaagcaacagcatatatcgggtttttttagtagactatggatgtccggtaaaaccggtatggctgtgaaacatttggttaacaatagtttttatatataggttcacgcatttcacaggaggaaaagtctatgagaacagagtggaacacatttaaaggcggtgtatggcagcgggaaatcaatgtccgcgacttcattcagaaaaactacaccccctatgacggcagcgacgagtttctggaaggtcctacccggaatacaacggagctctgggagcaggtcatggagctgtcaaagaaggaacaggaagccggcggagtcctggatatggataccaaaatcatttccaccatcacgtcccacggcccaggatatttaaataaggacaaggaaaccatcgtaggctttcagaccgacaaaccatttaagcgttccctccagccttacggtggtatccgcatggctatgaaggcctgccaggacaatggatatgaggttgatcctgaaattgtggaattctttaccaagcacagaaaaacccataatgcaggtgtattcgacgcctatacccctgagatgagggcatgccgttccagccatatcatcacaggcctgccggatgcctatggacgcggacgcatcatcggtgattaccgcagaatcgccctttacggtgtggatgccctgattcaggagaaaaaggaagaaaaggattccacacgcaccattatgtactccgatgttatcagagagcgcgaggaactgtctgagcagatccgggcgctggaggatttaaaggagctcggaaatatctatgggtttgatatctcaaagccggcttgcgatgtcagggaagccatccagtggacctacctgggctacctggccgctgtcaaagagcagaacggcgcagccatgtcgctgggacgcacctccaccttcctggatatttatgctgagcgcgatttaaaggaaggacgctatacagagaaagagattcaggaattcgtggaccacttcatcatgaagctgcgtcttgtaaagtttgccagaacgccggaatacaacgagctgttctccggagaccccacatgggttacggaatccatcggaggaatcggcattgacggccgccacatggtgaccaagatgtccttccgttatctgcacacccttcagaacctgggcactgcccctgagccaaacctgaccgtactgtggtccacaaagcttcctgagaattttaaaaggttctgtgccaagacctccattgagtcctcctccatccagtatgagaacgacgatttaatgagggtgacccacggcgatgattatgccattgcctgctgcgtatccagcatgcgcatcggcaaggaaatgcagttctttggcgccagggcgaatctggccaagtgcctgctctacgccatcaacggcggtgtggatgaaatcagcggaaagcaggtaggtcctaaataccgtcctgtgaccaccgagtatctggattttgacgacgtgatggacaagtacaaggatatgatgaaatggctggccaaggtatatgtcaacgccctgaacatcatacattacaatcacgacaaatacagctatgaaagactgcagatggcgctccacgacaaaaaggtgacccgctggttcgcaaccggcattgcaggcctctccgttgttgcagactctctgtccgccatcaaatatgccagggtcaaggcggtgcgcaacgataagggcattgtgactgattatattgtggaaggcgacttccctaaatatggaaataacgacgaccgggtagaccagctggcagcagacctggtgcacaccttcatgagctatataaagggcaaccacacctaccgcggcggtatccccaccacttccatcctcaccatcacctccaacgtggtgtacggaaataatacgggcgctaccccggacggcagaaaggccggacagccctttgcgccgggcgcaaaccccatgcaccacagagacagcagaggcgcagtggcatccctggcttccgtggcaaagcttccgttcagggacgcccaggacggtatctccaataccttctccatcataccgggcgctctgggcaaggatgaccagattttcatgggagacctggaagtggagctgaacggctgcggaggcggctgtgaagcacctaccctttttgaagggctggattccgaggccgatatcgaggaatcctgataagcagcatataaaccatttacttgagaaagagaggattcatattatggtaaaagcaagcgaatcacagattgataacctggtggctctgttagacggctatgcccaggaaggcggacaccatctgaatgtaaatgtattcagcaaggaaacccttttggacgcacaggcccaccctgaaaaatatccccagctcacggtcagggtttccggctatgcagtaaattttaataagctgacaaaggcgcagcaggatgaggtcatttcaagaaccttccacggatccatttaaatcctgtctgcaaactgctttggatgccgcctgacaggaagatgttccgcctcaggcggcatccatgtttctcagaaaggagcacagctttatgataggacgcgtacattccatagaaagctttggtaccgtggacggccccggtatccgcatggttatctttttaagcggatgtcccatgagatgtctctattgccataatccggatacatgggatcccaagggcggttctcccatgacagcggaggaaatactggaccagtatgagcaggcccgccctttttacaaaaaaggcggcatcacggtcagcggcggcgaaccgctgatgcagataggttttgtgacagagctctttgagaaggcaaaaaaaagcggtatccacacctgcctggacacctccggcatcacctttaacccgggctcccaggcggtcatggcccattttgaccggcttttggcttccacagatctgatacttctggatatcaagcatattgatccaaaggaacatgtgaaactctgtgcccagccccaggataatatactggctttcgccgcatacctggaaaagaagcagatacccgtatggatccgtcacgtggtggtgccgggcataacggaccgggaggaatatctgtaccgccttggacgctatctgggcacccttaaaaacgtaaaggcgctggatgttctgccatatcatgacatgggaaaagctaagtacggccagcttggaatcccctacccgttagaagacacagcccccttgcctcctgcaaaggcggcagagtcccgcaaaattattcttcagggaatgcgcgatgaaagggtccattgctcctaaatttatacaatattcgctggtttaggaacgattttcctcttgaataattagacgttatagtataaaataaaataacaatgtagacaaatcttaaggaggtattttatcatggcatatgtaatcagtgatgcttgtgtaagctgcggcagctgtgcagctgaatgtccagtaagtgcaatttccgagggagacagccagtacgttattgatgctgatacctgcatcgactgcggaacctgtgcagctacctgcccaaccggagctatttccgaaggctaattaagtattacataagggtctcttccagagggaaggggctctttttcatatattcagcatatattattcacagaatacatggaggaatccaaataccatgaaaaaaccagtaatcggcataaccccttcccataatacagataatgacgaaataagcgtacgccccacctacctgagggccattgaagcggcaggaggcctgtccatccttcttcccctggaagtatcagcggaagatttaaagcagctttccgggctttgcgacggttttctcttctccggcggtccggacattcatccgttcctgctgagggaggaaacacatatgcattgcggcaatgtgtccgtggcgcgggataccatggagctgtctcttctgaagctggccatggaagccaaaaaaccggtcctgggaatctgccgcggagcccaggtcatcaatgtaggcctgggaggcgacatctatcaggatattaccagccaggcagaaaccggctttcccattgcccataagcagccctattcatgctgcctgccctcacaccatgtggatgtacaaagggatacactgctgtgcgggattgctgatgggaaaacgcaaatcgaagtaaacagttcccatcatcaggccgtacgcaggattgccccctgcctcattgccagcggccatgcgcccgatggcatcatcgaggccctggagatgccggattatccctatcttctggcccttcagtggcatccggagtatatgtggaagacagatactgtgtccgccaatatatttaaaagctttgtggaggcctgcaggggatagctggaagagcggacagcaggaaaggccggctgcagaaaaacggctacagaaaaacggctgcagaaaggccctgtatgattcacgctgcaaatatatgcctgaatcatacagggccgtctcacttatctcctgtacttatctcctgtccttatcttctgtccttatctgcctactgcttattatctatcaattcaccagccatctgggccatatcctgggctgtcatgggattatccatggctgttatgatgtaaaccttctccccatccttccagagcatactctgggcaacctggtccgttaccgtatcgcttccataagagatatagagttctcctgctgcttcctttgccttctcctcttcggaggcctgataatccgggggaacaaaacggtactggtccctggtgtagtttagagtaatcccattatgttcaaatacctggtccggctgtccttcctcctcaaacaggcttgtgccctggactgtaacgaatatatccgggcttccgtcctttttgtaattcagagaaaagctttccgcggactttatcacatttccatcctcatccatggcgtcctgatgggtgggcattcccatgtcaaaccggtatccgttgctgaatacttcgggggcattggtggtatagcccagctttgtctccatttctcccagtttatcataggtaaaatcatccagatggctgcctccggcgcttgtataagcaaccttccctgctgcaaccgctgttatggtacccagtacgcagatggccgcagccaccacgaatacacgcttcatattccatttcttcattcctgattcctcctctattttccggtgaacagagcgccgcattctctctgtatctgcggaagtcacctgtatggactctgcccggctgcatagggcacggcctatctgctcttccagttccttctgcgccaccggtttactccgtctgttcataaggttacctcccttcctaccctcttgcgttcttccatcaattcctgtttcagattcgcccgggccgtatacagcctggacttaacggttccttccagacagcccatgatgccggctatctccctggtggacatctggttaaaatagtacaggacaacggccgtcctctgtttgaccggaagattccttattgccttataaagctccttttcctgggagcgcatcatgacttcctccagcactgaggctgtttcaggctcttccttcccaaacacttcctccaccggctgttctttcctgttcttcctgcaataccgccaggcttccctggtaagggtcttataaagccagttcccaaaatattccggttctttgattttctttcggttcatccagcacagcacaaaagtttcctgtacaatatcctcactgtctgcatgacttccggatatgagatatgccatgcgcagtattttgggataataaaattccatcaaccggtcaaatgcctggctgtctccttccgccatgcggcgtaccagacctgccgtctcctgctccatgtccatccactccttccatcgtctctcttatttggaaccacttatatatggaaccattatatatcccttttggcttaactgccagaaggtgttgttaatcggtgcacctgctatatagaggagggaggcgggcagacggttcattttatttgtaattattttttacatttgctctgtttttactccatatcccaacaaacccccataaaagtaaggtttgtgcttgtcagaacagattatgtcatgtagaataatactgctgaaataaaagaatggcagcacctgtaaataaaggagttttcacaaaaggagtttgtaataatatgagcattttaaacgtagagcatttaagccacggtttcggggaccgtgctattttccaggatgtctccttccgcctgttaaagggtgagcacatcggcctgattggggctaacggcgaaggaaagtccacctttatgaacatcattaccggcaaactcatgcctgacgagggcaaggtggagtgggccaaaaacgtgagggtcggttatctggaccagcatgctgtgctggaaaagggcatgaccatccgtgatgtgttaaagaacgccttcgctttcctttttgagatggaagagcatatgaaccagatttgcgataagatgggggaggccggcgaggaagagatggccgccatgatggatgagctgggaaccatacaggaccttctcatggcccatgatttctatatcattgattccaaggtggaggaggtaggacgggcccttggcctggccgacataggactggacaaggatgtgacggagctctccggaggccagcgcaccaaggtactcttaggcaagcttctgttagagaagccggacattctgctattggacgagcctaccaactacctggatgtacagcatattgactggctgaaacgctacctgcaggagtatgaaaatgccttcatccttatctcccatgacattcccttcctcaacagtgtcatcaacctgatttaccatatggaaaaccagcgactggaccgctacgtgggcgattatgacaagttccaggaagtatacgcggtaaagaagtcccagctggaggccgcctataagcgccagcagcaggaaattgcggagctggaggatttcgtggccaggaacaaggccagggtggccaccaggaacatggccatgtcccgccagaaaaagctggataagatggatgtcattgaacttgccagggaaaagcccaagccggaattccatttcctggaagcccgcacgcccggtaaatatatttttgagacaaaggatttaatcatcggttatgacgagcctctgtcccgtcctctcaatctggtgatggagaggggccagaaaatcgtgctggtaggcgccaacggcatcggcaagacaactctgcttaagagcattctgggccttacacctgccctgagcggcagtgtggagctgggcgactacctgtccatcggttactttgagcaggaaatggcgcccggcaatacaaccacctgccttcaggaaatatggaccgaatttcccgcctatacacagtaccaggtccgctccgccctggcaaaatgcggcctgaccacggaacacatcgaaagccaggtcagggtgctcagcggaggcgagcaggccaaggtccggctctgtaaactgattaaccgggaatccaacgtgcttctgcttgacgagcccaccaaccacctggatgtggatgcaaaggatgaactgaaacgggcccttaaggaatatagaggcagtatccttttaatctgccatgaaccagagttttatgagggactggcaaccgatgtgtgggactgtaaggagtgggcgctgaagctgtcctagcgtgtgtctgaaataaaaacaaaaagaaagccatgaaaccatgaaggcattttccgccccgccttcatagtttcatggccttttcttattcatcctcttttgaatccgtttcaggacttcttgtaaaataacgcagcagacaaagggaattagccgacagtccgttgccgaacagattaatataatcatcccgtgatgaacgcacatgatcaatgacggcctggcgcccgcgctcataatcctggtccttaatggcgtctatgatagcttgatgcttcatacacgctttactctgcagtgaattttccaaaaaagagagaaaccgcattctggtcagctgaagcagtatctcatcatgggcttttataagccgcttattgttggacagtgcaaccaattcattatgaaactgctgatcataaaaaaaatgttctttggcctgtccggcatcctttgtttctttcatcttatcggtgatttcctgaaggttttccagctgctcaggggtaatcccatttcgccaggaaagcatgaaggcggtagtctcaatcccttcccgaaaatcaaagagatcctgtatatcttcttttgtaatggtagaaacacggtagttcttcttaccgatttgttcttccagcagtccctcatttttaaggcgcatgagtgcctgtctgatgggggtacggctcatattcagctccttgctgagaagatagtcggatacgatttgccccggaaacagatcgaaatcaaaaatctgctgccgtatggtttcataggctttatttgtcaagctgttgtctttttccatcatatcctcctgtgacaactacgtattaaaaccattctaatccatttttcttaaaaagtaaagttattaaaccgcgtgggaaggaacacgggagggggtgtgcaaaccgctgcacattttatgcaggtatgccgcgcatatttgtgtatcctccagcagaccatgctgtatattcccctccacagccacggttcccttgtatccgcactccatcagtttcctgtatatggcggtaaaatcaaggctgcccagacccggatacgcccggttatcatccgaaatatgcagatggggataataattcatatactctgaaagggaatctaccagcgatggttcttcaatattcatatggtatgtatctgccagaagctgtatgaacggacagtccagaaaattaatcacgtgtgccccttccttcagagtccttataatagatgcctccttgtgattggttgcctcaataaggacctgcactttcttttcttctatatatggctttaattccagcatagattccagaaaaagccgttctgaaacttcacggtcactgccggggcctccttttaagaaaccgattataattccgcaacccatggatgcagcataatcaatgttcctcttacaaccgttaacagccctcatcctttcctcaggaatacctgaactgagtgacagaccatgtgttttcgcatacactcccgttgccagcatgttcattttcatctgatattcatttaataatgactttagttcctctggttttattaaatccaaatcaggtaagtttaactcaaccccataaaagccttcccggtgcaaaaggccaaatagtcttctcagttggggaagctgctcctttgattccaggacacattgaaagccggtccgaaagggaaataatgaatgttccatacctagtcgattcctttccacacaaaataatcataattcattttagtttatctatagtttaaaacagaatacaaaatttgtatacaaaaaatgaatacaaaaaatggattcattttttgtgtacaattaccattgataaaaatataggcatttattacaataacaccatagagactactctaaaaaccaacaaaacatataattcgggaggctttccaaatgagaaaaatgatgaaacgtattgcagcagcaacaataggaatggcaattgtaatgacatcaaccgcttgctcctccggcaccggaagtaccacggcagctccggagaataaagagaccacggccgttcaatctgccgctgaagaaaagaaggaggacccagccgctgcaccggaagaaacctacactctgatgttcggacatgcccagacagaaacccatccatatcaggcatgtttccaggaatgggctgatgcggtggcggagaaaacaaacggcggtcttgtgattgacctttatcccagcaatacccttggatccgaggaggatattattaattcatttaaggattcagacacaaactggggttacaacacagactttgccaggctgggtacctatgtgcctgagctggctatgtttaaccttccttattttgttgagaccatggacgatattaatgcagtaaaggaactggacatggtaaaagaatggattaataaactggaaacagagaacgatataaaggtggtatcccttaatctggtacagggttaccgaaatgtagtggcaggcaagccagtcctgaaacccgacgacttaaaaggactcaccttacgctgccccaacacggaaatctggcgggctgctgtcagctcactgggctgcagtgtacagggaatgggccgcggcgacatctataacaaccttgtgaataaggtaatcgacggctatgaggatgtttatccatgtattgtttctgaaagttattatgagataaagaatgtgaacacaatctccgaaacacataatattcttctgttaaatcctgtggtagttgacgccggctggttcaacagccttccaaaggaatatcaggatgccctgattgagacatgtgaccaggcatgcaattcctgttccgacaaaatgctgggcgaattcaccgaggaggcaaagcagaagtgtattgatgagggtatgactgtaattgaccattctgaaatcgacacagacgcattccgcgaggctgccaaggcgtcttacgaacagcttggcctgaccgatacctacaatgaaattatgagtgcacttggtaaataatcatcctgaaatgcagcttaatgaaaggtagaactgggaatgaaaaagttttttgagattctgaataaagcggagcttgcaattaccatgacctgtgttgtggggttcacatccgtgctgatgctgggagctgcggtacgcctgctgggacatccgctgaactggtgtaatgatgtggcactgctcatgttggcctggaccacctttctgggcggtgacgtggccttccgggcaggcagaatggtgaatgtggatatattgattgccaaactgccggtcaggttccaaaaggccgttgccgtcatggtatatgctgttttattggtaatgatgttcatgatggtaaaacaaggtgccctgctttgtgtgaatgtgggcaaaagaacgctggagggcattccctttctcagttacgtgtgggttgccgcctctattccggtaggtttctccctgatgtttataacggctgtcaaacgtctgtatgacctgatgatgtcatcagatacaaccgtcatttcaaaaatgtaaggagaacgacaatatgatatatgtttttatagtattccttattttcctggtaatgggtgtaccggttgcatttgcaatcggtgcgtccggtatggtattcttcctgttaaacacccattttccgctgacacacattgcgcagctgcctttaacccaggtccagagcatttccatgcttgccatccccctgttcatcctggccggcaaccttatgaataacggaggggttacaaaacgccttgtcagtcttgccacccttttaaccggacatatgaggggcgggcttgctcagaccagcgtggtcttaagcactctgatgggcggtgtgtctggttccgctacggcagatgcagccatggaagcccggcttctggggccggatatgattaaaagcggatattccaaggggttctctgcaaatgtccttacattcacctcactgattactgccacgattcctccgggggtgggtcttatcatatacggcactacaggcagtgtctccatcggaaagcttttttcagcaggtatctttgtgggcttatatatgatgattgttcttatggtatctgtggcagtcattgcccggatgcgtggttataaaccggtaaggcagaaccgggccacatggaaggaaatcggtatcaatctaaaggaaacggtttgggctgtcatgtttccggtcatccttttagttggtatcaggatgggattcttttccccatctgaagtcggggcctttgcctgcttctattctgtatttgtaggcgcctttatctataaggagctgaccatcaaatcctttataaccgctttaagagacagcatcgcggatatcggttctattatgatgattgtttctctgacagcattgtttggctacggcatacccattgataagatacctcagaaaatgaccacatttattaccggcatcaccaccaatccctccctggtgctaatccttattattatccttctggtatttgtggggatgtttatggaaggttccgtggtgatactgcttctgacaccaatccttcttcctatgtgccagtctgtgggaattgacccggtgcaccttggacttctcatgtgtgtcattgtaaccatgggagtaaacacaccgcctgtgggtatgagtatgtatacggttaatacaatcctggattgttccctgcaggagtatactaaatccatgattccattcctggctgcaattcttttagccattgggttgcttgcatttttgccggatgttgttttatttctgcctcgcctgttgtattaaaatggtttaaaacagaaaggaatgtatttgcatgaaaaatataagggattgttttgttttaaacaatggggttaagattccttgtgtgggctacggcacatggagaaccccggatggcattgatacggttcaggctgtcagggaagcaattggctgcggataccggcatattgatacagcccagctttatggaaatgaagaaagcgtcggaaagggtattaaggaatccggtcttaacagaagcgagctgtttgtcaccacgaagctgaagaatacggaccagggctacgacagtaccctcagggcattcgggggaagcatgaagcgcctgggattggattaccttgatctatatttaatccactggcctgtaccggctgtctttaaggatgactggaaacaggtcagcagggacacatggcgggcctttgaacgcctgtatggggaaggattggtccgttccatcgggctgagtaatttcctgccccaccatatagacaatattgaggtttcagcccatataaagccaagtgtggaccagctggaaatccatccattcttcacgcagaaagaaaccgctgcctactgccgcagaaaaggtatacaggttcaggcatggagccctctgggccatggaaccatcctggataatcctgttataaaggaaatcggactgaggtatcataagactgccgcgcagacagctctgcggtgggagctccagcaggatatcctgccgattcccaagtctctgaatccggaaagaatggcccagaacgcagatatattcgattttaacctgacacaggaggaatgcctgcggataacaggacttggagaaacaggaaggactggtcctgatcctgacaacattgatttttgatatgaaggttatggtttttacataatctctgcaagtatattagaaacaactccaaaagactggtattagcatgttttacactgcttttaccagtcttttaaattttaacaccaccactgaagatattcctagaattctctctttacctggctgtataaacagtaatatttactgtacggcaggatagacgtctgtatctctaactgatactatacctgaaactactcaaataacacttttaacaggatttacataacacatccccacattcaggccccatttcctcccattcgcggacaaattccacacatctctccattcaatgctataatggaaccatcagtactgagtacagcggcataccgggaaaccgcaccattctcactgaaaggagctgcacccatgaaccttaactggaaaaccattttaaaaaaggcaggtatcatcctgctgtccacactgctcttcgccctctgctccggccttctctacgttacaaagatggccggctccatcaatattacccggccggaggatgaaccagagctggcctccgccatgaccaatgaaaaccaggatacagagacccgggaaaagctgggcggatattggaccattgctgtctttggcgtggacagccgcaacggaaaactcggaaaagaaaataatgccgatgtacagatgctgtgctccatcaacagggatactggtgaagtacgccttgtatcattataccgcgacacatttctgatgaatgacaccgcaaacagcggatatggaaaactgaaccaatcctactttctgcagggaccatccggcaatatttctgccattaacacaaacctggatatgaaggtggaggatttcgtgtcctttaactggaacagcgcagcggatgccatcaaccttctgggcggcgtggacatagaactgtccaaggcggagttctattatatcaatgcttttatcacggagacagtgaacatcacaggaatcccctccacccatctggaaggacccggcatgcagcacctggacggcgttcaggctgttgcctatatgcgcctgaggcagatggacacagactttaagaggaccgaacggcagcgttctgttattgagcaggtatttgacaacgccaggaaggcagatatttccaccctgattcaggtattccatacagtggcgcctcaaatcatgaccagcataagcgaggaagagtttatggatattgcatataatataaaaaactatcacataaacggtacagccggatttccttttgaacagaccaccgcaagcctgggcaagacaggcagcgtggtcattcccagcaccctggaatccaatgtggaagaactgcaccgtttcctgtatgacgatgatgcctacacctgctccggtcaggtccgggacatcagcagagaaatcataaaaagggctgttaaaaattaaggagttatgagtatgatacgaattgctgtctgtgacgatgaaccctgctttacacagcagattagccatgtcatcgcaaaccatgccagggacatatccccgtccccggaaacagtgctttacaccaacagcggccagctgctttacgatgtggaggagggcgcccactttgaccttctgctgctggatattgaaatgcctgaaaaggatggaatgagcctggccgcgtccctgcgccgtcatcttcccttgtccctgattattttcatcacctcccacacccagtacgcggtaaaggcatatgaactgtctgttttccgctacatccccaagtccgagatggaaacctgcctgcctctggcacttaaggatgccagccgcattctgaaacaaagctcttcagatacctatattatcgaatcagccagaaggattcagaaactgtccgcggaggatatcatctatgtttataagcagcagaaatactctgtcatagccgcaaaaggcgcagagattcctgtacgcaagcccctggcccaggtgctggaggagctgaacaccttaacagccggaggcaccggcagttttctcttggtggagcggggatatatcgtgaacctgttccatgtggaaaaactggaggacgagcagatttacctggacaatggctctgtccttccggccagccggaaccgccttaaggaaacccgtgaagctataacaaggtattggaggaaaatgctatgactatgaaccactggtatcagtccatgtaccagatgtttgaacttgtttcagacttcattgaagcgtggctctgctatggctttgtggggctgttcctgccggaccgggtcaggggaaaggtgctgttttttattctgtccctggtgctggtgggttctgtccgggccatggatatactgggcatagaccctatgatatccactctttggtttgtattttatatctgtatgaccacggtggtactgttccaggtgaatctgttttatgcggtgtcccttgttagcttttatattctgtgcctgtacgtgatcaattatttctgcatgtccgtcatgggggtcattgccggcaaccgccagtttgcgcagtttatcctgaaccagctgtctctgctgcggtgtatttacctggctgcggataccgctcttttgtttttgttatatatgcttatcagatgcgcctttaagggggggctgctctacagcccgcggatgctgttcaccatttcccttctgggcattctgggcattaccttcctgtcagtggtcacccttcaggatatttccgtgattaccctgttcagctggagcctgtgccttgtcatggtgctgtgctttatttttctcctgctcttttattccaattacatgaaggaacatgagctcagaaatattcttgaactgaaggaccagatggtgcgccaggaatacgagatggtcaggcagcttcaacaggaacagcagtccctttcccatgacctgaagaaccaccttttagtcatggacaccctgctgaaggaaggaaaataccaggaggcccggaattatatcggccagctgggcattcccctggagcgcctggcaccctccatatggaccggcacctccaccctggatgtgcttttaaaccataccagaaaccgctgcatccagtctcatataacatttacggtacaggccgacgccgttgatttgcgccccatggaggaccaggatatatgcagtctctttgccaacctcctggacaatgcctatgaagccgcccattccatgcccgatggacagggctggattctctttaagatgagaaaggccagggaaatgctcttcttagatatttccaactcatcgcccgcacccccctgtgtcaaaaacggcgccctgatctcacgcaaacaggatggacggcttcacggtcttggacttaacagggcatctgccactgcgcaggaatacggcggccagcttacctatggatatgaaggcggtgtgttcacggtcagcataagtttcctgggaggagttaagggaaggggtttagaagagagaggttagaagagatggattagaagagatgggttaaaaaacagaatttccagaaaaggtcaaataaaaaatgaccctatttatataaggccattttttactctacaggtcgattctgaaatcgtctgaaccctcgccgtttaccacataataggctgcattctgttccggtgatatgtacagctccatagacttgattacggttcccggatgagtcttcgcatatgccttctccgcctgcgccagcacatcctttgcagctacctgcctgccgccgaactccactacaacactcttctcaatctccggttttacagtctctttcactgcttctttaaccacgggctcatctgcctttttaacatcttctgctgtcttaacctctgctgccttcttaacctctgctgtcctggtctgcgcggcgcctgtctgcgctgccgctgccgcagtcctctttggtcttgccatgttagttcctccctaatttcaatccgatttccagtgtcaatggggattatacggcagtcacctttttttgtcaatgtcgcggatatggaaaataaaccgctaaacaaaggcctttatggaaattttttgaacatatactgacacattgtcatatttctttatggcatttgtcacattccgattgggaaatcagtttccgggccctgtccgggaaccaggcaaaggctcctgatgacggaaccatggaaaattccatgatttttccggtggacggatgtggaaatgccaaccggcgggcacacagggccagaggccggtgtgcatccccaaagctgctttttttccttcctctgtccacagtcatggttgtggattttgtggataacccgcctccgtatcgttcatctccatacaagggagttgcatgtccggcaaattgcacccttatctggtggtgccttcctgtaagcagctctatatctattagggataatatctgctcctggtttttggggttgttgataacttccagaaccctgtaattaagaactgcttttttgctgttttcgtcggacttatccacaatctttgatgtgttgttttccttgcagtggcgcagataatccacatatgtcccctgtttatccacaggttttccacaaaccactgccaagtatgatttttttatttttccggcctgcaaagcggcgcttaatgatgctgcggatttctggttcagtgcgtataccatgattccctccaccggcttatccagtctgtggataacccccacataaggcggctgggctgtggatactccctgtggatggttgtggatatcctgtggattatgtagataacggcgtatctcacttaccatatcaggcgcaaagcctcttgacacctgggactccaatcccgcgggtttttgcactactataatatctttatcttcatataatattggtaccatacctcgacctcgcttatctgtctgtctcctgtacagacgattctaaaggaacgcttttgattataccatagttttgcctctgcccggttgattatattcagaaattagttttgcattcaaagtaattcttaaaaagtattgcatatttttggtcttaggtgtatagtatataatacaaacatatgtagtattcaaaactacattgcagggttttgattaaactgtactgtgtttttaataaaaggaggctggatactatgacagcaaaattaaaacgcgggattaccaaggttaaggatcccggcagcgcattgacccatttcattgctatgattctggctatcatcgcagccataccgctgctctcaaaggcaggacatgactccggacatatgcgcatcagcgcactggcaattttcattctgagcatgattggcctttatgcagccagcacgatataccataccctggatatctcccctaagattaataagctgctgcgcaagatagaccatatgatgatttttattttgatagcaggcacttatacgcctgtatgcatgattgtcctgggcgataaaaccggctggaccatgctgaccctggtgtggggcattgccattgtgggtatccttatcaacgctctgtggattacatgccccaagtggttttcatccctgatttacattgccatgggatgggtgtgcatactggctataaccaaaatattgagctccatgcccagggcaggcttcatgtggcttctggcaggcggtatcatctatacagcgggcggtattatttatgccatgaagcttccgttcttcaactcccgccacagatattttggttcccatgagattttccatctctttgttatgggcggaagcctctgccactatgtgatgatgtaccgctttgtggcataaggtttaattgagtataaatacagagaacactgcttctgatatgaaatcaatgatttcataccgcaagcagtgttcttttctcttatatgcagtttcggcagcagtctcaaggtcagcttgtcctctggaaacctgttttctttatcagatgttccttctctgccctgctcatatgtttaatggcatattccctgctcatggcttcctgttttgtctcaaatgcctcataataggacagcaccaccggacgtctgggtttggtatacttggcccctttaccctggttatggaccttcagacgcttgtccaggtcattggtccagccgcagtaaaacgtgccgtccgcacaggtgaggatataggtataattcatggatatccttcctctccggtaaataaactcctgacagcaataaaagggcgtccctttaagggagtgcccttcctgtttcattttatcagataatgccggctatgtaaacggtaataacgcttgcaacacgtcatcaccgcccaggttgccctgtaatctatgattaaagcaccagctggatgcgcggcacaaccagatagaaggtatttttctgaatcacatctataccttattatatcgcgcatacccttaaaatgtgcataaaacacatttaatattcctctaaaatcttctgcctccgcctccgtggctcctgccactgctggaccggtgggtggaacttcgccctgagcttcgtcctgaacccccggatgaatgattctgtgtgggccttggtataggggccgatgtaacaaatttgcgaatcagattatctcctgcgtccccaaaggcaaatttggcatctgcccggtaggccaaaaggctgttggctctctcccgcccggtgggctccatggaataacgccgcttcactcccatgcacaccgagcctgccaccccggctgacaccaggaatgcaaacactccctcgtaccagcgtatgcttctgtagatactgatttcccctgtttccgtgtcgtaattatactgtcccctttgtattcccctgtccacataatactccacatccttcaggaattcagctgccgcccctgcataatcacgggttttcagggaataagccacatcatcctgtatctgttcgattcgctggtctgtgagaatccgtatcatattaccggtggtggatacatagccctcacctccatagctgccgggtctgtccatataaatcagaaacagcacaccgctggcttttctgcccgttcccagtccgttctggtcgtaaaaatcatctgcatattcactggccgtatggctgccgtcattataagcagtgaccaccgccacatccatcccggtctttttcctgcaccgggcaatcagctcctccagctttcctgcttcctctgatgttatgagatccgcttcatcgaacagcctccgggcctccttatggttctggtccttatcataattcttgtccttttcataattcttgtccttattataggcctgagtcttgccatatgccccggattcctgtgcctgggaatccagtatgctgcctgccccgctccagactcccaggcacaccacggctgccgaaatcgccaggaacctgatccatctaaccattctgcgtcctgtcatcctaagaaataccctcctgtcataagtaataaaaacagcggaaggaacacagagaaaaagagaattataatcttcttcctgtccacaggcagctttccgcagatttttccggtctgcccgttgagagcgaaatagtatatctttcccctggccttgtcattatatgtaagggtccatacaggaagcagggcataactccacttctcatcccgtatgcctgcttcctttttgcgtacctgcatactgctgtagctcccggcctggtcctgaaggctttgacgggcaaactgcctgacctctgtctgcacgtccagcacaaactgttctttttccatatcccggttctcggccaggaatccggaaagataacccatggagaaatcctctttttcattcatcctgtatggaagcacactgtctaccagctgccggttggcctttctcaggccatttctggccacatggtccacctccatggttccctggcgttttacgtcgtataccgttgtctccgtatacctcatgcctgcggtatcccacgtcctgagcctggtcccctgggcgtccagctccccgtccacccggcagctgtaaagccaatacgggaaataaaccccgctcatactctcaatctgttttttattgtaaaatgtctccggcacatacttttttcttcctatccactgggaaaaaatctcctccgccttctgcctgtctatctggaagggtattacataatccggtctgaactgcccttccagccgtcctgccagcaccaccggattatggcagtaatagcagaaagtcgctgcagtggtttcgtccgtcacaatctgggctccgcagctggggcaggtataaagaaccggctgtgccccagcactgcccggttcccggcgctcctgttcccggctgtcctgtccctggagtcccggttcctggtgttccgctttcctgcgcaccagttcctgactcagacattccagttcctcctgggtaaaatcagacaggcagtattcgcagtggtatttctgtgaagacgggtcaaatacaaggcctccgtcacagttggggcatttgtaggttatggctgccatattctctctctcctgtaatcacagcatttagggccttggtttcccgcaatcgctgcagaattttcccgtattgatgtttccgcaggcacaggtccacggtgtatcgggacggggatggccgcactcaccgcagaacttacccgtattagaggtcccgcagccggggcaggtccatgcgctgcccggctgtgttccgggcatctgaccggccattcccgcgctgcccggctgcgttccggccatctggttgggcacagcccactggcttccggccggctggacgcccactggctggctggccatcggctgacctcccgccggctgacctcccatcggctgacttcccatcggctgacctcccgccggctggcctcccatcggctgattgcccgctggctgacctcccatcggatggcctcccatccccggcattccggtatttccgggcatctggcccggggcctggttcatctgcatctgctgcatgttggtgttggatgccgcgcccatgaagccgccgcccatctgcattcccatccccatgcccataaaaccggccatggctccgctgtcgttggaacctgcatttttaagcccctccgcaatggtagtctgcacatacccctccctgattgacggatcactcatcatagcgccccggttcctcaggttaatcaggttctgggattcctcgtcgtaggtaatgctggcaatacccactgcctgtatctccatgccccgcatccgggtccattcctcatccagcgtctgagccatatactgtcccagctcccggctcctggatgtgacgtaggatatcctggtgccgtctgctgacatctggttgatggatgtctgcaaagcctccaggaactccgacaggtactgctcattgatggagtctatttccacatggtctgcattctttggaatgacctcagcgtaaaatttaatggggtctgtcactttgatggaatacgttccatgggccctcaggaacagctctgcattgtaaaagttgtcaaaataattcactgggttgcgggtgccgaatttaattccctttatctcctgaaggttgacataatataccttctgagcccccggtgtcacgccaccgaaacggatacggttaaatgactccttcaaagcctctccaaactgcccgttaaacatggagggcatggaggaatggctgaccttgtagtagccttcctccgccgtataatccactatttttccgccgtccaccagcatcataaactggttgggatacacatggatgacggaaccgtctgacacaatatcagatgaaccctttgtattagatccctttcccctgcgcacctggacgccccggacaaagacggttctgtcccccatatcatccggctctacggcctccagccactggtctgccagggctcctcccactgctgtggtaactgctttaatgattcccatgattaatcccctttcttagctgccttcttctgtctgcgcctgcgcttaaccggctccactgccttgatggccacccaaatcataagcgctgctatggacagctgaatcacaatgctgatgataatccagttctccatcacaaaaccagtggactgcataccaaaatatcccgccatcttggctgtgggcgcgctgcctcccatctgtccgtttatgattgtataaaatgtagccgcaggattaataagcagcagataaatcacatttcctgatgatggtttgaccacattttccccgaacccataagccaccactgaattatttatattcatggaggacagggagagcgaaaacttatttatgaagtatgtcccggccaccacggctatcagcactccgtaagtaactaccgtggatatggttgaccgcttgaacagggctgagaaacagattcccaggcttcccgcaaaaaaggccactgttatatagcacataagaagggacaggatgtcctgccaggtgattcctccatagacaaataccatggccactgccgggaaactggacacaatcagcaaaagcagcgtgctcagcgcgctcatcagcttcccaattaccacctgtgacgccgtcatctgggtggtgagcatcagttccagggtctgcctctcacgctccccgcttatgctggccgctgtcacggccggcactatgaacatcagcagtataaactcaatggtggtgacaaactcatacatatccataaagctgctgtactggataactgctgtggactctacctgggccacagcggaatacatgttgagcagtgtgaccatggacaggattccgttgaacagcacgataatgaggggcagccggatacttctggaactgaccttcatctcccggctatagaccggattttgcatcataagacaacaccaccctttcctcttcatgttctgtcagctgcataaatacggattccaggcttcccttttcccgggtgaatccgttaaccagcacatcgctgtcaatgagctgctggagcagcagggcctcgtcctgggcatcacctgcaaaccgtacgcatatatcctgctcccgcagggatatggtctgcacgcagggatggctcttaagaatggacagcgccttgtctatgttggtgaacacagatataaccagcgggttggaggtattgaccctggacaggatatcgtctatatttccctccagcaccatccttccctggtctatgattcctatatccgtacagagctcggacaactcagacaggacatgggaactgattactatggttttgcccgactcctggagctcttttaatatctccctgaactcaaaacgggtcctgggatccagacctgaagtgggttcatccagtataaggatggccggatcgtgaatcagggccctggccaggcacagcctctgcttcatacccctggacagtccgtccacaaagaaatccagcttatcctccagccccacctgctccagcagggccgtatatcgtttccttgccaccagaccgtttatgtggtggcaggccgcaaagaattccatgtattccgacacggtcaggttatcgtaaaccccgaaaaaatcaggtacatagccaatcatggacttcagctttcccaggtcaaaacgggcgttcatgccgtttatggtaatcctgccttcctctgcctccaggagtcctgtcatgattttaatggtagtggtctttccggctccgttgggccccacaaacccatagagggcgccggtctccaccgtcatgtccaggccgcttaatgcgtggtattttccgtatatcttgtgtaatcctcttatctccagcattatttactccttcctgtgacagtcagtatgggcagcatgatattccaggtgtaatcgcctgtggcatcgtacacatacttgatggtcagggtgttgcccggagacaggtatggctccagatcttccctgtcataggactggacatgggtatccatggaatcataagtgccggtattgtaattatagaaatacatattgccggcaaagggcaccgtgtaataataccgcatgctctgcaccacctcatcgctcatctggtggaaggacagcttctccacctcgatgtcatttcccagataatactctaacataaccggagtcaggccgtacatgctgttgttggactcgtaatactcgccggacagcacattgggctgcttctggagcgcggacctgtatatcatgccatcctgttcatagttgacatcaatagaggatgtaagcagggtggaaccatacgtctcataattggaggactttaaaaattctgtctcctccttctcattgctgaatcccagtaccctggcctctgaatggtagcctgacagatagctgcccatatagaaggacaggaggttggtcctctccaatgcctgcacataagccgcatcccgtatatccttatcctccttatagcgggaagcccctgtaatctgctctgccatggcatagccaaaattagtgattccgtatatgaccttcatgccgtccaggcttacagtctcacccggctccatgtggccaatgagaatcatctgattatacagaagtatggccacattgtccacttcctggctgtagttgttggtcagggttcccgtcaccttaccgtcaaaggaatttacatcgcctgtaaatccctcctgctgtccgttttccgtgcggcgctccatcataaagaacttggagttgaacgcgcccacattgtcggacctgagcctggttccctcctcgccgtaatgtatggttatggacggcgtctcctcacccgtaaatttgggcagaggccccatattgtagtaagcgcttcccgtaatggggtacagggtgtattccggattcaaagttacggagtacggtttattatagggagcccgcatgttgatgaatgtggtttccgaaatctcatccctgtccgtatcctttatggttgcataggtaaagaaggggcctgtgaacctggtgctcatccccatgagaaggaccatgccggtacagcacagagacagaatccccacagacagctggtaatactggcgcatccccctctgtttccagaagaagtagaggccgggtccggccagggccacataggccactgccagggtcacatacagccccacctttggaaggttattgatgttgcctgtattaatcagtccctggactgaccagaactggctggatgtgctgccgtccatggcgctggccagcccgtttatcttatcttcacccagaagggtggtaaacagattgtcaatataagagatattggcctggcagaattcctctatgtccacgaaatcatacatggccacggctaccagtccgctgccagctgaaaccgatgagaggacggacagctcatcgctgcccagcacctcggtgccgcctttcagcatgacatccgtgcaaaccagggggatggaggcgccttccggccggtccaccgcgtattccacacccatgttgatgacccgttcatccggttggggaagaggctgctccagaagttcctttccaaagcccctcagggtatcctctcctctttccccggttcctatgagcagaacgccgcctttgcggacccactcccacacagcctctatctgctgacctgacagttttccggaatcaaaatccgttatcagcagcacatccagctggtccagtcccagttccgatgccggcagagtggatgccgtcatctcgatggtcttggttctgagggtactgtagttaatgcccacgccgttaaaatacagaagctccgccggactgtcactgagcacaccgataaaaagctctgctgtctccaggttcaggttcagcttcaggcgtttgcttaccacctcatccccattctcatccagcaggcgcacatacatctggtccacccttgcccccagcgatatgctcactgatttgttcacgtttccgccgggttcaatttcaaccggatactcataccggtatacatcataatccaggttcatgttatatccctggaagtccgactccatggccaggatacacagggttccattaaacacctggccggactggctggacagctcgattttaaggggcaggaaacggccgcttttcgcagtattctggtaaccgtagaccacgtccatggccaccggtgattccacggtttcctccttggcagccgtgctgtccgtccccaaggcctgggctcccagggactggaccgtgacagacgctgccagcattaagccaaaaagggtgcttttcagcgccctttttattttctctggaaatatccgcatgttacacttcctcatcctatattctccgttcaagtcagctaatggttccaaaattctctttattgatatcaaaattcacctgaagctttaccgtgaacacggtgccgtccaaatcgctggtcacattgatggttcccccatgcatgtccactatttcctttgcaatggcaagtcccaggcccgtgccccccgtactgctggaacgggactgttccacccggtaaaacttgttgaatatcagaggcagctcctccggcggtatgacataaccgtaatttgtaatggagaccgtcaccacatcctcctgggccagtatctttaccaggactctttttccgtcggcgccatacttgatggcattgccaatcaggttatcgaacagacgggcaagcagattgccgtcagctgttatgatttttaccggtacattgctctgcagatcatatgacaggttcttttccacaaagttcgggtatgcctcctccagaagctgtcccagcagttttaccacatccagctgggatacatgcatggatatcctgccataattgagcttggtaaacccaaacagatcttcaatcagcttttccagtcgccgcgcctttccatatgcaatctctatgtacttgtgctgcatctgcgccggtatcttactgttgccggccaacagctccaggtatccgatgatggatgtaaggggtgtgcgcaggtcgtgggccacattggttatgagctcgtttttggtgcgctccgattccctctccttatccatcagttcccgtatatcctccaccatcttgttaaggttggcagccatactggagaactcgtcatccccaatcacatcaatggtggtgttcagattgccttctgatatgctctgaaccgcatctgatatattgctgatatagcggatatagggttcctgcagaatcataaacgtcaccgcgaacagcaccagcccggataccacatagaccagcaccaccgccacatggtaatccagcacagcctgaagcaggcggttcatacgtccagactcttccatgtatctggcgatcatggacacgttggtcaccagaaatatttccaccagacaggaaatgacagcgctgtacagaatgttggtaacaacccgggtatggtagcgcctgctcatatcacttttcaattttgtaacctactccccacactgtggtgatgattttattctgtctggtgtcctctttcatcttacctctcaggcgtctaatatgtaccatgaccgtattgttggcctcatataccttttcattccacaccttctcgaatatctcgtcggtgctgaataccttgcccgggttggaagccagcaggtacaggatatcaaactcaatgggggtgagcttgatttcctcatcgtccacgattactttatgattatccttattaatggtcattcccttaatggtaatctcgttattggccttttccttggaagcgctgtttgggtttaactgggtgtaacggcgcagctgtgatttgaccctggctgtcagttccagcgggttaaagggtttcaccacataatcgtccgcccctgttcccagccctaatatcttgtctaaatccgtggacttggcgctgagcatgataatcggaatgttgttggtttcccttatcttcttgcacatctccaggccgttcatccccggcatcataatatccaacagtaccaggtgtacctcttctttggaaataatttccagccccttggcagcattctccgccttaaacactttataaccgtcacttacaagataaatctcaatcaaatccgcaatctctttttcatcatctactaccaggatatttatatcgggcatgatgtcccctcctcatatgttaacttatatgacctattctaacataatatatcaaggttttccttacttttttcttgaaatattgtgggaatttctgttacaatgcaccggacctccctataatggtaatatcttctttcatttgtatacattaaataaaaatagactgaaaaatagatttttttgcaaatatttgtgttctgtcacaatggaaaaagaagtaaattatgatataattatttcataaatattataaaaattttataaacttttaggaggtgaggatcatcaagatagtgactgtcatggacaatctggccggagagcaaaaagccatgaaggcagaacacggattgtccttttatgtggaaacaggagatatgcgcatcctctttgatttcggagcaggcagacacgccctggaaaatgccctgaggctgggaatccggccggaacaggccgacattgcagtgggaagccacgggcactatgaccatgctgcgggttacagggattttgtggcggcaggtctcagctgtcccctggttacgggaaacggtttttttgaagaaaagtatgcaaggaacggcctgaaggcaacctatctgggaactggttttgacagcctgtttctggaggagcacggtatccggcatatggtgtgcgattctgtccttcccattggcaaggactgctgggttatgggcggtataacacggtcccatgactttgagacggtcccggaacgttttgtgatacgggacaaagacgggtggaagcaggattattttcaggatgaggtctgtcttgtactggaggacaaaggtgaactggtggtaatcgtgggctgcagccatccgggcatactcaacatcctggatacagtaagtaagcgcttttcccagcccatacgtgccgtggtgggagggacccacctggtggaggctgaccgggagcgcatacatatgaccctgcgtaccatgaaggacctgggcatcggacttctgggctttaaccactgctccggggaacttctgcaaagcatgatggctgaacatccggaactgaacaccgtgtatctgggcgctggcgactgcctgttcctctgatacccgatgcacttttaatttttttgataccatcggggatgtatctcacggcaggaggaatgtatgctagaattttccagtatggcacaggatttcgtggaggccacatcctccctggtgggaggacgcaccatcaatatcatggaccgggaaggtaccattatcgcctccacggaacaggaacgcatcggtaccttccaccagggcgcggctgaggtcattgccacgggaaaaccggttcttattgagacaaaggatctgccccggtatcccggagcaaaggagggctataacatgcccatctttctgaaggacgaactgattggagtggtgggcatcttcggatgcgaggagcagatgctgaacgtggccaatcttctgaaggtctatgtgacacagcattttgcccagcaggccatggcccagaaacagaacgtggaatctgaggtcagaaaccgccttctgagcctgctgcttctgggagacatcgggcagatggaaaccatttaccagctgtccgccctgattccggtccagctggcatttcctgtaaaggtcattatgatacgggcaggcaagcggaaaaataccagggagcagatgaaccattacacccagctcttccagaacatgatgtggcagggcaccctggaccgctcaagagatgtgttcggcatccagaacaatgactgcatcatcattcacagtgctcccagacatgggaaagcggacgaagatctggacaaaatcatagcccaggtggtccgggaggaggggctctgtattgctgtcagcggcgcctgcccacggctggaggacattccgggcggtatgaaggaatccaacaccctgatttccatggagggcgggccggtccgtaatctggaggacagtcaggtcaaaattcagtatctgatttacaagtccctgattcacggcggtacgaagtacgcggaaatgctgtaccggaagctgacagccagccaggatgccaggcaggccgaggtccttctggtgactgccagggtatattaccaggagaacggcagtgtgcagaaggcatccgagcggcttcatcttcacaaaaacacccttctttacaggatgaaacggctgttccagctgctggacctggaaaatgagactccctttaccagggaattcctgattcgtctgattttcatgtatcatccggtagatgatatcacctaaacatatttgaggaggttttacaatgtcaggtttatttatattcttagtcatatttctggccgtagtatgtatggtattggccatatccaagtttaaccagcaccccttcatcgtacttacggttatagccattgctgtgggcctggtttgcggaattcccacagaggaagtcatcaacacggtaaaaagcggtttcggaaacatactggccagcatcggtattgtaattctggcaggaaccatcatcggaaccattcttgaaaaaacaggtgctgccctgaccatggccaacaccatccttaaaatggtcggaaaaaagaacagcgtcctgaccatggccatcacaggctatgtgacaggtatccctgtattctgcgactccggctttgtcatcttaagccctatatcaagggccctggccagccagagcaatgtatccctggccgttatggccactgccctgtcaggcggtttatatgcaacccactgtctggttccccccactcccggccccattgccatggcaggtaccctggaagccgatctggggctgaccatactggtaggacttctggtatccataccagccaccctgtcggcgctcatctatgccaagaaggtatccagcaaaattgatattcccgccaaccctgagtacacagtggatgagctgcttcagaaatacggcaagctgcccggcgctcttcacagcttttcaccaatcctgcttcccatcgtactgattgcacttaaatccgtaggtgatttcccaagcgcaccctttggagacggggttgtaaaaatgttcttctccttcatcggtaatcctgttattgccctgattttaggcgtgttcctggccatgaccctggttccggctgctgagaagaaaaataccttgtcctggattacagaaggtgtcaccaattccgccggcatcctggccatcaccggcgcaggcggcgcgtttggagccattcttcagaaacttcctattgcagatgccctgagcgcttcccttctgggccttggcgtaggcgtattccttcccttcatcattgcggccctgttaaagacagccatgggcgcttccaccgtggccatgattaccacctccgctatgattgccccgctgatgcctgccctgggattcacctccccgctggcaaaggtactcgtcatcatggccattggcgccggttccatgaccgtgtcccatgccaatgattcctacttctgggtggtatcccagttttccgatatggagacaaaggatgcttataagtgccagaccggcatgaccggagttatgggtatcgtaactattatagttgtatttctgctttcgctggtgtttgtgcattaatcaggatgcaaatttgttacatgttgtaaaaagaatccccaggccggcccggggattctttttaattttgtttccactgtttttgtttccgttgtagctgcttttaattctttgcgtgggccaatggctcacctttaaaataccgctcaatatcctccacaataatatccagagaaatggctgccagattactgcagttccccgcccggtgaggcgtcagggtaacattgtccagccccagaatgggatgtccttggggaatgggttccacggaaaagacatccagccctgccccgccaatcctgtgttcggccagcgcatccaccaaggcatcctcatccaccagccccgcgcgggctgtattgataaaaaatgccgtgggtttcatcatgtttatatgctccctggtcaccagcccctgggtatctttagtcaggcgggcatgaatacttatataatcagaagtcttcatcagttcgtccagggatacgctcctgcagtttgtatctttgaaaacctcaggcctgcagaatgggtcataggcgattatgctgcagccaaacgcctggagctttgccgccaccctctgcccaataattccatagcccacaagtcctacggttgcgccctttaaacttttaatataggaagaattaggcgcgtctgtcatccactcaccgccatggtccgtaatactcatcctggcaatgtttctggattccgcaagaatcagtccaacagtgtaatcggaaacagggtctgccagacggcccggtgccaccgctacctttaccccctgctctgtggctgccccgatatttatgttctcagctccgcttctggtaactcctatcatcttaaggtttttacctgccttaataactgccgaacccaccggggcgaaattggcaatgatgacctctgcctcctctgcctcctttaagaactccggatttacttcaaagggctccggccctgtcttttccaccttggacgcatactccacaaacatggaacggtcccagtctttctggtcctgtacataaacggtttcagcgccgtaagcctccagacgttttaacacggcctgggcgtccggcgacattactttcggataggtcaaggatgaatctgtcagcataattacttttctcttactcatatgtcatttcctttccggattatttctcatatccaatcaatcgtcttacttcttctattgtctctgcctccaatacctttgcggcggtctgccttgcatcttgaagccgcatatcccgtatgcgcttttttatcctgggaatacttgaggcggtcatactgaactcatccagcccaaaccctgccagcagctcagctgctctttcatccccggcaaattcaccgcacataccaacaggctttccctttgcatgggcagcatcaatcaccctttttatatttctgagcacagcgggatgaagtggattataccggtccgcgattttcacattccccctgtctactgctaatgtatactggcataagtcgttggttccgatagagaaaaagtccacatagtttgccaatacgtctgacatggcaacagcagcaggtgtctctaccatgattccaacctgtatatccgggttgaattttgtcccttcagaccgcagctcacccttgcaggcttcaagtatttcattggcctgcaaaagttcttcctttgaaattatcatgggatacattattttaagattgccgaaggcgcttgcgcgcagaatggcgcgaagctgtgtctttaaaacatcaacctgatccagacagatccggattgcgcgccagcccaaaaatggattttcttcatgttcaaatgtgaaatacggaagtgccttgtctcctccaatatccagtgtgcggataatgacaggcttgtcccccatcttctccgctaccactttgtaagctgtaaactgttcctcctccgtgggaaaatgagaattttccatatacaggaattccgttctgtaaagcccgattccctctgcgccataattcagtatcctgtctgcatctgatggatttcctatgttggcgcacagttcaaaaaaagcatggtcctttgtcatggccggctcgtccttaagctgggccagcagctgttttccggccagatactcctcctgcttctgtttataggactcaatctgccccttatccgggttaatgatgattgtgccctccagagcgtccagtatcacccactcttcatccttaagttcttccatcatggatccgattcccaccaccgcaggaatctccagggacctggatatgatggctgtatgggacgttctgcctccctgctctgtcatgaaacccagggtctttgaaaaatccatggacatggtctcagagggggccaggtcttttgctgcaatgatacatggatagggaagtctgcttacatccagggatgctctgccaagaagatagtccataatctgaccgcccacatccctgacatcagccccacgctccctgagatattcatcgtccagcgcagcaaacagcgcctctatctcatccagtgtcagcttaagagcctgctccacattcattctttcgtcccgtatacggtcctttacgccgtcctctatcatagggtcctcaaccaccgataaatgggctgcaaaaatttcagcttcactttcatttaatttatatttggtggactcatacagcgcctgcacatgacaggacaccttctcaagggcttccgtaaaacggctgatttcattctctatatcttcttcacaaattgtgtatgcttctactgcacgttcctcttttttcagctttaatacacggccaatggcaattccatctgaaacaggaataccggacaattttttcattgcggtcctcccccagattactctgtcaattcagccagatacgtgacaaccgcctcgagagcctcttcttcgtcctcgccgtcagcgcggaccagcacctgggctccctggttcaaatccagagtcagcacattgatgatgctttttgcgtttgcagttttattctccttaatcaggctaatcctgcttgcatatttctttaccaaattcacaagcccattggccggcctggcgtgcaagcctgttttatttacaattgtaacatttttttctaccatgtccaaacctccgttttttaacgtattatacggtccagacgaaactatactccacaatatctgttctgaaaaatactttcgtgtattttacaaccttcccgctcttatcatagaccttactgcgtatggacagatggggtgcattggatgtaaggtttaatatttccttttgttccttcgtaggaaccttggccttcaatgtctgcatagaatatgcaatcttcaccccaaattgggtttccatgatttctatgagagacttggtttccatctcccagggattgattccctcaaagatccacgatggcagataatttacttcctcggcaaagggaacctggtccgcaagccttattctgtgaatgacaatcaccaaatcctcaggatcgcatccaaaaatacttgccaagcgtgaaccgcagctctctgttgtcattgaaagaatcttggagccgggagtgtaaccggctgccaccaaatcatcataaaggctgaatcccttatgggatgtaacgctctcccgcagctttgccacgaaatatcccctgtttggctggcgttccaccagctttgtttcaaccagcgcgttcagggcattgcgtaccgtaaccctgcttacctgatatgtcctactcagtgtgttttctgtcggcagcttatcaccgggagcaagtatgccctcctcaattttagccttgatatcggaaacaatctgataatacaaaggcattgaaacattgagattcttcaacgatatacccccctcccaaattttcgcataataattaattatattatattggtggaacgagatacaatcaacaattattttgcaaaaatacctgccttcctatgatatgacgggtgttttagagcattgttccgccggaacagtctatagctgcccctataatctgcgatgagcagtccgaacacaggaacgcagccacacgcccaatctcaatgggcagggtaaattttcctgtggggagcagcgcccgcattcgttctgtcctcgcgtccccatccggatatgtacgctctgtctgtacatatccgggtactattccgttgacccggataccgtagggagccatttcattggcaacgcccttggtaagcccgtatgctcccattttggcgctgatatatgtggtattatccttgctgtttgtggtaaacgcagacttggacaatacattgactatgctgccgggccgttcattgtcccggcagtattttacaaatttacggctcatgaagaactggctgttaagggtaatttcctgtaccgacctccagtcctctgtggtgagctggtggaacggcttgcggattgctcctctgcctgcgttattaatcagaatatccactctgccgaaatgctccaacgcagcctgaaaaatcatatcaatctggttttcatcactgacatccgcgttcagctccagtacatccaccccatattgcttcaccagcccatccatataggctctggtgtcctcgtcatgggcaaggtcggcaattgccaggctgcagccttcctgagcaaggaccgtgctgcagccttttccgattccccgtccgcctccggtcacaatcgccacttttccttttaaacctaaatccatggtgcctccttactgtctattcccctaatccaatcttgtgcattttctccatatattcactaagatccattatcatatccctgcagacagaggctgcctgtgccgccagctcctttccgcacatctcatcacggtctgataatacctctatcagcattggcatgctgactcccgcgaccccgtataaacatctagtacgggctgcctttgcaagagatttaaagggtgtccctcccataatatccacacatacaaaaacgttcccgtcataagaatcaatcagccggttcagctgttcctcataagcttccgggtccattccctcctcaagcgggagactctcaagtctggtaacatctccgaataccatcttgaccgagttaaccagttccctgcagaaaaatccatgggaaatgaccagtattgcgggtacctgctgttccatatattctcctttctgtgactttccccacattctatgccttaccgcactgattaaacagtttcatataatgaagcagttttgccttgtatccgtctgtcatcagctgatatccaagatgggcccttttaatctcgccgtgacgggccagcagattatcaatccccgcctggaacaggtctgttcctatattaactttcgtgattcccattcttgtggccctggccaggttctcatctcctgaacctgaacctccgtgaagtaccaggggtatctccacctcattataaattttttccagcagctcaaaatccagatacggtgttcccacatattttccatgggcagtgccgattgcaattgccagggcatctattccggttgcctccacataggcctttgcctgttccggatcggtcagccctgcgttgcggtccgcgtcatactgctctccgcttcccacatgtcctaattccgcttccacactgactccaacggcatgggcaattttaaccagttccgcaacctccgccacattctcctcgtagggaaggcttgaacggtccaccatgatggacgaaaaaccggacctcagtgcaatcatggcatgctcaaagcacccgccgtggtccaggttcagcgccacgggaaccgatgcctttcgggccagctttccgcatatatgggcaaataagggtatatcgggatttacattaaagattacatccagaatcaggggagcacggttttcctcagccacctctatagctgccctggcagtatcctcattgcatatatttggagccacaaccccatatctgccttcccttgacttctttaaaatatcgcacatattaactaacataattaactcctccgttttgaggggacgggaaagagatgcggattcaggcatcccctacctgtcccataataaatgccgtcttacacaatacccaggaatgcgccaacaagacaggccaccagcgtaatgataatcagccttaaatacttaccgcctttttcaaagtaagaatacacacccatcatcaggacaaacggaagcagtccgggaagaatgccgtccagcttttcctgaatggaaatcgcaccgcccagggtctcacttgcaatggaaagcgccaggttcagcttacagtagctggatcccatggctcccagcatgaacatccccataacgccggcgccggccatgagcttcttcatccagccgcctctgagcagggctatcagagaacgtttgcccatcttatatcccaggtcaaaggaccagatacttgccagacatgcgctgaaacggataaatggctccatgagaagtgcggccagtacggaaccgcctaacgcaaatgggataaatacagtcctcactacaggcgcataggtagaccagagcagggaatcaccaaatcccgcaaagggacccatcagggatgatttaagggtaatcacatcgtcgccgtcaattccttccgatccggctgcaatttcttcttccatggccagggcagcacccatgatacagttgcccagggacatttcagatatatacggaagcaggtggcggtcaattgcttctttcagttcttcatccttccccttatacagctttcgcagggcaggcatcatggcatagcccacgcccgtaccatacatagcttccaggctgttgccaaacctgtgtcccagcatgactctccacgcggtccggtgacagtcccgctttgtaagggcgccctcgaaacctccttttttcttaaaaatagacatatcaaagggttcctcaccttcctgtttcggataggccagttggacatatacaattgccaagataatgccaaacacagctgcaaccagggtggtgaatccaaatattttcatggagaaaaagcccagggcaaagaaaggaaggaaattctttttcccaataaaagtcgcgcaaagtacaagtccaaatcccggaaggataccgcctaccacggacagaccggtaagcagccactggggtacaacgtcaaggatagctgtagttcccctgctgacgcccagcatgatggcaaaaacaatagggacacgtactatgaactgtgtcaggaacggataaatcgtgccgtccatggagatacccttaaagttaagtgcctgcgcatccctgtgggccttacggttccagtagccgtttaccattcttctcgcattgtccataaatgtaccaagaataccaaaaggagttgccagaagaaccgcggttgccgggtccaggcctgatgtcaatgcaatcggtatggccacacaggctgccagtgaatcatctgccggcatgttggcgccaacagcagcgattgatatgtacataatattaatagtcgcgccgataatcgtacccgtaaccacatccccaaaaacaagcccgaacagtacaccgtttaagcaagggttcattaacgccctgcccaggttgcccaaatcacagtttatgacccaataccataccgctatcaaaaagcaacttaaaactgataattccattctttcccctccatcacattttgtaaatcgttatcccttcagattcattatttctttgtcttcatcatgccttcagcttcttatatgcggcttcaaattcaaccagtttatcctccggcgtgggatggaaatacacccttaccccatccccattcagtcctttaagagcatccagctccgcctcgctcagatggcaggtgttgtttgcgtggtacggcctgtcgggcattttgggtacctgcccaatgttgatggatgtgtagttcagcccttggtcatagcatcgtttggctgtgtcgatattctggaaaataatgatggtattctgttccccgtatccatcctttttccattcctccagtgccttggcctcattcattacctgaaccgtgacaccctgaggggctgccagaagcagcagctctgtgagaaaatcatcagccgccgacttattgtcaaccacaacaatcttcttggcctggagaaccttggtccagcgcactgctacctgaccgtgaatcagcctggcatcaacccttgtcattactacattactcattaaatattgcacctccttaaacaattttttgtatatttttgttttatttgtatgtctataccataaagcatgtgattcaatttgtcaatatatatttttataaattgattgctttttatattgacaaaagaaacaaattagatacaatataaatagaatcaacgatagacaaacaaaatacaataggaggttatacatggatttaggccataaaggaaagacagtcatcatatccggcggttccaaagggatcggtgccggaatcagtgaagtgtttgcacaggaaggcgccaaccttgtcatcaattaccaccgtaataaagaatcctgcctggaatttgccggctacctgtcagaacgctatggaatcagaacagcaactgttcagggtgatgtgggaaaggaagaagatgtagccgccatatttgactgcgccactcagaacttcggccggattgacattctcgtcaacaatgcaggcaggggcgtctccaaaaaatttaccgatatcacactggaggattggaatcagtgtttaaatgacaatctcaccggacagttccttatgtcaagagagtttgcgcgcagggtaatacctgctaagagaaaaggatggattgtaaacatactctcaaaagcatcctgcacctccaccacaaaggggcgtgtctgctatgtatgcaacaaatccggggaaacaggactgactcactccctggctgtggacctgactgaatatggaatacatgtcaacggcgtcatgccgggctttgtgatggctaatacattaaaaacacagtatgagtcaaaccgcgctgaattcaaccagcgggtggaaagggttcccttaaaacgggtaggggagccatgggaaatcggtaccatggtggcgtttctggccagtgacaaatgtgagctggctgtggggacatgcgtggatatgaccggcggcctgctgctgggatattaagtcaggagcactattatgaatccggacaaaaaattggtttttattgaccttgacggaaccttgttggataacagccgcaaaatatcagcccacagcttaagaacgataaaaaaactggagcaatccggcagtattccctgcattgcgtcgggacgcccggcgtccatggtccggctctatacccacgaacttggtctgaatacgccacttatatctaacaacgcggctaatatcagcctggccggaaccatactgcgccagacctgccttcccgctgaagcgggatgggaatttctgaaatactgttttttccatcacctggactgggcggtgttttacacagatgccatctacaccgcagacaaccccacgcggcttaaaaggtataaagattataacacggagctggtaaaggccggttttcctccggtccccattacagttattcgttccccggatcgggcccgtccccttctggaatcaaaagcagaacggctgtcgctgctgattcattcacagcaggaacgcagactgattctgtcttattttgaacacaccggctctctctcctgcatccgttccactcctgattcttttgacattgtacatcccgaggtggacaaatggtccggcatccggttcattgcggactattatggtatgtccatggaccagatctatgtatttggaaatgacaggaatgacttaaagatgattcggaactgtcccaattcatttgttgtggcaaacggagaaccggaagtgcgaaactgcgccgcccatatcatcggaagaaatgatgaggatggagtggccagggcaattgagcaatacttattattttaatatatagggaaaggagtttttatgaacaattttatgttttacagtcccacccgcttcatattcgggaagggcgaagaaatgaatgtggggaactatatttcccaatacggtgcccgcaaggtgatggtgcttcattacggtactgactttgagtttgagacatccttaatcaacaaaatctttgcatctcttgaccaggctggaattccttatgtggattttaagggaatcaagcccaatcctaccattgagaccggtgacagaggcgttgcggtggttaaggaagaacatgtggattttctgcttgcggtaggaggcggcagcgtgattgacaccgccaaatacataggcgtggcagctctgacggaagagaatgtatgggatgagtattttcttaagaaaacaccggttggcgcaacactgccggttggcgcccttcctaccattgcaggaaccggaagcgagggttccttcagctgtgtcatgacgaagggagtgttaaaacgttccctgaatgatgacaaaatccgccctgtttttgcccttatgaatcctgaattaagctatacccttcctgcgtttcaaaccgcgtgcggagccgttgatatcatggcccatgtccatgaacggtatttcacgcggggggaggacaactatctgaccgacaatctgggtgaaagtatcttccgcacagttatcaagtaccttcccatcgcccttagggaacctgaaaattacaacgccagggcgcagcttctctgggccagtgtattggcccataatgacagctgcggcgtggggcgcgtcactgagggcacggtccacggcattcagtcagagattggcggcatgtatgacagtgcccacggcgccggggtagcctgtgtgacaccgggatggatgaaatatgtgtacaaggcggatccccgccgttttgcccgctactttaaccaggtgtgggaaatggagtacgatacctatgacgtggaaggcatgatactggagggaatcgaacgccagaagcagttttatgtatccgtgggcatccctgtgcattacagcgaactgggcgtgaaggaggaagatataccaaccctgtgctccactgtccgccggggaccagacggcatggccggcaacttcatgaaactcagcaccgatgacctgattaacatttacaagctcttcaaataactcaagaccacatggagcgggtttgacaaaaacctgcccatgctttaaaataaaggaggaaaatcatgtcacttgtaaccttaaaagaaattcttgcacctgctaatgaaaagaactatgcggtagccgcctttgataccatggacttcaccctgacagaaggtatcattgaggcagccgaacagaccggccttcctgtcattctgatgcttccgggatttgcctttgaccgccaggaggccgatgcgttcctggatttcaacctcagcaggattaaaaaggccaaagctcccatctgctatcacctggaccacggcgcttccattgaagaatgctaccgcgccatccatgccggctgttcctctgtcatgtttgatggttccaagctacccctggaagagaatatcgagaagaccaggcaggtggtcaaggttgcccatgcctgcggagtcagcgtggaagccgaaatcggccatgtagctgccccggaaggcagcgttgagggcagcgttgccaaggaggacctgttcacccggccagaggatgcggttacatttgtggaggcgaccggaattgatgcattggccattgcctttggaacggtccacggagtttataagggcaaacccaatcttgattttgagcgccttgccagtatcaagagcatggtggatgttccccttgtcatgcacggaggaagcggacttcctgaaagtgatttcaggaaagcagtggcaggcggaatcaacaaaatcaacttctttaccggcatgtctctggcaaccattgcctccatgcgcaaaatgattgatgaaacggacggccgctgccgttatgtaaatctttttgacacagcgttaaatacagtaattgacattgccaaggaacaaatggaaatctttggtacacaacccatgtaagaatatggatgataaggaatagggattatatgaaaacagcttccaatggttcgcttcccctgtattctcagattgtacaggacatccggaataagatattaaacggaacatataaatacaacgaaaggcttcctaacgagaagtggctctgcaatttatacgacatcagccgtaccaccctgcgcaaatccattgatgagctgattgccgagggacttttggaacgccactccaacaaaggggtctatgtggtctattccaaatttgacaccggattcgaccggccttacagcctgtttcaggagatggtcaaatccggaataaagcccagctctaaaattctgtccttttctcgaatcaacgcggacagtaagctgagccgcgccttaaactgcgaggtgaacacaccgctgctggaaatcctgcgtctcaggtacgcggacgacgtaccttttaatattcagcagctctatctgattgaatccttttttcctcaattcaatccgtggctgctgacggaccattccctgtacgaaatcatggaatccgattaccagataaaaattgtcaaaacagtacaggtcgtaaccacaggctccgtctcaaaaaaccagtcggaactcttaaaggttcctatccgtacgcctctgctccacaccaccagtaccatctattcatccaccggcgatattgtggaataccagcagaacgacatactgaccaatgtaattccttattcatacaaagtgcaaagaccataattagaagaatccatcaaaaacaccgcatcagcgtacatgatatggcgccggtgcggtgttatcttatctgtcaatccattttattatccatggtctcttctgtattttgggcggcctgcggcaaacatccgtacaggaggcctccccggctcctgaaacagtccgtgtcaaaaacttcccggtttgcaatgttgggaggcagctgtccgctcagatagagagtcagagcctggtatagtttctccgactgatatacaattctctccccactgaccccggcaagatggggtgtcagcagaagacgctcctccggaatcgtgtacagcaccgaatcttccggcaggggttcctggtcaaatacgtcgagagctgccttgattcttccctcttttagcgcatcttccagcgcctgggtgtccaccagggctgccctggcagtattgatcagacaggcgttctgtttcatccttcccagcagcttcctgtttatcatatgtcttgtttcatctgtaacacgcgccattaataccacaaaatcagatacagaaaataactcttccaatgttgccaaatcaatctgtaatatatctgagcgccttttatccacataagggtcataccccaccacatgcatctgaaaggcacggcatctggcagccagtcccataccgtttctacccagtcccacgattcccactgtttttcccgacatttccgcagaggactcgttgattcttctaagcctcaggtcattcttctttgtccacttttccatcctgaaaacatgggatgcctgcaacaccggtttcgccatcatcatcattgccagaaatgtaaattctggcaccgaacgttcacagcgcccgctgctgaataataccggtatccccagcctggtgcatgcccggatatcaatattctcctccggtccgtcccgtacgctcagtataagctttaaatcaggacattgatacagtacttcctccgacagtttttcgtaaccagatatatggatatcatatccctgcagggcttttatgatttgttccttgcccatccgcttatcagggtccttatccaggctgaaaccaaccctgtcaatttccaccagttttccgaaacgctctgtccatccatcatcaaattccgccgtacacagtaaacgcaacatatttgtccctccttctatatatcatcttaaattattgtattacttttgtcaatttaaatgttctattttgttgcttttaatctttgtttaagatataatataaatacaatttagcaaaggaggatttacaaatgcgctacaaggaatttggaagtaccggtttggagttatcggaaatatcggtaggaacctgggccctgggaggaaaggatatgggacccgtggatgagaaggatgcaattgaggccatacataccatgatagactgcggtgtcaacttcattgacacggcgcctacttatggaagaggggcctcagagacaattgtgggcaaggctctggcatccggaaaacgcagtcaggttacactgctgacaaaatgcgggatccgttgggaggaaggaccgaagaattttaagaagggcgctatccgtgacagcagccatgacagcatcataaaacagattgacgagtccctgatgcgtctgcagacagactatattgatatctacctgattcactggcccgatgtaaatacacccctggaagaaactgccgatacgttgaaagaactaaaaaaagcaggcaaaatacgcttctccggcatttccaattttgaagataataatcttgaaaaattatatgacctggacgttcttgatgtgatccagtttccgtattccatggttaacagaagtcaggaacaattgttaaagaaatatcatgagaaaggcgttgctaccatgggttatggctcccttggggcgggtatccttaccggttccatccgggagcttccccactttgaacccggtgatgcccgtctgggattctacgatttctttgtggagccaaaattctccagagtcatggagctgcttgaggtactggatgatattgccctgaaacgtcaggtaccggttgcacaggtaaccatcaactggaccgtacagcataacttcatcaacacatctctgaccggtgtcagaaatgccagagaggctgttgagaatacagctgccatggcatggaagctgactgcagatgagatacataaaattgaccaggctgttgcgcagttggattccctgtcataagctgatgaatcattaaaaagaaagaatccccaggccggcccggggattctttcttacacgattctatcttgaatgtttttcctggaacgtttctttccggaacattccctaattgctgctcataaccggcttaaagaccctgctcctggccgggtcctcctgatctgcggactccttagccataagaatggcctcccggcagaactgctcctgggaattgaccaggacctttcccctcttgtcttccttctcgtagctgccgtccggctgaagaatatgggcctttacattgtcctccagctccacttccagaatatggatgaccttttcccttaatacctcgtcctcaacagggaacatgatttccacccggcggtctaagttcctgggcatccagtccgcgctgcccatgtatacctcaggacttgcgtcattaaagaaataaaagatacggctgtgctccaggaagtttcccacaatggaacgcacggaaatattctcgctgagtccaggtacgcctgccttgaggcagcagatacccctgataatcatttccaccttcacgcctgcgcaggacgcctcatacagagctgtgataatttccttgtcacaaagtgaattcatcttggccataatatgggcgggccttccttccctggcatgttcagcctccctgcgtatcatgcgcaggaaccgtcccctgagccagagaggggccacagacagcttattccaggccaggggctcggaataacctgacagcatattgaatacagctgtggcgtcctcccctatctggggattgcaggtaagtatgccgcagtccgtgtaaagctttgctgtggaatcattgtaattgccggtgcccagatgtacatagcggcggattccatcttcctccatccgtaccaccagggtaatcttgctgtgggtcttaaggcccaccaggccatatattacatggcaccctgccttctcaagcatctttgcccagttgatattgttttcttcgtcaaaacgggctttcagctccaccagaaccgacacctgctttccattgtccgctgcctccgccaaagccgcaataatgggagagtttccgctgacacggtacagggtctgcttgatggccaggaccgactggtcccgtgcagcgctgcgaacaaagttcaccaccggatcaaaactctgatatggatggtgaagcaggatatcgcccttcctgatattggtgaatatatcgtcttcattcataagggccggcacgggctggggcacatacctgggtgccttgaagagttcaaagccttccagtccatacatcttcatgagaaacgtcaggtccagagggccgttgatttcaaaaatatcctggctgtttatggacagttccctgcggatgattttaaggagacgcttatccacattgtcctcgatttccagacggatggcctcgccccactggcgtttcttaagctgcttctggatttcctccagcaggtccaccgcctcctcctcatctatggtaaggtcggcatttctcatgatgcggaagggatgagaagccacaatgtcataattgaggaacaacgagggcatgttccgctctatgatttcctccagcaggataaccaccctgcgctccttgccgtcctcatctatttccctgggaagctccacaattctggaaatcaccgagggaacctgcaccatggcaaattccagctcctcatcctctccgctctttttcctcaaaagcgcagcgatattcagcgtcttgttccgtatcagcgggaagggtctggatgaatcaaaggccatgggcgtcagaacaggatatacattcttcctaaaatactcgtccgtatatgccgcctcttcttccgtcatatcctcatgctctgtaatcatgcgcagcccattctgtctcagggttggcaccagggaacggttgtaggttgaatactgcatctccaccagctcatgggtcctctcgctgattcggtccagctgttcctggggcgtcagaccggcaatatcgggcttggtgtactttgcatgtaccatgtcctttaaggaggccaccctgaccatataaaactcgtccagattggaggcggttatgctcaggaatttaagacgttcaaaaaggggaatgctcttgtccctggactcgctgagcacacggtagttgaattccagccagctcagctcacggttaacataattcgtcgggtccgctgcaaaatccacagggactgcttccggcctgacagcggcatttgccttagccccagtctgtgccttagctccggcacttattttagccccgctgttcgccttcaccgtatcgtctgccttaacccctgcgttttccctggatgagccgctctttgccgaagcagcccttgaggtatcggttttttccgctctgtttttctctactttcgctttttctgtcttggatttagatgcctgaggctttccagctgattctgccatatctacaccctccttttctgtctgagtatcggccttatgccaaatatctcttcaaagaaatccgccttctgttcaaaggatgcggcttccaacgccatattccccggataaccggtggtgattaccagttcattttcccggatagccatgcggcagtccaccagctttcccctgtggctgcggtccatggaattggccagacgcaggatggccgtcagcttggcaataaggatggtgatggcgttgcggctcattcctatatcctcctcctgatgcacctgggtctccagctgtaccttgtcataatcgaaatcacggatattataccgcaccacattggcaatgatctcccgctccagatggctcaggccgatgatttccgtggacatgataatgttataggagcattcgttggaattctttatgcttataaactttccgcaggcatggagcagcaccgcaatctgcagcatcagccgttcccgctgccccagtccgtggaatttcttcatgttgtcaaagatacacagggcatactgttccagcacctggttatggctggtgtggcacttatagcgcttcgcaatgttcctggacgcagccagtatatcgttctcaaagttatggctgaatttcactagcttgttctcgctggcatattctgctgcaatgccgtcacagaggcggatgccgggcacccagaacatctcggccccggtcagctccagaatccgtttgtataccaccacacttggcaggagcagggacgcatactcgctgtttaccccgaatcgctcctcgatctgatccgttgtcatctggcacatgcgctcgtagaaacggttcatcgtggccgcgtcaaccttatccccgtaggtattcaggtccagcctgttgataatataaagaatattctcaccgatgccaatgaggtttgtgatttccctgtccttcagatacatcttccggaaggtgaacagttcattgtccacaatctcctctatatgctgcttgtgctcttccacagtggccggtatcctggctaacagcccccttacgcgaagggtgcccaggggcaggttctgagtggtcaccagagaatccttgtcaaaaagagacagctgcgcgcttccgaatcccacatccacgatggcggtccccttctggataattttattaaattctgctgccttggcagctatggccttataactgatgaaccgctgctctgaattactgataatgcgcaccgtaagccctgtcctcacccggatctggtccaggataatctggcggttgtgcgcctccctcatggcactggttgcatatgccctgtagtcctttaccttataggacttcataatctggacaaattcctccagtacctggcacatctcctccaccagctcatagcttatcttacctgtgctgtaggtgtctttaccaagagctattacatggcgtacgtggtcaatacgccggattcctgtcttataggtcatctcatagatacccagctccagctcaaatgaacccacatcaatcgccgcaaatgtccgaactgccacttttctcaactccttatcggtcccttataggttgactcatggttattatatacggcctcctcccatcatacatcgaaaggcggtaaaaactatgtaaaatttacgtaaaagaagtcccgcacagaacctactgccttgccttcagatgggttatgaactgcgcagccgttcttcccgacaaacctccgtggctcagttcccacttgttggcctcggcaaaaagctcctgctccggcatatccaggccatggcgatccgccagcgcctttacaatggtctcaaactgtctcttatccggtgagccgtaatagatggtgacaccgaaccgtgctgccagggacagcttttcctgcaccgtatcgttgttgtggagctcgtcgtccagctcccgcttgtcgctgaacttctcacgtataaggtgccggcggttggaggttgcatagatgagcacgttgccaggacgcttgcccagccctccctccagaatcgccttcagatacttatactcaagctcataatcttcaaatgacaggtcatccatataaataatgaacttgtagtttctgtctttaatctgctccagcacatcggacagcgccttaaactggtgcttatatacctcaatgatgcgcagacccctgccataatattcattgagcaccgccttgacgctggaggacttgcctgttcccgcgtctccgaagagaagtacattgttggcttcctttccctccacgaaggcttctgtgttctctatgagtttctgcttctgaagttcatagccaactatatccttaaaatatatgtgctccacattgataatggggtcgatgataacaggctggccttcctccctctcgatgatgcggaatgctttattgagcccgaattttcccacgccgaattccctgtagaaatccaccacatggtcctggaactcccctgcatccgcagattcctccagctgtactgccaggtttacaatcctgtttctgacccggcggttaaatacacggctgtccttcctggccggtttatagtcttccatcagggcccacagtccggagggttccaggtttcgtatatcgtaatcaaacagggccttgaagatccggcagtcctccctggccagctcatccagggaaccgcccgccggtcctgttatctcacatgtggtagtgtatgcattttcattgtttgccagacagaaggccaggaaacaatgccagaggtttccctcaaatccgtacttaacagccagctccgtcagtcgtcccccgcaggacgcaccgtcaggctcctgcccgccctgtgcgtatcccatcagatgggctatatcacgaaacagctcctggtgctccaggtttctatatattactaaatctttgatatccatgaccttcctgcctccctaataatttcccagaatcctcatgctgaccgcttcctcggagattcccaacagtgcgttgcggattgccgggtcgcccagcgagccctccacatccacaaagaaccggtattcccagctgcgtccctctatggggcgggattctatcatcagcatgttcacatcgttataaataaagtttcccagcatattatacagggagccgctcttatgtaaaccttcaaagcagatgcttacctttcccgcatccttcctgtacatgggtttcctggcaacgataatgaacctggtggtattgttcttattgttgttgatggaggcctccagaaccttaaggccgtaaagtgctcctgccgtgggactggctaccgctgcctgggatacttccccctcttccagtactttcttggctgccccggctgtattctccacacttatctggctccactgcctgtgggcgcccagataccctgaacactgcatcagtccctggggatgggaatatacacgcctgatatcctccagggaggcctccggcaggcctaaaagcgcgtggtccactgccacctttgtctctgccacaatgtatatgtcatgcttcagcagattatcgtaattgtcaatcacggcccctgccagggaattctcgatgggaagaactccataatcagcccttccctcctccacctctatcatggcatcctcaaagaccggaacatggtatacatcagcatcttccccaaaatactggagggctgccctgtggctgtaggccccctccactccctggtagacaatgcgcgcaccttccctcttcagctcgtccaccatggtaaatccggtatcaccgcccttgccatgctccgccaaaaggcggtactgcagcctgcggctgatggtcataatctgtgagaagagctcatgcactcccttccggttgaattcactgtgggccatggcggccactgcggccagcttctgcttttcccgctgtccgtcgtatacagcctttcccgttccaatcttaaattccgccacctggccgcaaagctccatccgcttttcaaacaattccaccagcctggtatctatctcatccagctggcctctgatttcctgtaaatccagattctccatggttatttatcctgctcctgttcttccttcatctctttcagcataccctctatcacatcccttgtatatgcccctggaaacttgcgtttttcagccggaagctccttgatatagataggttccccgtagcgtatgcacacatggctgggctttacgaagggcaggtgctgttcaaatatctctgccgtacccgtgatggccaccggtataacaggacatccgcttttctgcgcaatcttcagacttccctcatggaacggcagaagctgagtcagctcctggttctcattgcgggttccctccgggaatatccatatggatacgccggatttcaccttctcgatgccttccaggatggtctttaagccctcctttatatccacgcggtccaggaagagacaattgaccctctgcatccaggtgcgcagaaggggtatctttaacatttccttcttagccacaaacccggtcagccccggaaccgtcatataacccaccagtatgtcaaagtagctcctgtggttgcctacatagaggacagccctgtctgacggtatgttctccagccccttcacctcgtatgtaacgcctgccagcttcaatataaaacggaacaccccctgaatctttccaagactcactttctggactcccacagggtccgttttggccctgaacctgagtacggccagtaacggcacggaaaaaatcaggtataatatgacagtcatggccaccaatataatacgtatcattgccttctcctttatacatccttatttatatgtcaagaaatgtttattttccattatatcaaaaaggacggcttaaatacaataccctgcaaccaggtttgtcatttaatcgccgcccttgggctttgtgagatattcaaacaggagacctgtcataaaccagagtggtgcgaacttgagccgtatgaccccgcccacattatcgggccacagggagtagtcccatggacagattcctatactggtaagccatataccggttatatattccgcaataaaaatcagaaccatataaatcagtccgtgccgtatggaccggccaacacggctgagcctgtcctgacctgcgtcctccagtcccggaagaccggtaagccagctgtctatgaaccggcttatgggaagcaggagagctcccatgccatagatgggaaacatgataagggaggtacggcctataagccgccagtccccggccatgatggagtccactgaggtaaacatgacctccagacaccatcctgcgattccgcatctgcaaaagttaagaaataattcgtatattttattttcgtggttgatttgtcctgtctgcgctctcatagccattagtatgagcctgtgcagctgccttctattcgcagacagctgcttttccagaactttccgtgttcccggggcagggatttaccaagctgcggggattttccctctgaagggtttcggcatccccgggaatcctctacaacagcggcgacaaaaggcggctggactgttcctttatgcgcatccacagattcctgtccgcatactcttccctggtgatttcccggcagtggggcaggtcattcataaaggcctcctccagctggcccgtgacttcctcgtcataaatggtggcattgacctcaaagttcagttcaaaacttcgtatatccatgttggctgttccatagcagctcacccttccgtctatcataatgcccttggagtgaaggaagccgttttcatacacgtaaaccctggccccatagtccagaagctctcctgcataggaacaggtagcccagtacacaaagggatggtccggtttgcagggaatcatcagccgcacatccacacctgaaagggccgcaatcttaaggctggaaaatatggcgtcatccggtatgaagtagggagtctgtatatagatatggtgctttgccttgtgaaacagctccaggtaattattccgtatatggggctccctggtatccggtccgctggtaataatctgcatgcagaccatctcgtttacatggtccgggtccggccacacagcatgaatctggccgttcagccggcgtctggcatactctgcctcctccccaaagtagcggatttccttaaacaggttctcccctgtcacgtagttccagtccagcgcaaaacggatctgcagactgatggctgcctccccctttatttccagatgggtatcacgccagtagccaaacttggggtcccgcgatatatattcacggcctatgttaaagccacccacaaaccctgtgttgccgtccaccaccacgattttccggtggtttcggtaatttaccctcaggttaagccatcccaggaagggaggaaagaatacccccaccttgatccccgcactgcgcatctggtcccagcgcttcttcggcatgaagcggccgcccatgccgtcgcacaggattctcacttccacgccttccctcaccttatccagaagaatggggacaatggagtcaaacagctcatcgttcttgatgatatagtactgtatgtggataaacctgcgggcctggcgcagggcatttctcagggcctcaaatttagcctgcccgtccgtgtatatctgcacctggttgttcaccgtaagcacagaccccgatgtctccagattatagataatcaggctcttaaaatctctggacatggggtccatcatttcctccggcatgtcgtcggagcgtatgatgtcttcctggcttttgaccggcaggttcagcctgtcgctgacttccttcacccggaacatcctgctcttcttcatatcctggccaaagagcaggtaaaagacgattccgaacaccgggatgaagtacagggccagaagccaggtccagacactcctggggtccctgcgctgaaaaaatatgataataattgaaaatgccagattgatatacagcaggtggtccagcagccatccccataccgtcagtaccgtactccagattaattccattttacagcctctctcctaatctgatgcttccgttatattcccatcctcgtcaatattcagtttcacggtgcagtaccggttttcatatttcaggacctgcaggcggcctgtggccagatccgcctccacagagacgattctggctcccttctgcccaccggatatatagtcctttaacggcccgtcggaattgctgagatccaggcccattagcctgagaagcattcctccggtcagcttacccttttccttctcgtcattcagataacgctggaccgcgtccacgcaaatccgggcctctgtctgtgcggttgcctcatgggcagcgtttatatagttcatcatattaggcaccgcgatacacaaaagtatggacaggattgcaaccaccgcaatcagttccaccagagtaaacgcacaatttccctttttcttcatgtcctttttcctcatatcttatgcttcccgccttaagcctccgataatggctcattgtaccacatataggatttaatttccagactcaatcctgccctccccggtatcgccgtcataaacggctttatacgttttgccgtttatctggccttcccagtaggcgctgttcttatctttatcaaaatggtattcctctttctcagattcctttatgacacccgcgtccagcatgtcctgctgtgcctttcccagtgtataattggatctggcattggatatggctacctgctccgctgatttgtcctggattccccggtaggaaggcactgctatggccaccagtattcccagtatggcaatgacacagattaattccaccagcgtaaatccttccgttctcttctttccctttttcatatgtatactcattatcatgactcctcttttcttttgtacgtttgcagctccctactggacggaatacagtattttctcagcctcctccatatcggtttctccgtcggcagccatcctcaggacatggtcccttagaggcatggagcctttcttttcctggtatttgcggatggatgaaaggggctcattatcaagtatcatggccttaatctgttcatccacatccattatctcatagaccgctgtcctcccggtatatcccgtacccccgcaaagaggacagcccgcagacctccacagcctgtctggaatatgtctcccccgctccgcaaatatcctttgctcccgctcgtccggctcgtagggctgacggcagttgggacagagcagctttaccagtctctgggctatgattccggacagggaagccgctgccatataaggaggaactcccatattgcggagtctgtgaatggtggaagcgcagtcattggtatgaagggtggacaggaccagatgtcctgtgatggctgccctgactccgatggccactgtctcctcatccctcatttcgcctaccatgatcacgtccgggtcctgtcttaagatggatcgcagggcagacgcaaatgtaaggccggctttggaattgacctgaacctgggtaattccgtccataactttctcagccggatcctccactgtaactatgttgatcttctttttcaccatccggtttatggcagcgtacagggtggttgtctttccgcttccagtgggacctgtcaccaggaccataccgtgaggcgccttaaggatatgctcaaatacaatcctctgttcttcctccattcccagacgccttatatccatcagcgagttattcctgtcatttcccaaaagcctgagaactgctttctctccataaatggagggaagggtggagattctcaggtccgtggacacctcaccccgctcataatgatattttccatcctgcggaagacgcttttccgcaatgtccataccggccatcagcttaagcctggttatcatgggacggtgatattccattttaagcgtagtatggaccattaggtccccgttgattctgatgcggatgaccagatcattctttcccggctccacatgaatgtcactggcatttttatggaaggcctcctctatgaccgtattgaccatgcgtaccacaggagcgctttccacccgttccatgaaggccagctctgaaacagaggcttccgcagccgcgccaactcccacaccgggcctctccattgaaacatatggattctctccgtatacgtgctccggtgcggaaccataggcctttttaagcgcctgcttcagttccttctccggcgccagcactgccctgaccttcataccggacagggtttccacctcatccagcacatcgggagacaccggataggctgccgccactataagacactcttcctcaaaactcatgggaagaatccggtttctcacggcaaaggacggctcaatcacggccgctgacttacgatcagccttgagagggccaaaaggcgccacctccatatggtccctggcagctgcacaggtcagcagtgctgcttctgtaacataaccgaactctgtcagtatttcctcaatggagcattccggccttccctgcttaagacgcatggcgcggtccagctggctccgggtcagatatccactgtcaatcaacaggttttctataggtattttatctggcactgttgtctcctctcccttccatatggtatactttcgccaggcagcagtttatgacggaagcgaggtaataccatggtttttatctattttgtattatacggactgttaggcgcagtgacaggcagctttctgaatgtctgtatcctgcgcatacctgcaaaccagaattttgtaaccgggcgttcccactgtccggcatgcggccatgtactggccttttacgatatggttcctgttctgtcctggttatttctaaagggccggtgccggtattgcagggcccctgtttccattcagtatccggctgtggagcttctcactacatctgcctttctcctgtgtctcctggcaaaagggccaggtatggagtcagcccttatgtgtatgttttccagtattcttattacagctgcatttatagacgcacggcacatgtacatacctgacggcatccatatcctgattcttattctgtcctgtatctcactggcagccggatccggacccgccattattaaccggctgggcggctcccttctggcaggcggtttcctggctcttgtaaatctgcttagccggggaggcgttggctggggcgacgtaaagctctttgctgccagcggtctgctgattggcgcagctcctgcaataacggcccttctgatgggctatgtcgcagcaggcctttggtatgcagttcctcttgtgcggggaagggttggccgaaagacgcagatacctatggccccgttttttgcagtgtccctgatggtatgcggtctttggttcagacagctgttcctgtggtatctgggttttttccggtaatggaccacacccgtttcatttctcatggtcagctgccttcataatagcggtatacaccgtttccattcagataaacttttacttccgggtcatcccctctgctggaacggtacggtttgccaatgaccatcacggatccgtcccggtcatcaaatacaatgtccgccatcatggaaaagctgtacccgctgctctctaccctggtgcggaccgtggccagggatttaaggggatgcgctgtcaatgtaatgtcaattgttgttgtgctgtctgttatgttactgtctgtagtaaaaccgtctgccgcaggggcatccgccgcaccatcatctgtgccgccggaatcctctgaacatccctttccgcggaccacatatttcttgttccccaatgcatggtacagataccgttcccagcgaagttcttcctctgcatccgttgtatccgtgtcctcctccgaagaaaaggattctgccttaagttccccatcttccccttcctcagcctcttcttcgtccatcattgcatcaaattcttccctgaccctgtcgcagtcttcctggaaattctgccagatcagattcatggccggggactccccactgcttactgcctcgcagaaggagcggtgaatggtcttggcggagagctgggcctccatatagcgcctgtttttcagggcagctttcatattgtaccgggaaatagccatatatccgctggacagcacagctaaaagcgtcatgagcagtaccacatacatcaggctgcttccacgggtatgcccattattttttcttactgttcttctcctgcccatcatgtcccgccttcccaatccatggtataaccatacatggaaccgatggccgtcttctgctcatatataacatccccgtccttcttcacctttatgctcactttggcccgcgtattctttgttccgctaaaatccagctctaattccataccgcccagttccgccacttctaattcctcggcggagatactcggccagtcctccaccggcggcagttcttcataatatgacctgccctccttaatatccggaatcttctctctgtcccttacatagtacgatatcacacctgtatcttggtaatcgcagaaaaatacatagccgtacctcagcttttcctccagaccgcgatacgcctcgctgcacatggcctttgcctgggaaagccggtccagctcataatacagcttcatctgcggatggatgaaaccggaaataaatacagccaggaccgcggcaatggccagcgcagccactgtctcaatcaatgtaaatcctccgttgttcttccctgtcctgcttcctttcgccatattccccgcctttatctgtgcctgtaaaatgtcatatggttgcctgtatcctcctccgattcagtgatttcatactgttcaaatatttcccggactccgttctcttcttccaggccaaactccactgcaatggtttctcccgtaggctctccctccccttcgccggccaaggcgctgaggttataattagactgttccaatctctgctccccggacagctggcctgcattggcagccgtcatcatcagaaaccctgtacagacaactgccaggagggcagttgataccacaatctcaatcagagtaaaccctcctctggatgacctgttaaccgatttcttcataataatacctgacctccacgattcccttcattccctgatacgtttcctgtccatcctctccgctctcatacacagcttccacatccataaagcttaccaaaacacttttctgttccctgtatatttcatctgcaaacgtcatcacaccctttgggtccggacattctatttccatggtaatgactgattcctttaccgtcctgccggctggcccgctttccacggccggcttcccgctttcctccgggtcatcgctttgcgcgtcataggtttgcgtgtcataggaaatttctgccgcagcagctccgcctatactcatgcggcgtatgcttacccctgccctggctgccatgtcctgcaggctcctgtccataaaaatatcatcaatatcccggtagaagaaatcctctgtattccttaaacgctcccattcctttaacttctgttccagttcctcataatggctcaggtaaaattccatttcctccctttcctgattcccgctttccatcagctccatggacttccggtatccggcgcggcacggccagataaatacttccagcgccacagcccagataatgatggtgaacaatacacctatgagaaaccgctccctgctactgagcttcatcctgtcctcccattcccagagttccgtaaacagttgcgtatatccgctctgtctccctgtcctctgcgctcttttcccacaggctgtgtcctacctgcctgaaaatcccggaatgttccaccctctccacgtaggccggtacatcctcagaacgatccatggacaccaccatctgaaggtaaggcccctcgccgtcaaaggaaatggattcaattctcatctccggattcatggcctctgtaaatgccctgaattcattcatgcccagctgattctttccggccaacagcgccttctctgtccgtgttttctccctgtcaaccgacatttcacctattctttcttccatctccatggatttacggacacgggtcttatactccgctccttccatcgcatactctgtcctggccagcgctttccctgccgcatggtccatataggccgcgtgaaaggacaatcccgccgccgccaatccgttggcaagcaggaataaagcccagcctctggtcataaacggcccgcggcccagaatagagttctttccatcctcatatccccgttcctccagttccagagcctttctctttccctccagggaaccagccacacaaactgccagacatacggcgtccactggttccggcattctgacactgcagggtatcttaaaccgtccggacatatattcagccgctgcctgtgcgtcaggaatacaggatgtcatgagtaccatacaatccgggacaggaacatctgacgccgcagtacagtcctgtatcagctcctccacctgctccgccatctcttcacagagcatgtccactgctccctcccgcagaaaacagccggccttcaggcctgtcatacggcatgccagacaatgtccgcctgacaacacataaaagcccatgctggcctggttcacatccagcagaagaacccgctcttccctccatagctccctggccataatggccatacagtcaggcaggaccaggacacggccgcatatcatcttcccgtcctccacggccttcttatacgcatccagactgcgctgttccatatagtaggcagtaacatccgccattgtcctgccggttttcgccctcagatccagggctgctgcatggtttccaaaatccgggtccagcagggacatctcattgactgccattcttttcatggcgttctttcctgcctttggaatggcaaagctcatcatcctgacatcccgtccagctatcagattgacacgtttcccctccatgccgtatttttcagcaagacgcgtcagggccgatgccacatcaggcaccggctccacgaattcccactccactatttccaggcagcggcgaagcccggaacccgcacaccgtttaaacctgccgcggacataacatatcctgtcctcttccaaacatatgtaatattccattttctacctcttacagcattgacgagtacatgttaaatacaggcatcatgatggccatgaccacactgcctaccaccagggcaagtatgagaatcatggctggctccagaagggcaatcatctggttgactgccctggctgcctccttttcataaaaacttcccgcatcctccagcaccatatccaatgcgcctgattcctctcctgctgccaccatagagatgagcaccggctggaacagattcagctcatccaacgcctgggacagcatcacgcctccttttaagctctccgcaacctggaccagtcccttctccacatatgagtttcccatgacccgccctacggtgtgcatggcatccagaattccaattccgcttccgtaaagcacggcaaaggcagatgcaaagcgggatgtatatacggtgcttaaaagttttcctattattggagtatacagcacagcccggtctgcctgcagccggacaaaaggacatgttagaatccccttgaacagggccatcaataccagaataagcataatgtagagaaccccgcggctgcggaggctgaaactgagcctcatcatcatccgggtaatccagggcagctcctgctcctgcaacatggaggcaaactgcggaagaaccgtggtcagcataaatacggcggctaacacggtaatagaaaacaatatgaccggatacgtcatggccgcccgcaccttgccatttaattcttcctctcggccgtagtaccccgccatcttatggagaagttcatccagccttccgctggactcgcccgtgcgcgtcatataaaccagcagattaggaaatactcccttcatctcctccatggcttctgacaaggtacgtcccttgtgtatgctctccctgagtccggcaagcgtcaccttaagggtcttatccctggcagaccccgcgctcacctccagagctctggacagcggcactccggctgtcagcatggctgctaactgcctgcacagcagaggaagctgtctctgattcagctttgccggacgcgctgagggtgtccgctccagcgagctgtattcataacaatagagtcccctggatttaagtatgacgaaaagagcccggccgctgtctgccttctcggttccacagtgaactcttccatcttcacttttcgccctgtatctgtaacgcggcatggttcccctccccctttccatatggcattcatatgtacaaaaccggctttatctgatataagtcagacaaagccggccgcaaaacacttatatatgattttattaacggaaactattctgagtcggctcatattggtagccaataccagacagtacagatataattctggacttatccgcatccaattcctggcacatctcgtccaaagaactataattgtcacggagctgcgtatttacataactcagcaaaataactgggtctttcggaatggtactcacaatttttacctgctttctattacctcatattgattaaatccacatcaaataccctatatctagttctattccggctataggtacaccggctttcagcagaaacgattatatcacctgcaagtaacgttttcaacatgaaattagggtattttccctacttttttcgtcatccccagaagttgatgtaattatatttcttcattagaaattttctgaaaaatacctcctaatttatggaaaaaagcaagggagagaacctgtttgcgcagattcgctccctcacctgtatcttcatatatatttatctaacatcattccacatatgcaatcagccgtgttttgtcctcgtccacatctatgacaatggtgcttccttccctgactccgtcacccagtataattctcgctgccagggtctccacattcttctggagataacgtttcaggggacgggcaccataggccggatcatatcccttatccgttacgaattccttggctcccattgtcagctctatggtcagttccctgtcggccagacgtttattcaggtctgccacacagagatccacaattcttgcgatatccattctggttaagggcttaaagagtatggtttcatccagacggtttaagaactccggtctgaaatgggcgcgaagctcatctataaccatattttccacctggggtctgatgtttccgttctcatcaattccttccagcagatactgggaaccgatgttggaggtgaggataatgatggtattcttaaagtccacggtcctgccctgggaatccgtgatacgtccatcatccaggacctgcaaaagtacgttaaacacgtccggatgggccttctccacttcgtcaaacagcaccacgctgtatggtttgcggcgcacggcctctgtcagctgtcctccctcgtcgtatccaacgtatcctggaggcgctccgataagacgcgacacggaatgcttctccatgtactcgctcatatcaatccgaattatgttggactcgtcgtcaaacaacgcctcggcaagggctttggccagctccgtcttacctacaccggtaggccccaggaacaggaaggatccaattggcttggtggggtccttgatgcctgccttggaacggatgatggactgggttaccagctgcacgccttcatcctggcccaccacacgtttgtgaagaacctcatccagatgcagggtcttgcttctctcactttctgtcagcttggcaaccggtattccggtccatttggatacgattcttgcaatctcatcctctgaaacgctctccctcacaaggcttaagtcctcattgcggatgcgttcctcttccgcctgcagctccttctgaagctccggcagtctgccatactgcagctccgccgctttattcaggtcatacttctgctgtgcgtcctgaatctccctgtttacactctctatctcttccctgagggacgaaagacggtccacactggccttttcattctcccactgggcttttttggacgcgaactcatcgtgaagctcagccagctctttctggagatccgccaggcggtcctggctcagacggtctgtttccttcttaagggctgcttcctctatctccatctgcatgattttcctggacatctcatccagctccgcaggcatggtatccatctcagtcttaatcatggcgcaggcttcatccaccaggtcaatggccttatcaggcaggaaacggtcggtaatataccggtcggacagggtggctgcactcaccagagcagagtctgttatcttcactccatggaatacttcatagcgctccttaagtcccctcagtatggagatagtatcctccaccgtgggttcatccaccatcaccggctggaatcttcgttccagcgcagcgtccttctctatatactggcggtactcattgagtgtggtggcgccgatacagtgaagctctcccctggccagcatgggctttagcatattgcccgcgtccattgacccctctgtcttacctgcccccacaatggtatgcagctcatcaataaacaaaataatctgcccgtcgctcttttttacctcttccagcacagccttcagccgttcctcaaattcacccctgtacttggctcccgccaccagggctcccatgtccagggcaaagagcttcttatccttcagtccgtccgggacatccccccgcacgattctctgggccagaccttccaccacggctgtcttgcccacgccgggctcaccgataagcaccgggttgttcttcgtcttacgggagaggatacggataacattacgaatctcgctgtcacggccgataaccgggtccagcttctggtccctggcccgctccaccaggtcatatccgtatttggctaatgtatcataggtggcctcaggattatcgctgaccaccctctggttgccccttactgtggacagtgcctgaagaaatgtctcacgggttatattatataacttgaataacgccttgatttccttattgggatgctttaaaagagacaggaacaagtgctccacggatacatattcatcacccatggcctttgcctcgtcctctccgcttatgagcaccttattcaaatcactgctgatgtaaagctggccgctgccgcttaccttgggcagacgctccactgcctgctttgcctcattggaaaacatatctccctgtattcccatcttggtaatcagcttaagaatcaggctgtcctccagggtcagcaggctgtacagaaggtgctgctcatcaatctgctggtttccgtattcatatgccagcttctcacagttctgaactgcttccattgacttctgagtaaatttattaatattcattgcccattcccctttcttctctgccgcctctgaccagaatgcctgtgtgtatcctccggaagcagcggcctacggaattgtgctttgtcatctttgttctagtcgtactataacacatgtcgttagcactgtcaagggtcgagtgctaattattttaaataaaaaatgccgcggcacagtccttatctgtctgtgccgcggccagctgcatcttctctacttcacgccggtagctgtaattgtcttgtttgtaagggttccctcgtagataacagttgcggtatcccctaccttcagtttgtcaaacatgccttcttttcccaggaaggtaaacagggtattctccgggtccgctgtgtcgatgaccacataatccgccccaacttctgccaccttgccggaaagagtattgatcttagcgtcttctgagtccatggcatcctcggtcacaattttggtggccaccggtttgtcggtctcgtcttccaggtccccgtagtaggtcacatctgcctgtactccggacttgatgccgtccttggataccttctgcgcaatcttggtgttaaaggtatatgtaccctcgtccgtggtcagggtcagggtattgtcgtctgctttctctacggttcctgtgacaatgtcatcctcctcagcggctgcctcttccgctgcctctgctgctgcagatgtaacgatatccactgattttgccttggtggtgtctgcggaaagctcacctgcgtaggcaacctctacctcatcaccttctccaatggcatctgcgccttcaatcttagcctcagatacatcaaacttcacttctttgccttcgtcgtccttaacggtaaccaccttatcagctacctctcccacaaaaccatagaagtattccagttccatatcgtcttctgcttctgtcgctttctctgtctcagtctgggatgctgtagtagttggggccgctgtagtttctttattgccggaagaacaagctgtcatccccaatgcaagtgccaggactgcaactgccaaatagtgtctcttcataataatctcctcttttctaaatcatgatatgtcatatactatgccaggacgggcagcatattccccctgcctttgtccacgttacatattactacgaaaaacactattttactatgtctttttctttaatttttcataaaagtttaaatactccccagttttctgatggactctgataccagttttttgaagagaggggccattttatccgacgcctcctggacctccttgtgggacaaaggaacgtctgtcataccacaggccagattggatatacaggatataccgcatatcttcatccccatgtgattggccgccactgcctcgcaggccgtactcatgccaactgcatccccgcccagtatcctgcacattttcacctcatgcgggctttcgtaggcaggtcctgtaagctgcacatagaccccctcctgtatcctgattccaagctcaagagcagtggagcggataatatccctcaggtcctcatcatatatatggctcatatccgggaaccttggtcccagctcctccaggttcggccccaccagcggggaggggacaaagcaggatatctggtcctttatgagcataaagtcccctgccccataatcatagttgactccgccggccgcattggtcagaaagaggatttccgctcccataagcttcataagacggacaggcaggaccacatctgacatgggatagccctcataataatggacccgtccctgcatcagcacggccggaacctcatttatacgggcgaacacaaacctgcccttatgtccgggtaccgtagataccggaaatccctctatatcatggtaatcaatggtcccctggatttccagctgctccgcatagtcaccaagaccggaccccagcaccagtgccaccttaggttcaaagggaatcttaccttttatgctgtcatagcagtttctcagcttgtcatacacaggatttgtcatatctgttctccttttctaacgggagtttatccctcccttgttatgtgaagtatatcatacctgagccgcagggctcaaccttttatgcggggcaggcatcttcttcggtgctcccgccggttctgcctgtaccacactgccaaaagagccagcagtcccacgcctatgcctatgagtccagcccccaccgttatgacaaaaccgctgcgtacccagtaccagagacttccttccgggccttcaccctgaatctccggcgcaggtacatgttctgccccctgagctgtctccaaagctgcaggagaaaccgcggaaatctgcctgtaaaccatctccagctcttgggtttccggtttaatccagctgacttccccttcatattcagcctcatagtccctaaggagcttttgtccccagaccatggcctggcggcacattctcccctcctcatcctcgtatgactccccataccagtctgcggagagtatgcggtactccaggggagacaggcccataaacgccagcagctgtccccccatggacacgcaggtctctaaaaccgcgtcccccggtataaccagggaacctccatggtattcatccgcaccgtaggcgtgaaaggtgacaggcgccgtaaatccatcctgccactcctctcttacaatccggcttttcctcaggaacagggttccttctgcctggcttcccgatacatcctccttcaaagaaatggaccctggaatctcttcagccccttccacaccagtatacaccttcttccgctccagacgccggctgacatcctgtcctggaattgtcactatctcccaggaatccagccggtactcctttccatcaccgtcccaataccggtcagccggctcccggattccaccgtcctctgccgtctccacatcccgggtgatccgaagctctgcgccataaccttcctcctgcggttcctgcgccgccatggccgccccgctgcctgacagccagaatacagctgccgccacggcagtcacagcaaacacagccctgtccattttacctcttatattcaaccgtctttccggcggtattcctttctctctatatgccataagcattcctcccggctatctgccattttacaaactgccggagaacagtatacaaatcatatgaatatgtcaatgtgcacagatgaaaactgcctgctaaaatgggaaacacgggtttcagaagaaaacctcgcctctgtgcagacgcacagccagatgtctgaagaaaacaatctgtggtcttattatacataacctgagaacaagaatcaagggtaattccgatattattcacctcatatggagggacttatatgccgggcctgatatgccggtacttatatgctgggacgctcaatcaatccccggccccaatggacagcagggcggacaaaaagacggtatcccctctccgctagaaggaataccgtctctaatttacctgcctctgcactgtcagctgaagaatcacggtctgaactggctgtacttgtgtccgggagcaattcctcccctgtaggccgccagctcgcttactgtcaccagctgatatccccgcgctgtcagttccggaatcagcaccaccgccgcatctgctgttgtactgtagatatcatgcatcagtatgatatccccatcctttacctggctcagcacggtgtcaatggtcctctgcgcattcctgtgctgccagtccctggtatcaatggaccacatgatggcgggcatacccatagagcccagcacgttaagggatgccccatcaatatatccgcccggcgggcgcatgaggaccggtgatacgccgcagacagcctggatcttctggttggtagatcccacctggcttacaattccctctgcaccgattttagtcaggtatttgtggtcatgggtgtggttggcaacctcgcatccctggtccaccatgcgcttgattacgcctgcattggcgttcacattggaacccagcatgaagaatgttgcccttcctccattggcctgcagactgtccagtatccggctggtcacggatgtcctgggtccgtcatcaaatgtaagggcaatcatgggcctggatgggtcaattccatgggaaaccaccggttcagcaggaatccctgcacccttagccgtgatggaagcccgtatgccgtccaccctgagacctgccccctcctgtccggcagacgcgccattggccgcccagtctgtccaggcgccgttctgaagtactttatagtataaatcatatgcggctgcgccgctgccagtcagttccatgcgtatggattccagaggcatgacgccttctgctcctcctgtctcagctccgtcctccgcccaggagagccaacccgtaccgctcagattcacctggtagcgaatacccacctgtgtaccgtccggaatatgaatcagattagcctttacggcagtgacccatgagttgaccggggctgaacacaaattgttatcagccgtgaccgcgctccatccctgctgcaatataaaagcactgtaattcacctggagaggttcctggcccgtaaccggctgtgcgctctgttcctggcccaccggctgagctgtctggccctcggcctggcctgtctggccttccgcctgggctgcctgtccctccgtctggcctgtctggcccaccggctgtgctgcctggccttccgcctggcctgtctggccgttctggccctccggctgtactgtctgccccccagcctgacccggctggctgtcattctgtgctgccacacccggacctgtctgggccggcttagccgcacctacccctgtacttccggcgaatgccgtcattccctgcatacttaaaataattccggctgccaagacagcagccagaatctttgactttttcccaaatctgatcattcacattctcctcgcatcatgtctttatttgaggaaataacatcctcaccgaacacggccctgcataacatcacatattccttgaaatacaggtggtcctccaactccttcagagcatgggctatcccccaatagtaccgggcatgcttccgcttatccttttcattaaaccgctgccatatggcatcgcccaccaccagataatccctggccgtacagcgcatgttgctgagcttgtcccccagagccaatatcttaatctccctggaagccgtgcagagatgtctgaccgtacgggtctttcgctcctgccagctgcggcttttatcctcgctctcatccactaccagatccgctactctggaaccaaacgtgtcctccagttcttccctggtaactcctgcatcttccataacatcatgaagcagcgctgccgcaatgatttcctcatcatccgtaaaggcggacacaatcactgccgtctccatgggatgcgtgatgtacggaatcttcgtgccctttctgaaagctcccttgtgggctttatctgcaaacgcagccgcttctccaatcataggtcttactccttctgtgatagcactatttatattccttatgtacctctccctttgatgtcaggaatcatacctatcataacatattcaggcggcattttgaagggtattgtggaatctttgccattttccaagttaaacttgtaagaaaagaaaatttctgatatgctatagaagtattttttccgcaatacttaaggaggataattcatggatcgtcattcgtcatattcggctccccgcagcgaacgtgcttccggttcttacggcggcaaccgcggcagaagcacaaaacgcaacacctataataaacgttcatggaacgataacagaaaactgcataccctggtattctacatactcccctttatcctaatcaatctggtcatattcattgtggccacatccaaacccaagatagagtatgatgtatctgacaccagggattaccgcagcgtggatatatccatccgcatacgttcccttctccccatacgcgaaaccagcgtcaccatggaatcccagccccttgaaatggaaaaggaaaagggagtctacactgccaccctgaccagcaacgggaccctgcagatatatgtgaagggatggaacggaatgtctgccagactgtctgacaccattcaagccctggacgatatggcgcctaccatacaggaagattatgtgatggaaaacggcattctaaccattacagcggaggacagccagtccggtattaactttgatgctgtctatgccacggatgaagaggaaaagactgtcaaacccagccatattaataaagaatccggagagatcaccttccccatggatactcagacccttgtagtatttgtggcggattacgcgggcaataccataaaaagctcctatttcagcgtaaaagacggcatagacctcagcggccgtgacaaggaattcccttcagacggcaccaacggcactaacggcagcagctccaaaggttcgggcacggataaggaaaccagcaaggccaaggaaagcaccaaggccaaagaaaccaccaaggccaaggagaccaccaaggccaaggagaccaccaaagccaaggagactaccaaggccaaggaaaccaccaaagccaaggagactaccaaggccaaggagaccaccaaagccaaggagaccactaaggccgcagaatccactaaagccgcagaatccaccgcggccacaacagctgccctgtctcccgccgacccccagacgccatcgcctactcagtcgtcacaggcaccgtctcccactcaggcgccgcaggcaccatcacctacccaggcatcacaggcaccgtctcctgataacggttcgggggataatgtcaccatcgtacccctgggctgacacttatctgagtctatccgtaaaaaaatcaatcaaaataagaccatggatccactgcacggaccatggtctgttttttgctctatattctaatttatttctatcctgtccaatctgaagcctgtcactgtcttcccgcgtccatgatatcgtcaataatatccacatattcagaacagtatttttcgtacataggggccgcggcttcctggaaccgttctttctccctggcatccagctccgtcaccacgcatccggctctcctgaccctgtcctctgaggtcttctcacgctcatcccacagttcacgctcatacagggccgatttctgtgcacaatcccgtataatgttcctgtattcctccggcagcttatcccaggtggactgggctgccagctggagttccggaaccctggtgtgttcatccagggtgaaatatttggccacctcataatgcctggtggactcataggaaggccagttgttctcggccccgtctatctcccctgtctgcaggcctgaatatacatccccaaaagccatgggcaccggcgtggcacccagagcctgaatcgtatccatcatcagttcagattcctggaccctgattttaagccccttcatgtcgtccagggactcaatgggcccggccgtactgtagaaattacgggcgcctgcatcataccaggacagcggcaccaggctggaaccgccgaaggaattcatgaaatccgtgccaatgggcccctctaacaccttccacatgtgctctcttcctgtatacagatagggcatctgaagtacattcagcttgggcacaaactcagccaggggcgacagggataccctggcaaaatccaccccgccaaactgaagctgttcaatcactgttttctcgtctccgagaacaccgcccgcattgacctgtatctccaccctgcccccggtctgttcatgtaccagctctgcaaatttataagctccctgggtggtgggataatcctccgcctgattctcagcatatgtcaggacgaactccggaactgtcttctgcgccgtgctgtccttgcttctgcctgcacaggacgcggccagaatcattacagcggcgcagcccatgaggtaaatcacattttttctcaagcagccgtccctcccttcgcatatatcataccccagttaccagacccggtcaaggagggcctgtcctttaattatgcacattcctgccttccaccttagaggaggcataacggtaaaattcttctttctcatttccaagcacacggtttgtaaatataaatccatgggtggtatcgctgaatatgataatcatggcaggtttcctggatatcctttttaccgacttccacggcagctgcgacgtgtcatcgcccacccggatgtaaagcccgttgtcgtcaatagaaacctgggtgtcctgggtaatccccgctgcctgcttctttgccttggcataaatcataagcggctggattactgtaaaaaggcagcaccccagcacaatgagacacctcacgatcccctgggcctggtcccacctggagaagcccaaggcaaatgccgccactgtaaatatgatattacaaagtcctgccagcgaaccgtatatataatacatggaaagctgccataaatcccgcgctgttgtcctgtatgtgtatttgtatctcattcatatgctccttgtacggatgtcctgaatcttaacagagtggcgacatggccgccactctgaactttcattataacatgataaactgctttccggtattcatttattagtgggccagtacagatggaagccacatgctgacagccggaataaaggtaatcagcagcagggtgataatcatacacacatagaatggaagcgtagccttaaccaccctctccatgggcaccttggaaaccgcagagccaatgaacagaacagcgccaacaggaggtgtcagaagtccgataccgcagttaagcactaccatgataccaaactgaatcgggtccagaccaatggatgtggcgataggcagcaggataggggttgcaatcaggatgattggcgccatatccatgatacatccgagcaccagaagaatcaggttcagcagcagggccagaataatggggttattggtcatgccggtgattgcgctggcggccaggataggcacatgcagctgggtcaggcagaatccgaaaatattggatgtggcaatgagaatcattacaatggacagggtgtccacgctgtctcccaggactctccatacgcccttccagtccagtcccctgtagataaacacgctgacaatcaggctgtagataacagcaactgctgcggactctgtggccgtaaacacaccgcccaccacgccgaatacaactatcagcacagctgccagagcccagaaggaaacactcagctgcttaatcaggttgatgatgctgaacttctcgcccttagggtaattacgcttaacggaaatgatataggatcctatcatcagcgttacggccagcagtgctcccggtatatatcctgccaggaaaaggcttcccacggagataccgcctgccgtggtggcatagataaccatattgtggctgggaggcaccaacagtccctcacaggatgaagtgatggttactgctgttgagaaatcgtcatcgtatccctggtccaccatcatgggaatcaggatggaaccaagagaagccgtatctgcagaagcagaacctgagataccgccaaagaaataagaagcgacaatattaaccattgccatgccgccccgcatccatcccacacatgcattggccagtgcaatcagcttttcggaaataccgccggaacccatcaggcatcccatggtgataaagaagggaacagccatcaggctgaaggagctgattccctttaccatctgctggcagatggtagtcaggttatgtccctggaacaaaaggcagaacacagatgaaagcgccaccgcataagcgatggggaaccgtaagaataccatcaggaagaagctgcccagcaaaaccagaattgccatgctatttgcatccattactccatcccctcctttacaaagaaactcttaacatgattgtataaggcctctacttcaaaaaccagcatggccacgccggccagaggcaccgggaaatacatccagaacctggaaaccttgggcatgctcacataggtacctttggagccgattcctgttgcatacttccagcccactgtaatcatgattaccgccagcgcaagtactgccaggtcagcgatgatatcaaggctctttaccaccttagcgggcagataccggtcaaatgcggtcatgcggatatgggcgcctcttctgatggcaagagctgccgaaagcactgccatataggacatgcaggtcagaacaacctcttcactccacgcaggatcgggaatgaacgaaatgtaccttcctgccacagccatggtggtgataaggatatccactaccagaagcagcttgcaaaggaacagtacaaccctgtatgtcatatcatatgcaggcctgattttatcaatcttttgaaatattgcaggcatattgattcccctttcaaaaactacaggcacagagtttattcatttgccctgtgcctgtctgattgccgtttattatttgttcatgtcaagaatctgctgatacagttcagcctggtcctttgtagaagactcgatgatgcctttacaagcatcctgccatggcttgatatcaggaacctcaaccacgttgatgccatcagcctttaattcctcaagcaccttgttctcagcttcctcagaaatggttctgttgaactgggatgcaaccttgccggcttccatcaggatgttctgctgctcttctgtcagcttatcccatgcttcatctgtgatgataacctggattgcgcccagtgtatggccgtccagaatcaggtttggagcaacttcctggaatgcgttggacttgtagtttgcgattggctgctcagcaccgtccacaacaccggtctgaagtgcggagtacagttcgttaaaggaaacaaccgttgggcttgcgccaaggccttccaccataccattcataatcgggtcattggacacacgcagcttcatgccctttaagtcgtctaagcccttaacttccttaactgtgaagaagtgacggaagccttcctcgccgtagtacaggcctcttacgccaagtccgttgtcatgaggttccatgaggaattcaggagccagttcgctgtcagcaaacttccagaagtggtcacggtttgcaaatgtataaggaatggacagaagcacggacttctcagcgccgtagcttgtcagggcaaatgcggaaatacgggaaatatcaatggtgccgccgccgccaagcatggtatccagaacgtcgttctctgaaccaagtacaccgctggcctgcaggtcaatcttaatcttgccgccggacagttcctcaacagtctccttaaatttggtatcagtctgtcccacaatggtgtctaacgggttaacctctgccataaccagagtaacctcaggcatgtcgctggtatcagctgctgcctcggtatcagctgcttctgtctttgactcctcagcagcatccccctctgcctttgcggcctctgtaggtgcctcagttgctgcgggagccgctgtggttgcatcagggctctttaagccgcagcctgccagggagccggctaccattgctgcacacaacgcggtactaatccatctttttttcatgaaacgtgtcctcctcttaatacttttttcatgctttcacatgatatttttatgttttcttaacactgattttattataagagtattttgcgtttctgaacatagtaaatttttgtgaatcatagtatgattttaacttgtttctcccatccatttatgcaaatatcacatatatggtctttatacaatctttatcccttctggaaaatagacaatctgtactctgtggggctctgtcccgttatgcgcttgaacacctttgcaaagtaattggaatccccatagcccactgcccttccaatctccttcacattgaccgttggctggcttagcatcttcttggcctcctttatccggtactgtgtcaggtaggatgtgaaattctggtcaaaacactgcttgaacagcttgcagaaataggcctctgaataattcatggcccttgcggcatcctgcatggaaatgtcaaacatataattctcatgtatgtactggctgattaaggatgtaacctttgacagacgggcatgtcctccgtcctccggttcctctgtgtctggcggcgcaggaatttcattttcattttcatccccatccccttcatcctgccggtgttcccccgcaatatgcatggcttcctccaccactaacatcagttcctcctcgtcgtaaggcttcagaaggtaatccagggcccttaccgtgatggccttttttgcataggagaactcgtcaaaggctgtcaggaatatgatgcagcagtccttgtcggcctgccggatctgctgggcagcttctatgccgtttatgcccggcatctcgatgtccagaatggcaatctgtatcttctcttcctcatagatcttaagggcttccctgccgttggctgcctggaaaatccggcacctgtcccccagatttttctgcagcgtcttataaaggacctgcctctcaatcatctcatcatccgcaatcagtaaacgcaacatccgttccccccttatatcttctgatagtcctcttcccgggcggcaggcaggataatctgtaccacggtccccttgcctgccttgctgtagattctcaaatccccatcctcgtacatggatttaatcctctgatatatattccccagcccaattcccaccctggctgtccggtgtcccttaagggcatccataagccttttgagcgcctcttcctccatccccacaccggtgtcagccagggaaatgactatcttgtccttccgcttccatatccttaaaaatatcctccctccctcctccttcctggctatgccgtgtatgatggcattttccaccagcggctgaagggtaaaagccggtatcatggtctcgctgccgtccacctccaccctaaggtcatggctgatacggctgccaaaacgcatctgctgtatgtacatatagtcctgcaccaccttaagctcccgctccaggggcacaatctgctccgaggtcttaagattatagcggaagagatttcccaggctggatatcatccgctctgtggtctgggcttcctccagtttagccatacaggatatcatattcagggtattaaacaggaaatggggattaatctggctcttaagcagttccaggcgggccgcgtccagacgtttctccatctcgatgcgctccacctcctccttatgaagacgctccgccatctcgtttttctctttcaaagtattgatatacccctctgtggcatgcttcatcttattaaatgcctgtaccagctctcccatctcatcccggttctccaccaccaggtcctcaccgccgaaatcatttctcgctatctccctggagctgtgggccagctttaccatgggggcaatcagggtattggacagaagcttggtcagacagataaccgtaataatcatcaggacggaacaggccataatcatgtagggtaggtcatagaggagaggaaccttttcctggtagctgcgctttccctccttcagggtagactgcatcagtcttctggcgtaagtctgcagataaccctgcattccatataccctgtacaattgctccacaaatccttcatccgactggtccatgtgaaggacctggtcccggaaagtctggtagccttcatagccattcttaatattccatgtcctggcataccgctcaggcccaatgacatcatagtcaaagggcagggcctccagactgctctccgtcttaaaacaggccagcctgtattgctttgcattctcccaggaccgctccctcacatagagttcaaaggcatccgcttcctgctccatggactcctgcacatcatagcagagggaattgtcattgagtatcacgttaaaactctccagggaaaaattcatgaccagcatattgaaggcaatggacagacccattaccaaaatgacaaccacggaaaatgcacccagctttttcttcaacgagattgaaagccactgatttttaatataagaaaacataccccaccccaatcgcaccagaatgtgtctgaaacctgctttcttccggctgtttgtccaatttgcgctctgcgtaaccgtatcaagcatccttcaccctgccatccctcctggaatgcccatggtccggtcagtgtctttcgccattataccatataataacagggagcgcaaagcccccggccttgcgctccagttattcccaatcacctattttgtttcactgccttcggtttttgaagcggttatctgcttctggttcttcttagctgtcccgatctgcttccggctctttttggacgtgctgatctgtttctgttcttccttggacgtggctatctgctcctgcttcttcctggaagtacctatctgcttctgctcctccttggacgtggctatctgctcctgcctcttcctggaagtgcctagctgtttctgctcctcc

SEQ ID NO: 3241 - DNA, 44026 bp, Unknown
  gut microbiota DNA sequence
ggaaattttgttattatacatttagatgttttaataaatatctaaatgtataaatgggaagaagccggatttgcagccgcccatacagccgctccccaccccacgataaaaatacataaaatcaggcaaagcgaaaggaggaattttgtccatgtccttcggtgacacattcaaagccctgtccgaccccacccgccgcgagatacttaacctgttaaagcagggaagcatgaccgcgggacagattgtggaacattttgacacaacaggagcaactatttcccatcacctgaacatactcaggcaggcgggacttatagaggaccggaaatcgggcaaatatatttattacgagcttaataccactgtatttcaggaagttctttcctggatgcattcattaatggaggaagacaaacatgaaaaaaaataacaggaagatctccaagtgggatataatgtactggcttacggcccttgtgccctttatcatttccatctgtttttataaccgcctgccggatctggttcccacccactgggggacggacaatgtggcagatggttattccagccgcaatatggccgctttcggcataccggcctttatgtttctcatggcagtgatggtaaatgtgatttaccggattgaccccaaacgtgaaaacatcagccgctccagggaactgaagcagattacccgctggtttgtggtcctgctggcggtgatggtccagtttgtgattgttctgtccggcatcggtgtggatatcaacgtgggaagcatggtaagcattcccattgcactgatgtttgtggcggcaggcaattacctgcccaaatgcagacagaactacaccatgggaatcaagcttccgtggaccctggcagatgaggataactggaacaggactcaccgcatggccggctatgtatggacggcagggggaatactgatgctgattatgggattttttcatctggcatccctgttcttcctggttttcatggcaatggtcctgattccaagtgtgtattcctatctgatttaccggaaaaagctgaaaggaatataaacggttccatcatcacggcacggtgaagccgtacagaaggccctgctttaacgcagggtctttttctgtttgtgccgatgatattgtggcgccgcggtaaaacatgtacgaagaatcccgggaaaagattacccgaaaaaatttggtgcccttgcccccacatacaggattgaataaatgcagggtttgaagtataataaacgggataatgatttagaaggaggacatcatggcagtatcaaatgtatactacaccaacatgaggactacacttacggaaaatctcctgcagaagctggagaggctggtaaaaaaagccggcatgatggatattgactttaacaacaaatacactgcaatcaagattcactttggcgagcccggaaacctggcttacctgcgtgccaactactccaaggtcctggtggatttaatccggtcccaaagcggcaaagtattcctgaccgactgcaataccctttatgtgggaagaaggaagaatgcattggaccacctggacgctgcttatgagaatggctataatccctttaccacaggatgtcatatgattattgccgacggccttaagggaacggatgaagccctggttcccattgacggagagtacgtgaaggaggcaaagattggccgggccattatggacgcggacatcgttatttccctgacccactttaaggggcatgaggcaaccggttttggaggcacacttaagaacctgggcatgggaagcggctccagagccggcaagatggagatgcacaacgccggtaagccttttgtacatacggataaatgtatcggatgcggcgcctgtcagagaaactgcgcccacagcgccatcacggtccttgaacgcaaagcctccattgatacaagcaagtgtgttggatgcggccgctgtatcggagcctgtcccgtggatgcggtggactccatgtgtgacgaggccaatgatatactgaaccggaagattgccgagtacaccctggcagtgctgaagggacgtccgaatttccatgtgagtcttgtggtggacgtatcccccaactgtgactgtcattcggagaatgacgcccccattgtgcctaacgtgggtatgtttgcttcatttgacccggtggccctggacatggcctgtgtggacgcggtaaacagccagcccgtgcttgccggaagttttctggcggagcaggatcatcacagccatgaccatttcatcaatacgcacccggataccaactgggagacctgtattgaccatgctgtgaagctgggacttggcaataaggaatataatctcatcaccatttagaacctgaccataaggaggacacaggaaacatgagcaaacaatcattagacacaatctgcatacagggaggctgggagccgaagaacggcgagcccagacagcttcccatataccagagcactacctttaaatataccaccagtgagcagatgggacggctttttgacctggaggaaaacggctatttttataccaggctggccaatccaaccaatgacgcagtggcatcaaagatctgccagctggagggcggggtgggggccatgctcacttcttcgggacaggcagctaccttttatgctatattgaatatctgccaggcgggagaccatgtaatcagctcctccaccatatacggcggttccaccaacctgtttaccgttaccttccccaagatgggagtggagtgcactctggtgaatccggatgcggatgaggcggaactggcaaaggcgttcaggcctaacaccaaagtggtatttgcagagagcattgccaatcctgccctgacagtacttgattttgagaagtttgcccgtctggcgcacagccatggtgtacctctgattgtggacaatacctttgcaacccctattaactgccgtccctttgagtggggcgcagatattgtgacgcacagcaccacaaaatatatggacggccatgcggccacagtaggaggatgcattgtggacagcggaaattttgactgggaggcccatcatgacaaatttaagggcctgacagagccggatgagtcatatcacggcattgtgtatacccagaaatttggcaggctggcttatatccagaaggccacagcccagcttatgagggatttgggttccatccagtcccctcagaatgcattcctgattaatattggcctggagacccttcatttaagggtgccgagacactgtgagagtgcctttaaggtggcctcctaccttcagtccagggaagatgtggcctgggtaaaatatccgggacttccaggggataagtactatgagctggctcagaaatacatgccaaagggtacctgcggcgttatctcctttggtttaaagggtgggcgtcaggcagcttccgtgttcatggataagctgaagctgtgctccatcgaaacccatgtggctgattccaggacagctgttcttcatccggccagccatacccaccgtcagcttacggacgaacagctggtggaggcaggcgtggacccgtccatgattcgtttcagcgtgggactggagtccgccgccgacgtgattgaggatatccgccaggcgttagaagattaagaaattgacaaaaggagccgcccgcttacggtacacataaatgtgagggggatcggctccttttatagttacaaatgcatctttcatattgtattctgcaaacagcatatggactgcctctgttttgtgatctcttaaaaaatttgtcaggatgcgtcctgcctgcaaaagtacccggaaaatagtaaaataaaatgcttgacaaagataactgtatcatgtatagttacagtaagaactgtaacaaatgatattacatatagataaggagaatcgctatggcggagaatatgatggagaacaggacaaaatatgacgcagttatcattgggtttggtaaaggcggaaagacaatggcgggagcccttggggcggccggcaaaaaagtggcccttattgaaaagtctgacaggatgtacggtggcacctgtattaatgtgggatgtattcctaccaaatcgctggtgtatagggcagggctggcagctgccaagggaggttcctttgaggagaaggctgccgcctataaagccgctatggaacagaaggaagacctgacagccaggcttcgtggaaagaactaccagaagctggacagcaatcccaatattacagtgattgacggaaccgccagtttccagtcgcctcatgtggtggaggtggagaaggacggaaggaccttccaggtggaaggagagcagatattcattaacacaggctcatccgccttcatcccgcccattgagggattaaaagggaatccttatgtttataccagtgaaggcctgctgaacctgaccgaacttccttccaggctggttattatcggcggcggttacattggagtagaattttcttccatctatgcaagttttggctcaaaagtgaccatacttcaggatggagatatattccttcccagggaagatgaggagatcgcgggagctgtcagggagtccctggagtccaggggcatccgtgtcatgaccggggtcaaggtcaaggctctggagcaggccgggggcaaagctctggtggcagtggataacggaaaggaagttcaaaagctggaagccgaggctgttctggtagccaccggacgcaggcccaacacagcaggacttaatctggaagcagccggtgtggagattgggcccagaggcgggattgtcacagacgattccctcaccactacggcgccccatatctatgctatgggcgatgtgaggggcggtctgcagtttacatacatttccctggatgactttagaatcgtaaagtcaaaggtcctgggggatggaagctatacattgaaggagagaggggcagtgccttacagcgttttcctgataccgcctttctccagagtgggcttaagtgaaaaagaggcagtggaaaaggggtataaggtgaaggtggccaggctggcggcagcggccattccaaaggctcaggtactggaacagccgtccgggctgttaaaggcagtcattgatgaggagacaggacttatcctgggagcccacctgttctgtcaggaatcctatgagatgattaatatgattaagctggccatggatgcaaaggtaccgtatcaggtgctgagggatacaatctacacccatcccactatgagcgaggctttcaatgatttgtttgcggtatgataacaaggcatgacagaaaaggcattatagaaaaagataccatgctgcacatataaaccacaggaaaaacatcacacagaaaacataaaaaggagacacacctatgggattttcattagatatcagtgtaccggctctgacggtattcatacagggactggtcagctttttctccccctgcgtcctgcccctcatacccttatacatcgggtatctttccggcggaaccggcaagcgcggtgaggacggccgcatgcactatgagcggagcaaggtaatgcttcacaccctctgtttcgtcatcggcgtcagctttgccttcttcctcctgggactggggttctccacattgggaaccttctttaagagcaaccagcttctctttgccagagtgggaggaattctggtggtgctctttggattttatcagctgggattttttggtaagagcggagccatgggaaaggagcacaggctgccttttaagctggatatgctggccatgtcgccgataacagccttaatcatgggatttaccttcagctttgcgtggacgccctgcgtgggaccggctctggccagcgtcctgctgatggcagcctctgccagcacaaaggccttggcctttggcctgattggggtctataccctgggattcgtgctgccgttcctggcagtgggacttttcaccaccagcctgctggaattctttaagacccatggcaacgtggtaaaatacacggtaaaggtgggaggcattctgatgatattcatgggccttctgatgtttaccggaaggatgaacgcagtgacaggatatctgtccagattccagacccagtcatccgtccagggcagcaaagagccgggagagggtggagataaaactccggccatgacggcaggtactgagccagagtccgctgacagcgaatccggggcagagacagaagccacggaagctgaaaccggaaaaacagatacggcagatgcggcaaatccggcagaagccgggaacacgtccgctgcatcggatgcagataaggccaatgcaccggaggaaacagccggggacggggaagaaggggcagaccaggccgaagcaggagcacaggaggtgcttccggccattgactttacccttaaggaccagtacggcaatacacattccctgtcagattacaagggaaagaccatattcctgaacttctgggccacctggtgtccgccctgccgggcagagatgccggatatacagaaaatatatgagacctatgatacggagggggatgacgcccttatcgtactgggagtggcaggaccgggatatggaaatgaaaagtcagaagaaggaatcaaggaattcctggatgagaacggatacacatatccggtgcttatggatacaacgggcgagctgttcagcgcatacggcatctattcctatccgaccacattcatgattgacagggacgggaatgtattcggttatgccagcggtcagctgaacgaggatatgatgaagaacattatagaacagacaatggaaggaaaacggagatagtaagatgaacagaagcagagccagagcgataagaagaaaataccaaagaaggacaagggtaacggtccaaaaggcatggatcctgtcagctctggccgctgctgtcattgtctacggggcagcggccgtaatcagggaaaaagggcgggaggccaaaggcacccaggtgagtatagagacaccggacagcacgcagatgccagaggctttggagacggaatttctgaaagatgtgcgggttggaaccttaaatctgtccggacttaccatggaacaggccgtatccagggtcagggaaacgtaccgctgggatatgaggatcagaaacggggaagagagtgtttccctggaagatttggcaggccctcagctggaggagatacttgaaaccatagaacacggggataaggataagccacagagctatgaactggactatggacggatggaacaggcatttgcgcagcaggcagcagagctggcccaggaatgggacagaggggcagtggattcccagatggaatcctttgacaaggagacaaagacctaccgctatacagaggaacggtatgggcgcagcctgaagcaggagcagctggtggaggagctgatggaggcagtcagaaagggagaatttacgacggagacagaggcgccctttgattccatcgcgcccaaacggaccgctgcccaggccagggaccagtacaaagtgattgggactttttccaccaccaccacggataataagaacagaaaccagaatatccggctggcggcagacgccatagacggcgtagtgttaaagccgggagaggaattttcctttaacctggccacaggcaaccgcaccagcgaaaagggataccagcccgcaggcgcctacaggaacggagtcctcatagaggaaccgggcggcggtgtgtgccaggtttccaccacgttgtaccatgccattatcaactcaggatacaagacaacggagcggaatttccacagttttgcgcccggttatattgataagggccaggacgccatggtgagctttgacggctatgcgggcccggaccttaaatttgtcaacacccagaacacttccatcggcctcagggcttcctttgacggaaaacagctgaagctttctattgtaggccttcccctgctggaagagaatgaacgcatttccatgcgctcggaaaagatcagggagctggaaccgccggcgcctgtttacgaggaaaaccctgagctggcttatggggaggaaaagatagtggagcaggcccagccgggctcggtctggaagtcctaccgcatccgtacaaaaaatggacaggtggaggaagagaccttcctttacaccagcacctataaagcaaaacccgctaagatacagcgcaattcagccgccctgccgccatcacaggagcttccccagacagatgggggagaaaacctccaggaagggcagacagaagaagctgccgcagaaggggaggtcataatgccctttggctcatgagccggcttggaagctggcttatgaattggtttatgaaataaaaaataagtgcatttttctgaaaaaaatggtatgatttaatgaaagacagcagcaggctgttgcagataggaaaggggaattggaaaagtgacaagtgaatttaccattgcggtgcatgcgctggtctttttgaatcacaagggaactgtgttttccagcgaaggtcttgccgcaaatgtctgtaccaatgctgccaggatacgtaaggtcatggcaaagcttaaaaaggcggatcttgtgaaaacaaaggaaggtgtggacggcggttatctgttccaccgtgacagcagggacgtgaacctgtccatggtggctgaggctctggataccccctttgtggctgcctcctggaaaagcggcaatccgcatatggcctgcctcatttcgtcaggcatggcgggaatcatggacgagctctatggtgagctgaaccagtgctgccaggcatatttagagaaagtcaccattgcggatttggacagcagaatcttcacgggcgccccgaaggctgtaacagccatataaagacagagaataaaccctggtgaatcaggtcggcggatgccggtttttcaccagggatttttgggctgtataaacccgtatgataagctgtacgataaagtacatcatttgttacatgagaggagacaagggacaggatgaagaaattgaggggattattccggattatatttggaaggacggcctttgtggtgctgtttatggccatacaggtgggaatcctgtttggcgccttccggtggctggaagagtacatgcacattgtatacgccatatccatccttttgagcgcggcagtcatcatttatattttcaatgaacctattaattccagctttaagatggcctggattgtaccggttctggtgattccggtgttcggagtcctgctgtatatatttgtgcagatgcagttccagacaaagcttatggcccggcgcctgaaaaaaaacataggcgacacggctgcttacctgaagcaggaccgggaagtacaggagcgaatcagggaagccagcaggagaagcagccatctgattgattacatgaaagatcacgcggggtatcctgcctacggcaacacccatgtggaatattttccgctgggggaggacaagtttgaggctctcatgagggagcttaaggtggcccggcattttattttcatggaatattttattgtagagcggggatacatgtgggacagtatcctgaaggtgctggaggagaaggtaaaggagggcgtggaggtcagggtcatgtatgacggcatgtgctgcctcatgcttcttccgtaccattatcccagggtgctggagaaaaagggaatccgctgcaaaatgttttcgcctataaagccaaccctgtccacctatcagaataacagggatcacaggaagattgtggttatagacggccatacggcctttaccggcggtgtaaatctggcggacgagtacatcaaccgcaaggtacgctttggccactggaaggatacggctatcatgctgaagggagacgcggtacagagctttaccatgatgttcctgcagatgtggaatgtgacggagaggcagccggaggattacgggaagtacgcggtccccaaagactatgaacatccccagtccacagaccattccggcttcgtcctgccctatggggacagccctatggacagggagcaggtgggagagcgtgtttatctggatatactgaaccaggccaggagctacgtccatattatgacgccctatctgattctggacgacgagatggtcaatgccctgagctatgccgccaaacgcgggattgatgtaaagcttattatgccgcatattccggataaaaagtatgcctacatgctggccagaaccttttacccggagctcacaagagccggcgtgaaaatttacgaatacacgccgggctttgtccacgccaaggtttttgtcagcgacgacgaaaaggctgtggtgggtaccattaacctggatttccgcagcctttacctgcattttgaatgcgcggcctatatttaccgcaatccggtggtctttgacgtggagcgtgattttgaggagacccttaagaaatgcagtcttatcacgatggaggactgtaaaaattacagctggatgggaaagaagctgggacgtctcatgcgcctcgttgcccctttgatgtaataggagagaaagaaaaactgaaaaaatgcctgtggaaaaacggaattcatccgtgtattcacaggctgtttttgcgtttttttgcgcgcttatcacaaaatgaacacattactgtgatagagtataaaaaataaaagataataccgattgatttgagaggagcaaaagcaatgaaaagaccacttgcagcctgccgttatgtgtgcggttcccttgcagccattactgcagtgacctcggctctgcctgtgactgccgcagccaatacatcgtctgcaaactttgacatgaggagacaggtggtgaacctgaccggaatcctgaatgtgacggattacacaggacaggtgaccagaggggattttgccagaatgctggtgaatgcctccagctaccgggaaaacctgccttcttccagcgtgtccgtgttcgcggatgtgccgggtacccacccggatgctgtctatatccgtatcgcggcttcccagggatggatgaccggtttcctgggagggctctttaagcctgaggagtatattacatataaggacgctgtgaaggcagcgctgaccatgctggggtattcggacgaggactttaccggggacctggcgtcctcgcgcatttccaagttcaactatctggagctgaacgaggagatgaaccgccagccggaggaagtgctgaaccagacagactgcatgaacctgttttacaacctgttaaagacaaagaaaaaggacagcagcgaaatatacggggctgttctggactgcgagcttaactcagacggggaaatcaatcccatcaccatcctggacgacgagcgcaaaggccccatactggtgcgcaagggcttcagcgtaatccagtccgtgccctttggatcggaaaatgccaatgtatttttaaacggaacagccagtacactggaggcagtgaaggcatcccagcaggatgcgggctttgccgttgtctactataatgtgaagtccaaaaccatctgggcctacaccaccaggggatgggacgatgatgatctggagggaaacaacgcctatgtgctgttaaagggcgaggtcaagaacatttattataaatccacggacgtgatgacgcccacctccatccgtctggagattgatgacgacaattcggacggggactttggggaggatggaattgacgaggacggatatctcaccatcaatctgaattcttcggagcttcagtaccttttttccatctacggcggcatagaggtaggggatgaggtggtaatggtatgcaataagagcggcagcagctatacggcagttgacgccatagaatattaagggtgaggtgcggtatggaagaaaagaagaaaggcgtccagcgcttttttaagctctccgcgggcagacataagagggaagcagcacccggcaccccggcacaggcagtaaaaggcagaaagggaagaaaaaaatgggtaaagcccctggtaatcctgctgataataggagcagccgcagccgcggccatgacctttaggggcatgaaggcaaaggcagccactgcccaggcacagtcccacaatacggcatcggcggagcgcagggacatttcctcagaactgtcttcctcaggaacccttaaggccaaggacacctacagcatcacttccatggtggagggcgaggtgttatctgccggctttgaggagggggaccaggtggaaaaggaccaggtgctctatgaaattgataagtccagcatggagtcccagctgaccagctcggtgaattccctgagcagatcccagtcctcctatgaagacgccctggaagattataatgacgccctgggcgattacagcggaaacacctacaaagccaccgacacaggatatatcaaggaactgtatatcagcgcgggggacaaggtgagcggaaacaccaagctggccgatgtttacagcgacgatgtgatggaaataagaattccttttttgtccggggaggcagccatgataggagccgggatgccggcagccgttaccctgacggatacaggagagcaggtggcaggaacagtcaaggcagtggcaaaccaggaaaccgtcctcacaggcggacggctggtacgtgtggttaccatacaggtgcaaaatcccggcggcctgaccacatccttaagagccacggcccagatcggggaattcataggcagtgaggacggagcgttcgaggcatcggtggacaccaccatgaatgcggacctgtccaccggtgtggaggtggagtccctgctggtaaatgtaggggactacgttacaaaaggaacccctgtttttaagatgacagacaagtcggcggataagctgattcagagctacaaggacgccctggacaaggcggaggaaagcgtggaatcagcccagaacaagctggacagcacccaggacagctatgataattacaccataaaggcgccaatctccggccaggtcatcaccaagaatttcaaagtgggagacaatatcaccaaaaacagctccagcaccacggtgctggccaccatctacgatttgtccagcctgacatttgagatgtccatagacgagctggatatcaagaaagtaaaggtaggccagaaggtagaggtttcagcagacgcctttgagggacagacattctcaggcacagtgaccaacgtcagcctggagagcacatattccaacggtgtcagcacctacccggtgactgttaccctggatgatatgggggatttgctgcccggcatgaatgtggacggagttattactcttgaggaggccaatgatgtgctggccatcccggtggatgccctgatgaggggaaaccaggtctatgtgaaggatgacacagtgacggagcagcaggggccggtgcctgccggtttccggtctgtgaaggtggaaacaggactggcaagcgacacatacgtggaaatcacaagcggtctgtcggaaggagacgtggtctatgtggctgaatccagcaaaaacagcagcagctttatgatgatgatggacggcggcatgggcggccctccgggcggaggcggaaacatgggcggacaaaaccggggcggctccggaggccgccagaaccgttaaagtatgcccggaagaaaccggaagtaagacagagaggaaccaggaacacatggacaataccagtcagagggaaacacttattgagctgagacatatccataagatatactatctgggaggggaagaggtgcgggccaacgacgacatcagcctgaagatagacaggggagagtttgtggccatcgtaggcaagtcgggaagcggaaaatccaccctcatgaacattattggggccctggatgtgcccacggacggcgaatatctcctgggaggcgaggatgtgggtatcatggatgacaaacagctggcccgcatccgcaataagatgattggcttcattttccagcagtataacctgctgcccaagcttaacatactggaaaatgtggagctgcctctcctgtacgccggtgtgggaaatgcagagcgccgggagcgggccatggcttccctggaaaaggtgggcctgtcggaaaaatggaagaacatgccgaaccagctttccggcggacagcagcagagggtatccattgccagggccctggccggaagcccctcactgatactggcggacgaacctacaggagccctggattccaagaccagccgcgatgtgctgggatttctcaaacagctcaacgacgagggaaacaccatcgtgatgattacccatgacaacgccattgccatggaagccaggcgcgtggtccggataaaggatgggcagattaattttgacggagatgtaaaagactatgctgcaatcatttaagctggcccttaaaagcatttggggcaacaagatgcgttcattcctgaccatgctgggaattattatcggagtggccgcggtcatcatactggtaagtctggtcaacggttacatgggcagcgtggtggagagcttcgccagcatgggtgtgaaccagatcaatgtaaatgtgaccaatctggcttcccgttccctggatgtggaccagatgtatgcattttatgaggaacatacagacctgttcggggaactgagccccaatgtgacattgtcctccaccatcaaatacggggatgactccatgacatccacgtcagtggcagggcgcagtgaacaatatctggaaatcaaatcctatgaactggaaacaggcaggaacatagcgtattcggatattgtctcacgccagaaggtgtgcgtgataggcgcttacgtggccaatgagctttacggaagctcccagaacgccatagggagacggctacgcttttaaaattataggtgtagcggaggcccaggacgcggataacatggaggacgggggaaccgatgactttgtatggattccatacagcgtagccgtgaagatgtccagaaacgccaatatcaccaactatacctttacggcactggataccagcaaggcggacgagtgcaccgcagtcatcaagaatttcctgtacgaaacctttaaggatgaggatttataccgcgtgacggccatgagcgagatgctggattccctgaacgagcagattgccatgatgagcggtatgctgggaggaatagcgggaatctccctgctggtggccggtgtgggcgttatgaacatcatgctggtatccgttacagagagaacaagggaaatcggaatccgcaaatccctgggagcggataagggaaccatcatgcggcagtttgtcattgaggccgctgtgaccagctccctgggcggcatcatcggaatcctggtgggctgcgtcgccaccactgtggtgggagcagcggtgggcgtgtccgccacccccaccctgtcggctgttgtcatatccttcagcgtatccgttggaatcggactgctgttcggatacatgcctgccagccgggcggctaacctaaatcccatagacgccctgagaagtgagtaatccgtgccggcggctgctttttgtattatattggaaacatgacggaaaacaattgatatggggccatcctttcgctatagtaaaaaagtattaacattttataaacacgaaaaggataaagatgagatgaaaacgcttacaccccagctgtttctgtccatgaaacagtacacaaaggaacaattcacaaaggacgtgatatcgggaatcattgtggctatcatagccctgcccctgtccatagccctggcgctggcctccggtgtgacaccggaacagggactttacacggccatcatagccgggtttgttatttccttcttaggcggcagcaaggtgcagatagcaggccctacggcagcctttgccaccattgtggcaggaatcgtcatgaaaaacggaatggagggactggccacagctacgatactggccggtcttattctcgttattatgggctttctgcgcctgggcagcctgatccggtttattccatataccattacaaccggctttacaaccggtatcgcagtgaccatttttatcggccagattaaggatttcctgggacttaccttcagggaatcaccggtggagaccatggagaagctgggccaggttatctcctgcatggataccctgaaccttcaggccctggcagtgggagctgtgtcactggccattctcattctgtggcccaggttctttaagaaggtgccgccttcattgattgccgttgcggctgccgcggtgctggttaagggaatgggcctgagggtcaataccataggggatttgtataccatttcctccggccttcccgcgttccatctgccgaatatcagcttcagcctggtacagaaggtgatgccggacgccattaccatagccgtgctggctgccattgaatccctgctttcctgtgtggtggcagacggaatgataggcggaaagcacaactccaacgcagagctggtggcccagggagtgggcaacgcggcctcagcgcttttcggaggcattccggccacaggcgccatcgcaaggacagctgccaacataaagaacggagggcgcagcccggtggccggcatggtccacgcggcggtgcttctgctgattctggtatttcttatgccctatgcggctctgattcccatgcctgccatagcggccatcctgtttatggtggcttacaatatgagtgagtggcggtcctttgcagatgtggtgaagacagcgcccaaaagtgacacggccgtgctggtgctgaccttttttctcacagtggtgttcgatctggtcatggccatcggcgtgggactggccctggcctgtctgctgttcatgaagcgcatggcggatgtgtctgatatttacggatggaagtacgcagaggattacgaggagagcacggacagggagcgcatcgacttaaaaccagtgcccaggcaggttatggtgtttgaggtgaacggtcccatgttctttggcgcggcggacaagattggacagattcccctggattctgacaagaaggttctgattctgcggatgagaagcgttcccgccatggatgcaaccgccctgaacagtcttaagaagctgaacgccaggtgccgcaaggcccgtatcaccatgattctttcccatgtaaacgaacagcccctgtctgtgatggagaaggcaggatttgataaggagataggaagggaaaacatagcgccccgcatcgacgatgcaatctgccgggcaggggaaatcctctcagaggccaatgcagccgattgacagaaacaggcagtcagtataaactggaacatagtaacgggtgacagaatatttccggttatacaggaataaattgggaataccatagaacaggaaagaggacagggatatgaaggttgtggatatgcactgcgataccattgcggaaatctataaggaccataagaagggaggcaggcagtccatcctggagaaccagatgatgctggatttgaaaaagatgcaggcaggggattacgggctgcagaattttgccctgtatgtcaatctggaacaggccaagggaaggccctttgaattctgcatggaacttctcgataccttctaccaggaaatggaagcccatgaggatatcataggaatcgtcagatcctacgaggatatcagcagaaactgggagcagggcaggatgtcggcccttctcacagtggaggaaggcgggacctgccagggtaaaacggcgtttctgcgggatttctaccggctgggtgtgcgcatgatgaccctgacctggaattttcccaatgagctggcatttcccaatgccaggattgcagaggaggacggcaccttcaggatggcgccggatacagagcatggacttacggataccgggattgcatttgtggaggagatggagcgcctgggaatgatcattgatatttcccacctgaatgacgcaggcatatgggatgtgttccggcataccagaaacccttttgtggccagccattccaacgcaagggccatggcttcccatccaaggaacctgaccgatgatatgatacgcgccctggcggaacgcggcggcgtcatgggcatcaattactgcactgcctttctgcgggacttcggaccgggggaagagcagttaagccgcatatccgacatggtggagcatatgaagcatattcggaaaattggcggcatcggctgtatcgggctgggttccgacttcgacggaatcagcgggaatctggagatgggggatgcgggaaagctccccatgctggcgcatgccatggaaagggaaggctttaccccttcggaaatagaagctgtattctgtaaaaatgtgctccgggtgtataaggaggtcctgtagcgggaaaaactttacacaagttttacattcccatgaggtggattttacttcagtctggtatgctgtttacataggctgtatgccgggaaaggcggtagttggaaaatggaacggatttatattattgaggatgatgaaaacatcatgaatctgttgaaaattgccctggagggctttggatatgcggcggaagggtttgaaaccgcggaggaaggcctggccaggatgagggaggaaaagccggacctggtaatctttgactggatgcttccggggatggacggcacagaggccatcaaggaggtaagaaatacggagcagttaaaatatgtgcccatcatgctcctgacggcaaaggaaaaggagcttgacaaggtggttgggctggactgcggggcagacgattacatggtaaaaccctttggggttctggagctgtcggcccgcatccgcagcctgctgcgcaggaccaaacgggaggaggacagggatgtgctgttctaccaggacatccaggtcaaccgcaagaccagggaggtgtcaagcggcggccggctggtagagcttacactgaaggaatttgagctgttggtttatctgctggagaaccagtcccgggtggtgaccagggatgaactgctcaaccgcatctggggttatgagtacgatggagagaccagaacccttgacatgcacatccgcacccttcgccagaagctgggagaagagggcggtgcctgcattaagacggtccggggcgtgggctaccgtatggtgagataacatgacaggaaaccaaggaggaagacatgcgtaaagcattattggaacgttttatcctggtacttttggcggcgctgtgtattaacagcgtcatcttttatattgccagcagcaaaatgatgttaaaaaactccaaaaatgatatgacctacaccatcaaggccgtggacagcatcctggattatgacagggacttaatggagcagatggagcgcctggaggcgtttacggaccaggattccagcagggtgacccttataaagtcggatggaaccgttgtaacagattctgacgcggatgccgagtacctggacaaccaccagggacgtgaggagatacaggcagccatggagcacggggaggggtatgccagacgctattccaaaacactgggaaaaaccatgctctatgtggcctgccgctctgagtattcagacatggtgctccgcctggccgttccctattccggcatacaggaataccttcccatgctgtttccggcagccattttaagcttccttatggccatggtctgctccgtggtgaccaccaggcgctttgtgtcatcggtcaccagacccctgcgcgatatctcgaaagccgtgatgaaggtaaagggggattacacggagctgcagtttgaaagctgccaataccctgaaatcaacgtcatagccgggaccattatgaatatgtcaaaggacgtaaaggaatatttaagccagattgaaaaggaaaaacagattcgccaggaatttttcagcaacgcgtcccatgagcttaagactcctatcacttccatccagggctacgcggagttactggagagcggcatgattcaggatgacggtctgaagctggatttcgcaaagagaatcaagaaggaggccgctggaatgacagggcttatcaacgacattctgatgatatcccgcctggaatccatggatgccgaggtaatgttttccgatgtgagaatcagcgtgcttctccaggagatcatggacagcctaaagccgctggccgcctcctgccaggtgtttctccatgtggactgcaagcccctgtgtatccgtgctaacctgcagcagatgaaggagctgtttaccaacctggccaccaatgccatcaagtacaaccggcccggaggccaggtgtggattacggtgggggaacagggagatgacatgctggtaagggtaaaggacaacggcgtgggaattccaaaggaaagcctggaccgcatattcgagcggttctacagggtggataagggccgcagccgcaaacagggcggtacggggctggggctgtccattgtgaaacacatcgtgaatttttaccatggaaccatccatgtgacctctgagttagacaagggcacagagtttactgtcaccattcctctcgatatgcataaataagaatggaaatatctgcaaaaaacaccagtttttcactttattactttaaaatcacagaaatttaaagtaataaaattgacggcgcaatttttttgtagtatgataggaaaagtcctgacagaggacgaattcttatgtggaaagaggagatagtattatgaaaaagacatcaaaaatcatgtccctggttttagccggcgccatggttctgtccatgacggcctgcgcaggcaatacggctgaaaccacgtcagctgccgccaagacccaggagacagcagctgatacggcttcaaaggcggaggagacaaccggggcagaggcctcagagagtgagactgctgcaaaggcagagggaaccacctataagattggcgtactccagctggtgcagcacaccgccctggacgctgccaatgacggtttcatcgctgcgttagacgacgctggaatcgcttacgaggttgaccagcagaatgcttccggcgaccagtcagcctgccagacagtggcgtccaagttcgccaatgagaagaaggatttgattctggccatcgccacaccggctgcccaggccatggtgggcgcagtggaagatactcctgtcctgattaccgcagtgacagatccggctgaatccggtctggttgacaccaatgaaaagccgggcgcaaatgttacaggaacctctgacctgactcctgtgaaggagcagatcgacctgcttaagcagctggttccggaagccaagaccgtgggcgtgctgtactgctccgcagagtccaactccaagatccaggctgacatggcaaaggaagccattgcggcggcaggcatggagagcaaggaatacacggtatccagttccaatgagattcagaccgtggtacagtccatggtaggtgccgtggatgcggtttacgccccaacggacaacgtaatcgcagcaggtatggccacagttggaatggtggcaggagacaacaatctgccggttatctgcggcgaggcaggcatggtgcagaacggcggactggctacatacggcattgattattaccagctgggatacatgaccggccagcaggctgtgaaaatcctcaccgagggagcgtcaccggctgatatgccgattgagtacctgccggctgagaagtgcgagctgacagtgaacgaggaaacagcccagacacttgggattgatgtatccggattaaaatagacagtcaggcagctcaggatgatacaggcggtgctgcggggcagagacggtgaaaaccgctttggcctgcagcaccctcttttcggtcatcgggcaaaatggcgtcatcgggcaaaatagcggccatctagcggccatcggataaaatggcgtccggcaaagaaggtagatggtttgctcaagctgtaaggctttcgggaacagcggtttgggcaagctatttacatcatcaaatgatacaaaggaatagagacggaaagggaggtaaatataagatatgaattttgcgaatctgatgcagggcatgggccccaatctgttagatgcagtgggtcagggcgtgctctggggaatcatggtgctgggggtatacatcaccttcaagcttctggacattgcggatttgaccgtagacggaagctttgcactgggaggctgcgtctgtgccacgctgattgtgggcaggggaatgaatccggtggcagccctgtttatagccaccctggcaggaatggcggcgggttttgtgacaggcatccttcacacggtatttgagataccttccatactggccggaattctgacccagatatccctgtggtccatcaacctgtggattatgggaggaagcagcaacattccccttctcaagtccaagtccattgtgaccatggtttcttccgccacgggctttaaccaggcccaggcgtcccaggtcatcggcattgcggcagccatacttatggttgtcgtgatgtactggtttttcggcacggagataggcagcgccctgagggcaacaggaaataacgaggacatgatccgcgccctgggagtcaataccaagtggaccaagctgctggcactgatgctcagcaacggtctggtgggcatgtccggcgccctggtgtgccaggggcagaagtacgcggatatccagatgggtaccggagccattgttattggactggcagccattgtcatcggggaggtgctctttggctggttccgcaactttgcccttaagctgtcagcggcagtcatcggctccgtgatctattttgtcatccgggcctttgtcattaagatgggcatgaatccgaattatatgaagcttttatccgccattgtggttaccctggctctctgtatcccggtagctgccaataaatggaggacctacaaggaatactcggaaggggggaatgtataatgctgatcatgaccaatgtgcgcaaaacattcaacaaaggcaccataaatgagaagaaggcattaaacggcattgacctgaccctgaacgacggggattttgtgacagtcatcgggggaaacggagcgggtaagtccaccatgctcaacatgatagccggcgtgtaccccattgattccggaaagatcgagattgacggtgtgaatatatccaggcagcccgaatacaagcgggccaaatacattggccgggtgttccaggaccctatgaagggcacggcggccggcatggaaatacaggaaaatatggccctggctttcagaaggggccagaaaagagggctgggatggggaatcagggccaatgagaaagactattaccacgacctgctgaccaggctgggacttggccttcagaaccgcatgagcagtaaggtgggactgctctcaggcggccagagacaggcccttacccttctcatggcaacactgcaaaagcccaagcttctcctgctggatgagcacacggcagccctggacccgcagacggccaggaaggtgctggacctgactaatgagatggtgacggagcagaacctgacagctcttatggtgacccataatatgaaggacgctatccagataggaaaccggcttatcatgatgaatgacgggcggattatctatgacgtatccggcagggaaaagcagaacctgaccgtagaggaccttcttgccaagtttgcagaggccagcggaggagagtttgccaatgaccgcatgctgctctcaaagtaatccctatcaggcggtaaaattgccggtttccggggcatttcatgtaaatacttcggggaccggcaaaatttaagaaatttttcacattttcgagtctgtttttatgatatacttaacgtcatatgagcttttatggcgaataatgagttggagattatagaatcatgcttgaacataaggattatctatcgagcctgaacaaggccagaaaaaaacggaatcaacgtctggaccccagatacctggtgcttctgctggctgccatcgcagcagtgggaatcattgtgctgggagtaaagtcagtcaagaagccggtatccggcaaagcagcgggaccggcccccacgggacaggtgggaaacgccaccccggcccaggcggatccggccggtgtttccccggaggaggaagcagctcagaaggaagcccaggagattgacaatgtaatcagctcctacagcaatctgggtatcgtgcaggtgtccggctacctcaacataagggagactccaagcactgacggcaagatcataggtaagctgtcaggagacggagcctgcgagattctggcgacggaaggggactggtcccacatcacctccggcggggtggagggctacatcagcaaccagtaccttctgaccggagacgaagccagggaaaaggcaaaggagcttgtcaagctgcgtgccacggtgacggcggacaacctgaacatccgtcaggcccctgccctggatccgggaaatgttatcggacaggccttaaagggagagcgctacgtggtcaaggggctggaggacggctggattcagatagaggagggatatatttcctctgaatatgctgaggtggcctattccctgaacgaaggacgtaaaatggatatgaaggccatggccatcaaccagtatgacaatctggtgatttccaaggtgaacaactacctgaacgtgcgccaggagccaaagtcagacggcaagattataggtaagatgaccagcaaggcggcaggcgagatcctggagaccctggacggctggtataagattaagtcaggccccatcatcggttatatctcggcagacccccagtacacggccacaggccaggaggcaaaggatatagccatgcagaacgccaccctcaaggcggttatcaacacagacgtgctgaatgtgcgcacggagcccaatacggaggccaaaatctggacccagattgtaaaggacgagcgttatccggttgtggcccagttagacggctgggtggagattgatctggattccgtggatgaagaggacggaagcaaggtggataaggcgtttatttccaccagggacaacaacgtggaggtgcgctacgcgctgaacgaggccatcaagttctcacctgctgaggtggcggccaacaacgcggcgtccaggcgttccaaagtggtgaattacgcccttcagtttgtgggcaacccctatgtatggggcggaaccagcctgacaaagggtgtggactgttccggattcaccatgcaggtcatgaaacagttcggtgtgtcccttccacattattccggctcccaggccaagatgggcaaggcggttacctccggcaacatgcgtcccggcgatttgatattctacgcgggcagcggcggacaggtaaaccatgtagccatctacatcggcaacggccaggtagtccatgcggccagccgtaagagcggtatcaagatttccacctggaattacaggtcgccggttgctatcaggaatgtgttgggcgactagattaaaaaaatggtattttattcagaaagccggtcagcagtctctgctggccggttatttttgcgcgaaactctgtaaaagacagcgcatattttatggttcacggtgcagactatccttaattgatgaatgttcacgaaagggtggtctgattatgggacaaggaaaaaacaacaggaaaaaaagagacagtcaggcggaaaacggaaacggacaggtacgccagcaggacgatgaagccaaaaagcttgaaaaggaaatagaagaaaaggaagacaataagctggaggagtatggccaggtcattctggaggacaaccgcaggcagaggaaaatccatctcatcacgatcattggggaggtggagggacatgagaattcctccgggagcagcaaaaccacaaaatacgaccatatactgccgaagctggctgaaatagaggatgacgacagtgtggacggacttctggtgctgctcaacacttcgggaggggatgtggacgcgggtcttgccatcgcggaaatgattgcgtccctcagtcttcccaccgtatcgcttgtgttaggcggaagccactccatcggggttcccctggccgtgtccacaaattattccttcatcgtgccgtccggcaccatgatgatccatccggtgcggatgacggggatggttataggcacatcccagacctacgagtattttgaaatgatacaggaccgcatactcacgtttgtatcaaatcatgccgatatcgcctatgaccagctgagggagctgatgcataatacaaagatgctgaccagggacctgggcactgttctggtgggaacccaggccgtggaggcgggacttatcaaccaggtgggaggcatcaaggaagcccttggaaagctttatgccatgattgatgatcgggaacgcaggcggtagattccgtcttttgaaacaatccacttgaattttaacctcaaatatagcataatataagttaactgtataaatgagacagcctgctgtgggaatgggaggctgatacggtatgacaacttgtaagagaatgacaggaggctgtatcaagtggctgaaacaacaaaacgacagcagagtgggaacagaaaaccgggaaggccaaagggaagcacgtccaaaaagacaggcacttcctccaaaagccgcgggacatccggaaaaaaggcctatgaacaggataatacggaatttatgagagcagaagtggtcatcatctgctcttttgctgttgccattcttttatttctgagcaatttcaagctgtgcggcgtggtgggcgatgtgctgcgcggagtacaactgggaatatttggaatggtggggtatctattccccatactgatatttgtgggcacctgtttccatctgtccaaccagggaaacatccatgctgccatgaagctggcagccgtggcaggggctgtgattacggtctgcgggctgctgcagctggccttcggtacggttccggccggcgcgaagtggatggaatattataagcagtccaccctgaccggtacgggcggcggatggctgggaggcgtccttacctccttccttaccatcggactggggaagccgggaacctttctggttctggtggtcctgttcatcatctgcatggtatgcatcacggagcgctcttttgtgtctgctgtgaagcggggaggggacaaggcttaccagtatgccagagaggatatggaccggcgcagggagcttcacgccatacgggaggaggagcgcaggcgcatccgcgaagaacagagggtgaggggcgttaatctgaatgccaccaggctgatgacacctgaggaagaggattatgacgaggaggcatttgaccgtgagtttggagcggatctggaggaaatgcctgaaatgcccgatacatacgagaaggactgggggccggcccagacagccggcgcaaaggacagcctgccgccggatgagtttgtgggcaggtttgatccgcctttggagccggggaccgatgccggggattcctacgacacggatgaactgggggccctggccaggtctatagagggccacagccgtttgggacgccgggaagaagcgccggtggtcaccggcattcttgtggaggacgagtatgggacacatgatggggaggactatgacaccatccatgtgaagaaggatttaaagaccctggaggagatggagtttcatgtcaggtcctctgcggacagggacgagaatcctgtaaacggttatggccatgaccggggctgtgaggatacggttccctgggaagaagaatatgggacgtctggggatatggcagaaggagctgccttgtctgctgaaagcgcgggtacggccggccttcacgggacaggactgcacggagccgcagaccatgaggcgggaattcctgaaacggatgttccggaaacagatatctatgagacagacccgtcggaacagggtatcaattatgacagcatatttgtgccggaggagcccaagcgggtggttacggcatcaggcaaggttatagagactgagacagaacttctccagaaaaagattgagaagaagcgggaggaggccggacagaccgattccaatatggcggtggcccaggaaatcaaggaaaaggaagaggcagtaaagaaggaatatgtgttcccgcctactaccctgcttaagaagggggctaagaatgccggttccttttctggggatgagtataaggccacggccattaagctgcagcagactctccataacttcggtgttggggtgacggttacaaatatcagctgcggtcctgccgtgacccggtatgagcttttgccggagcagggcgtgaaggtcagcaagatagtggggctgaccgacgatatcaagctgagcctggctgcggcggatatccgtattgaggcgcccattcccggcaagtcggcggtgggaatcgaggtgcccaacaaagagaacaacatggtatacctgagggatttgctggaagcggaatcgtttaagaaccataagtcacgtctggcctttgccgtgggcaaggatatcggcggacaggtggtggtgacggacatcggaaagatgccccatctgcttattgcaggcgccactggttccggtaagtcggtgtgtatcaataccctgattatgagcatcattttcaagtccaaaccagaggatgtgaagatgattatggtggatcccaaggtggtggagctcagtgtctataacggaatcccccatctgcttatcccggtggtaacagaccccaaaaaggcctcaggggcactgaactgggctgtggccgagatgacggaccgctataagaagtttgcggagtgcaatgtcagggatttaaagggctacaatgaaagagttgaaaagataaaggatatagaggatgacaaaaagccggtgaagatgccccagattgtcattatcatcgacgagctggcagaccttatgatggtggctccgggagaagtggaggatgctatctgccgtctggcccagctggcccgtgctgcgggaattcatctggtcattgcaacccagaggccgtcggtcaatgtcatcaccggactgattaaggccaatgtgccgtccagaattgcttttgccgtgtcttcaggcgtggactccaggaccattattgatatgaacggggccgagaagctgctgggaaagggcgacatgctcttttatccggctggattccccaaaccccagcgtgtacagggcgcctttgtgtccgatgaggaagtgggccgggtggtggaattcctgacagaacagggcatggtggcggaatataatccggaagtggagagccgtgtctcttccccgtccatggacggaggaagcggggcttctgaacgggatgagtactttatccaggctggcaggtttatcattgaaaaagaaaaggcatccatcggcatgctccagaggatgtttaagattggcttcaaccgggctgcccggattatggaccagctggcggaagcaggggtagtgggcgaggaagagggtaccaagcccaggaaagtgcttatgagcatggaagaatttgaggaactgctggagcaggggtattagaaactgttccctgaaagcgcggcgcatgcgggccggagcaggggaacaggggtgtatggggaaacaagagcagcggctgccggcaagggcagcagcggccggtgcttttgaataaaacgttgacggacctgcaaaggcgggaaaccgtggggcgtaatataagaggaggaacaaaaatatgaaatcagatattgagattgcgcaggaggccgtgatgcagcccattaaagaagtggctgctgcttacggaatcggggaggatgacctggagctttacggtaaatacaaagcaaagctgacagatgaactctgggagcaggtaaaggaccgtcccaacggaaagctggtgctggtaacagccatcaatccaacaccggcaggagaaggaaagaccaccaccacggttggtctgggcgaggcatttggaaagatgggaaagaaggccatcatagccctcagagagccttccctgggcccctgcttcggcgttaagggaggagccgccggcggcggttatgcccaggttgtgcccatggaggatttaaacctgcattttacaggtgatttccatgccattacctccgccaataacctgttggcagctctcttagacaaccatatccagcagggcaatgccctggggattgacccaaggcagatccagtggaagcgctgtgtggacatgaatgaccgcgttctgcgcaacatcgtggtgggcctgggagcaaagggagacggcatggtcagggaggatcactttgtcattacagtggcttctgaaatcatggcgatcctgtgcctggcagacaacatggaggatttaaagaaccgtctgggcaagattattgtggcctataattttgcaggagagcctgtgaccgcagagcagctccatgcagtgggctccatggcagccctccttaaggaagcgttaaagcccaacctgatccagaccctggagcacacaggcgccctggtacacggcggcccgtttgccaacatcgcccacggatgcaacagcgtgagagccacgaagacagctctgaagctggcagacgtggtagtgacagaggccggcttcggtgctgacctgggagctgagaagttccttgacatcaagtgccgcaaggcagggcttaagccggacgcagtggttctggtggctacggtcagggcccttaagtacaacggcggcgtgcccaaggaccagctgtcagctgagaatctggaagcccttgaaaagggcattgtcaatctggagaagcacattgagaacctccagaagttcggcgtgcctgtggtggttactctcaattccttcatatccgataccgaggcagaatatgcttatatcaagaagttctgcgaagacaggggatgcgagttcgctctgtccgaggtatgggcaaagggcggcgagggcggcattgccctggctgaaaaggtaatggagacactggagaacaagccaacccagtaccatgtactctatccggatgagatgagccttaaggataagattaacaccattgcaaaagagatttacggagcagacggcgcttcctttgcaccggccgctgccaaggcgttaaagcgcattgaggatatgggctttggaaacctgccggtgtgtatggccaagacccagtattccctgtcggatgaccagaccaagttggggcggcccgcgggctttaccatcaatgtaagggatgcctatgtatcagcaggagccggcttcgtggtggcgcttacaggttccatcatgaccatgccgggacttccgaagaaaccggcagcagacagcattgatgtggatgagaacggtaagattaccggacttttctaggaaatgggcctggcccggcgcatccgaaaaaggagcgccgggccaggatatattttggcataatataagttgcacgaaaaagaaatgaggtattgatatgatacttagaacctggttgaatgagctggattatgaacttgtcaggggaagcctggatgtggaggtcacagaggtggtctacgactccagaaaggcagtgcccggagctgtgtttgtgtgtatggcggggacccgggtggattcccaccggtttgtaccggatgtgctgcgcgctggcgtccgcgtccttgtgacggagcgggacattgaggaggaattggctgcctcaggacttgcggaggatgagatgggccgggtgacaatacttaagacagcagaggccaggagaggcctggctcttctctcggcagccaggttcggttatcctgcgtccaaaatgattaccattggcgtgacgggaacaaagggaaagaccaccaccacccatatgataaaagccattcttgaagcggcaggaaaaaaggtggggatgataggcaccacaggcacggtgatcaatggacaggtgacccctaccatgaataccacgccggaatcctatgaactgcaccagtcctttgcgaaaatggcggaggcaggctgccagtatatgattatggaggtgtcctcccagggaatcaagatgcaccgggtggacggcctcgcctttgattacggcattttcaccaatatatccccggaccacatcgggccggatgagcacgctgattttgcggaatatctctgctgcaaatcacgtcttttgagcatgtgcaggatagggctggtaaacttaaacgacgggcattttaaagaaatcgtaaaggacgcgtcctgccggctttatacgtaccgcgtaaaggaggacggggagacgaaggcagactttgaagcctcaaacgtccggtatgtgtcccggccggattttgtgggcactgagtttgatgtcacagggaacctggacatggatgtccgtctgggaattcccggcctgttcaacgtggacaatgccctggcagccctgtgcgtatgctccttcctgggacttccaaaagataggattgtccacgccctggagcacatacgtgtcaatggacgtatggaaatcgtccacacctcatccaggtgtacggtcctggtagactacgcccacaatgcggtaagcatggagagccttcttaccaccctgcgccagtatcatcccaggcggctggtggtggtatttggatgcggcggcaaccgttccaaggacagacgctactccatgggcgagattggaggaaggctggccgatttaagcatcatcacggcagacaactccaggtatgaaaaggtggaggacatcatggcggacatccggggaagcatagaaaaaacaggaggggactttgttgaaattcctgacagaagggacgcaatccgcagcagcatccttcatgcgcagccgggggatatgatagctgtcatcggcaaaggacatgaggactatcaggagatcaacggcgtgcgccatcatttcctggacagggaagtcattgaagaaaccataaaagagttgggagacgagacacagtatgacaggaataacggttaaggaactgcttgaagccacaggaggaaacctgctgcatggccaggaggatcagcatgttaaacacatcagcctggattccagaaaaatggagggggatgacctgtttgtgcccatagtgggtgagcgggtggacgcccaccgctttctctgccaggcaattgccagcggggcggccgtggtatttaccagcgaacatcactgcggggaggatgttaaagcctgtgtccggcagcagtgcggggaaaacagggagcaggagaggaaagcacttcaggcagcatggattgaggtgtctgacacgaagaaggcccttcaggacctggggagtttttgcaggaaacgcctgagtcttcccctggtgggaatcacgggaagcgtgggaaagaccactaccagggaaatgatagcggaggccctgagcgccggattcaaggtctataagacaccaggcaacagcaacagccaggtgggggtgcccattaccattgcggagatcccgcagtctgctgagattggcgtcattgagctgggaatgagcgaacccggggagatggagcgtattgccagggtggccagggtggactgtgccgtcatgaccaacataggaatagcccacatcgaacagctgggatcacaggaatgcattctggaggaaaagctccatatccaggagggaatgccgccagagggcatattgttcttaaacggcgacgaccctcttctggcctcagtggttcctaaggagggcaggaagaaggtgctgtacggactgggcagggactgtgactacagggcagaggacctgcacctggaagaggggtatcccgtgttcacggcggttcacggcgactgcagggtccgggtgcgccttaaggttatgggaagccacatggtgagcaatgccatggcggccctggcagtggcggatacatacgggctttccatggagaaggcggccctggccctgggacagtttaagggctacaagggacgccagcagatatttgaatggggcggcgtcactgtcattgacgacagctacaatgccagcccggtgtccatgaaggccggactggaggtgctggacagcgtgaagggagaacgaaagattgcggtcttggccgacatgaaggagctgggcccggatacggaaaggttccatgccgaaataggcgcctacataggagaacatccactggacatggttcttttgcttggagagctggcagcctgcatcggcagcggaatggatgcagcccgcgcagcgacgccccatattgaaatagacagtctggcccaggcagaaaagtggctggacgaaaacatcagggagggcgactgcattctttttaaaggctccaacagcatgaagctgtccgaggcagtaaagcatctgaaggaaaccaggtcatgattctatctgagtgcttatatctttccctcattttgggaagaatgtacgatatggacagaaatgtcacagaaagtacattctgaatgagataaggagaaacattgtgatgcagcagaaagatgataaaaagattctctggcataccctggcttttatggctttttcaacggtctggggatttgggaatgtgataaacggattttcggaatacggcggattaaaggccattgtatcctggattcttatatttgccatttattttgtgccctatgccctgatggtgggagagctgggatccaccttcaagcatgccggaggcggggtcagctcctggattcatgagaccatagggcccaagatggcttactacgcaggctggacctactgggtggtccacatgccctatatatcccagaagccgaattccactgtgattgcagccagctgggccctgttccaggacaagagggccagcggcatgaacaccacggtgatgcagattctgtgcctggtcattttcctgtttgccatgtatctgtccggcaaggggatgggggtgctaaagaggcttgccacattggcaggttccgccatgttcatcatgtccatgctgttcattgtcatgatggtggctgctccggccctgacagacggtgccttcttggccattgactggtccccttcgtcctttataccggattttaacgccaatttttttctgagcctttccatcctggtttttgcggtgggaggatgtgagaagatttccccctatgtaaataagatgaaggatccttccagggattttgcaaagggcatggtagccctggcagccatggtggccgtgaccgccatcctgggcaccattgccctgggcatgatgtttgactccaatcatattccccaggacctgatgaccaacggagcctactacgcgttccagaagctgggtgaatattaccatgcggggaatttctttgtggtggtatacgcgctgaccaatctgattggacagttttccgttatggtcctgtccgtggacgcgcccctcagaatgcttttggacagtgcggattcccgctttatccccggcaagatgtttgagaaaaatgaacacggcacctatgtgaacggacacaggctggtgacgctcattgtctgtgtgctgattgtggtccctgcctttggcatcaggaacgtggacgctctggtgcgctggctggtcaaggtaaactcggtgtgcatgcccctgcgatatctgtgggtctttgtggcatacattgccttaaaaaaggccggggatgcgttctgcggcgagtacaggtttgtgaaggggaaaacagcaggcatcctggtgggcggctggtgctttctattcacggcctttgcatgcctgacaggtatttactcagaggatcccttccagctggctctgaatatcgtgactccctttgtgctggtaggacttgggttcattatgccatggatggcagcaaaggagaaaaaaagttaagcttcccgcattgccgtggcgatgtctttatggtacagtagagaggagaaataagagacaaaggagatatcatatgaatatagacaaagaagactgcttaagcacagccaaagaactcatcggttttcttgaaaaaagccccacctgcttccacgcggtacagtccattgcggactgtcttgaggaggcgggcttcacacagcttcatgagggagaaaagtgggaactcacagagggcggcgcctactatgtgaccaggaacggttcatccattgtgtcctttaaggtgccgggaaaggcattttccggtttccagatcatggccagccacagtgattccccctcctttaaaatcaaggaaaatccggagatggaggcagagaaccactatgtgaagctgaacgtggagaaatacggcggtatgctgtgcgctccctggtttgaccgtcccctttccgtggcaggccgtctggcagtgaaggagggaaaccgcattgccacaaagctggtaaaggtggaccgcgatctgcttatgataccaaacctggccattcattttaaccgtgaggtcaatgagggctatcagtataatgcccaggtagacatgctgcccttatacggcggtgcggacgcaaagggaacctttatggagactgtggctgagagcgcaggggtcaaaaaggaggatatcctgggacacgatctctatctctacaaccgtgtgcccggaagtatctggggggccggcggggagttcttatcctgcggccatttagacgacctgcagtgcgcattttccaccttgaagggattcttggagggcggccatccggagtgtgtaagtgttcacgcggtatttgacaatgaggagataggcagcctgaccaagcagggagctgactccaccttcctggaggatgtgctgaggcggattaacagcgccatgggaagaagcgaggaggagtatttgatggccattgcctccagcttcatggtctccgctgacaatgcccacgcagtccaccccaaccatggagacaaatcagatcccgtaaaccgtccctatatgaatgagggaatcgtcatcaaatacagcacaaagtacgccacagacggactttcagctgccgtgttcagggcactgtgccaggaagagggagtaccctgccaggcatttaccaaccgttccgacaaggcaggaggctccactctgggaaatatttccaacagtcatgtggctgtgaacacagtagacatcggactgccccagctgtccatgcattccccctacgagacagtgggaatcaaggatacctgttatctgattcgggccgcaaggaggttctacagcacctctatgaaggccatgggttccgggagctacgaagtgcggtaatgaatgcagaaaaacaataaagggcaggccctggcctgtcccacggatacccagccacagacctgagaggaaaaagcgcctccgggtattatggctgggtatttgctggaactatgagagaaagaggaacgtaagatatgttttccagaaaacaaatgataaaacttctggccccccttattgtggaacaaatcatggcagtgctggtgggaatggtggacgtggtgatggtggccgcagtgggggaatccgcggtctccggcgtttccctggtggattccatcagcgtcttaatcatacaaatcatgggagccctggctaccggaggcgccgttatttcggcccagtacctgggcaaggagcagcccagggatgccagaaaggcagccgggcagctggtcctggtgaccttgcttctctcagtcatcattgccgggacagctcttgcagggggacgccacctgctgggaggtatatttggaaaagtggaacaggatgtaatggacaacgcccagacctatttctggatcacagccctgtcatatccatttatcggactctacaatgcctgcgcagccctgttccgttccatgggcaactcaaaggtatccatgatgacttcctttgtcatgaatatgattaacattataggaaatgcaatctgcgtgttcggccttaagatgggtgtggccggagtggcctggcccaccctcataagccgtgtgacagcagcctttatgatgtttgtccttatacagaaccggaacaataccattcgtctcaacagctggaagttcctgattccggaccgccatatgataaagaatatcctgtccatcggaattcccaacgggctggaaaacggcatgttccagtttggcaagatattccttcagagccttgtctcctccctgggcacagtatccatagccagctttgccgtggccagtaacctggtgaccgtgctctatcttccgggaaatgccatcggtttaggactggtgaccatagtgggccaatgcgttggcgcaggccgtctgaaggaagccaagagcgacaccaaatcccttattatggtggtctatggaatcctggccgtattcagcacagccatggtcatctggtccggtccgctggtgggaatctatcatctgtccccccaggcagcccttatggcccgtgagctgatcctgatccacagcatagccatggttatatggcccctggccttcaccatcccccatgccctgagggcctccttggacgccaaattcaccatggcagtgtccgtattctccatgtgggtattccgcatcgggtttgcatacctctttgtatacatattcgacctgggactttccggggtatggtacggcatgttcattgactggatattcagggcattgatgttttcgggaaggtttaaggggtttgagaggagagcgggggttgtggagtgagaggattgggaggttgcgggaggcggtggaatcgcgtccgtgggagcaagggggaaggaacctggggatacggcttcggggcaagtccggtctaaggggctggaaaacggctgaaagcaagagtcagaccgcccaaactcgctgcgctcagacagctgtgcggtctgactcttaacgcctttttccaccccctaagaccgactaagcccctgcagatgcatccccagcttccttcccccttgctcccacccactacgtataataggtctcccggtacttcactgcacaatcagagaaatgggtgtaccttcctctggggatttcctgatgctgtttaaaatagaaaatgattgttttgctggtgggtgcggttaattccattgcggatggatgaaccgcactttttagtgaggaagggggagtgtaaattataaaatattgaatagggcttgacagttgttgattgttatgtaacaatggttgtataacatttgttacataacgttttggcacaaattttgtaacatatcggatgtggtgcaactgatgggatgcatgtgatggtacatgtgtaaagctgctgatataatatgacaatgagcgaggtaagccgatgccgcctaaagcgaagattacgaaagagatgattctgaatacggttctggagattacaagagaggcaggatttgagtctgttaatgccagaagtatttcaggcagattacaatgttccacgcggcctatttttacatgttatgagaacatggaggaattaagaaaggaatttcttgactttgcatatgagttttacagtcagtatgtggagagttacagcagttcggaacacataaatccatgtctggttctgccgctttcgtacattgagtttgcgagagaggagacgaacttgttcaggctgttgtttataaaccatatggatttgagtatggcggagccaaaggatttttatatggaggcaggcaacggggagagggaaagggtattttctgataccattggaatcgagccggagcgggcaaaggcaatctttatagatttatttctttattcccacggcatagcggttttagcagcggcgcaaaaaataacactggacagaagccatatagaaaaaatggctgcaaacatgctgacagctctcataagacaggaaaaaccggactggaccttatccgttagcggtataaccgaatcaatataacataggggtgcgatatgaagacaaatccatacatcattgattattataataactatgacgaggacagccggctgagcccaaggcatgggaccgtggaatttcttacaaccatgcgctacatagaaaaatacataaaacccggcagccgtgttcttgaaatcggagcaggaaccggccggtattcccatgcgctggcgcgtctgggatatacagttgacgcagtagaactggtcccccataacatagaagtattttgcagtcatatgctgccggcagaacatataacaattacccagggcaatgcgctggacttatcagccttttcggacaaccaatacgacatcacactgctgttagggcccttataccatctatacacaaaaaaagacaagcgccaggcgctgggcgaggccatccgcgtcacaaaacagggcggcatcatctttgcagcatacgtcatatccgacggctgtcttctggacgaaggattcaaccgcggcaatatcaatgcagccgaatacataaaaaacggcctgctggaccccgaaacattcgccgccaaatccgagcccaaagatctgtttgaacttgtgcgtaaagaagacatcgacgatttgatgtccatattcccgacaacacgcctgcattacgcagcagcagacggctgtgcgctgctcatccgggaagcaatcgacaaaatggatgatgaaacattccaattatacttaaaataccactatgccacctgcgaacgcaaagacctgacaggcatcaccagccatgcaattgacatattccaaaaacaaaccactcctcccaaaacaagccaatcccaataaagaatactcccagcgagcagtatctttcactcccttggcggggaagaaccagcaaacgtcaaaagagcagtgggtgagagggaggcggacgggggcgggagtgaatttggagcggttcgcagggacttaggcggcggggcgggccagaggggaggttgcgcagggcgctcaacgcccggagcaaagtgaacacggagcagaactcatcaagagttctgcgcagttttcgcgatcctcccctctggcccgccccggcgtcttagtccctgccgccgcgaaaaccatcactcccgcccccgtccgtctccctctcacggacgcgatcccccatccccgtttgcgtccccttcccccatttgcattttattcaattctcatgtataataaccaagtacaaaataacaagacagacaggtgacgtaagtggcgcatagatatgccagtattatcatagatatttcccatgaaaatgtggacaggacattccagtacaggataccggaggagcttcagggaaagattcaggtggggcagcaggtccgcataccctttgggcagggaaacagacagcgcaggggctatgtggtggacctgacggaccaggcccagatagatgtccataaactaaaagatgtggctgggattgtgcagggaagcgtggctgcggagtcccagcttatttggctggcctggtggatgaaggagcggtatggctccaccatgaatcaggcgttaaaaacagtcctgcctgtaaaacaaaaggtcagggaggctcccaagcggagaatccgtaccctggtggacaggggtgtgcttgaagaactggcggaggaagccgggagaaagaagcataaggcaaagctgcggcttttagaggcgctgcttctgacaagcgctattccgtatgaggaggctatgaaccggctgaaccttacgccgtcagccatcaagcctcttttggaggccggcgtcattgccgtagaggtggtggaaaggtaccggaatcccctggaggaaatgaagctgcttatgggcagccgggagaggaaccaggctgtttcggatgatcgggaatcaggactgtggggcgcgccccctgaactgaatccgtttcaacgggagatcgcggatgctgtcataggggaatacgaccggggaatccggcgtacctatttgcttcacggggtgacgggaagcggtaagacggaagtttacatggagctcattgcccatgtgctgtcggcgggacgtcaggtgattgtgctgattccggagatttcacttacctggcagaccgtgatgcggttttacagccgttttggcaaccgggtatcggttatgaattcccggatgtctgccggggaacggtacgaccagtatgaacgggccaggacaggcgatattgacattgtcattggtccgcgttccgccctttttgccccctttgaaaacctggggcttatcatcattgacgaggagcatgaaaatgcttataaaagcgaactgtccccgcgttatgatgccagggaggcggccgcaaagcgggcccagatgaacgaagcctcacttgtgctggggtcagccaccccatccctggaatcctacacaagggctataaggggagagtatgggctttttaccctgaaggagagggcaaaggaggatgcctgccttcccctggttgagatcgtggatttgcgggaagaattaaaggaggggaaccgctctattttcagcaggcgccttaaggctctgatagaggaacggctggagaaaagagagcaggtcatgctgtttatcaaccgcaggggctatgccaattttgtgtcctgccgttcctgcggcgaggccgtcagatgccctcactgcgacgtgaccttgacactgcaccgggatgggcgcatgatgtgccattactgcggctactccattccccagcccaagaaatgtcctgtctgcggctccccgtatattgcgccttttggcaccgggacccagaaaattgaggcaatggcggcagagcttttccccaaggccaggattctcaggatggatttggataccacctcaaaaaagggaggccatcaggagattctttcttcctttgccaggggagaggcggatatactcataggcacccagatgattgtcaagggccatgatttttcaaaggtgaccctggtgggggccctggcagcggatttatccctttatgcctcggactacaggtgcggggagcagacctttgcccttctgacccaggcagccggacgggcgggaagagggcagctggccggaaatgtggtgatacagacctatcagccggatcattacagcatacgcaccgcggccactcaggattatgagagcttttacagccaggagatggcttacagaaggttgctgggttatcctccggcagtggccctgctcaccgtgcagatggcgtgtcctgcagaagggaccctggcgcagacagcggatctggcggcagggtgggtgcagcagtgggcggaccgcatggagcgggaaaaagtacagggatacaagtctttccggctcataggaccggtcaatgcagcggtatacaaagttaatgatatttatagaaaaattttatatattaagcatgaaaattatgatatactgataca

SEQ ID NO: 3242 - DNA, 4695 bp, Unknown
  gut microbiota DNA sequence
tatccagagaccacttgtccaggatattcaggacgtgcatgggcaccacattcaagaaacatctgaccagaaccaggatgtaccatgcctataagctgctgatccacacggaccttaccctgttggagatatccatgaaatgcggatttgcggacagccggtccttcattagcagcttcaagcaggtttaccacaccacaccgtccaaatacaggacatccctggaagggatcagcgatattgagaaccgggcagagaacagaaaggcggagttttttaaggacagggcaggtgacccgcggtaaaaaaacggaaaaagaaagggcagaaccatgaaatgttagacgaaatggaaaaaatgataaataatttctttttctttgcaaattgacctaactatgctataatagccacagatatcgcaacaaggagataaaatctttatgaagatgaaacgcgtattcttaaagttaagcggagaggcccttgcaggccctaaaaagaccgggtttgacgaggacacggtgaaggaagtggccaggcaggtaaagctctctgtagatgccggtatacaggttggaatcgtcattggcgggggtaatttctggagaggccgtaccagtgaggccattgacaggaccaaggcggaccagattggtatgctggccactgttatgaactgcatttatgtttctgagattttcaggaatgcaggcatgatgacacagattcttacgccctttgagtgcggttccatgaccaaactgttttccaaggatagggcgaataagtattttgaaaagggtatggtggtattctttgcaggcgggacaggacatccctatttctccacagatacgggaattgccctcagggccattgagatggaagcagactgtatcctgttggccaaggccattgacggagtgtatgacagcgatccgaagctgaacccggaggcaaagaagtacgacaccatttccatacaggaagtcattgacaggcagctggctgtggtggatttgactgcgtctattatgtgtatggagcataagatgcccatggcagtgttcagtctcaatgaaaaggacggaattgcaaacgccatgcagggccggattaacggaaccatcgttactgcgtaataaaacgaacattattaagcagcagggaaggctgcattaacaggaggaacttatggaagaattaaaagtttatgaggacaagatgaataagacactggatgtactgctgtctgattacggcaccatccgcgcaggacgtgccaatccccatgtgctggacaagattaaggtggactattacggcacccccacacccctccagcaggttggcaatgtttctgttccggaagcccgcatgattgtgattcagccatgggagaagagtcttcttaagccaattgagaaagccatcctcacatctgaactgggcatcaacccaactaatgacggaaactgtatccgtctggtgttcccggagatgacagaggagcgcagaaaggaagtttccaaggatgtaaagaaaaagggcgacaatgcaaaggtagccctgcgcaatatccgccgtgacgccaacgaggcctttaagaaggcagagaaggcaggggatatttctgaggatgatctgaccgagatgaccgagaagatgcagaagcttacggataagatggtggaaaaggttgacaaggcagtggaagaaaagaccaaggaaatcatgaccgtgtaatctgtgataaatgaatatgggaggcaggagggactcctgcctcttaatttgtttttgataccggaaagatataacatgataaggatattatttgggcaagttacttttagacaagaaaggcagagaaagaatggcattagataaggatatgatcataccggagcatgtggccctgatactggacggaaatggccgctgggccaaaaaacgggggcttccccgcaccctggggcacaaggaaggatgtgtcaccgtggagaaaaccgttgagattgcagccagaatgggaatcaggtatctgactgtctatgggttctccaccgagaactggaaacgttccgcggaggaagtaggggcgcttatgcagctgttccgctactatatggtgcggcttttaaagatagcgtctgccaataatgtacgggtaaagatgattggcgacagaagccgctttgacagggatatcatagacggcataaaccgtctggagtccgagacacaggataacacaggtctgaccttcgtcatagctgtaaattacggaggcagggacgagatccgccgggcggcggccgggctggcaagagactgcgcccttggaaaggcggatccggaccaggtggatgaggcgctgtttgcatcatatctggatacggcgggaatgccggacccggaccttttaatccgcacaagcggggagctgcggctgtccaattacctgctgtggcagctggcctacacggaaatcgtggtgacggattgtctctggccggatttcaatcaggaggaattagaaaaagccattgtgcagtataataagagagagcggcggttcggcgctgtaaagtaaggagagggaaaggagaaggccatgtttacgacccggttaatcagcggtatcatactggtgcttctgtccattgtcattgttgggcagggaggaatcctgctatatgccgttacggcccttatatccatcatcggtttatttgagctttacagggctctgggaatgcagcggcgttccctggctgttgtgggctatgtgacggcctgctcctattatggacttttgtggttcgagggacagcgctatgtgacgcttatgattatcgcctgcctgatggcgatgatggccctttatgtgcttaccttccctgagtataagacagaggaggtgacgggcgcgttctttggcgtatgctatgtgcccatcatgctgtcatttctgtatcagacaagggacatgagcgatggtgcatacctggtgtggcttatatttttaagctcctggggctgcgatacctttgcctactgtacaggcatgcttttgggcaggcataagctggcccctgtcctgagccccaagaaatccattgagggggctgtgggaggcgtggccggcgcggcccttctgggctttatctatgcatcccttttcggagccagcatggcggagcttgataatccccaggcggcctgtaccattgcctgcgccattgcggcggttatttcccagataggggatttggcggcttccgctattaagagaaaccacaacataaaggattacggccatctgattccgggccacggaggtatcctggaccggtttgacagtatgatattcacggcccccgctatttattttgccctcacatttttaaaataaggatgggctttttgagtatttcttcaggatagggagaatataagttatgatgaagaagattgcaattctgggttccacgggctctatcggcacccagacattggaagtggtgagatacaataaggacatccaggtgacggcccttgccgccggcagcaatgtaaagcttttggaggaacaaatccgagagtttaagcccaggctggcctgtctctgggatgaagagaaggcaaaggaactgcgggccgcagtagctgatatggatgtgaaggtggcaagcggcatggagggactgatggaggcagccgtgtcgccggaggcagacctggtggtgacggccgtggtggggatgattggaattcgtcccaccattgccgccatggaagcaggaaaggacattgccctggccaacaaggaaaccctggtaacggccggccatatcatcatgcctcttgccagggaaaagggcgtgaagctgctgccggtagattcggagcactctgctatattccagtgcttacagggagcagccggcaattcccttcacaaaatactgctcactgcctcaggcggtccgttccggggatttaccagggagcagctggaaaaggtccggctggaggacgcgttaaagcatcccaactggtccatggggcataaaatcaccatagattcctccaccatggtcaacaaggggttggaggtcatggaagcccgctggctgttcggggcggagatggaccaggtgcaggtggtggtacagccggccagcatcatccactccatggttgaatttgaggatggggctgtcatagcccagttaggtacgcccgatatgaagctgccgattcagtatgcgctctattatccggagcgccgtttccttccgggggaccggctggactttgaaaagcttacaaagatttcctttgaggtgccggatatggagacgttcaggggccttaagctggcctacgaggcggggcgcaggggcggtaccctgccaactgtgttcaacgcggccaatgagatggcagtcgccatgttccttgagcggaaaatcaattacctggccatcgtggatatgatagagggggccatggagcatcactgtgtaaagccctcccctgacgtggcgcagattctggaggcagaacaggaaacttacgattatctatcatcaaaatggaattaagacagaaatggaattaagacagaaaggaggcgcacgccgcgcgtaaaaagggcggcggagcgccggatggacaggtgag

SEQ ID NO: 3243 - DNA, 18049 bp, Unknown
  gut microbiota DNA sequence
atataatagtgatatatatatttcaaccactttcaattggtatctgttggacggttccttcctgtaacctgacaggacagggatgtcacaaaaaaggagttttgactatgaaagaaaagaaaatcatgttaccgacaatggctgaggcaaagaggttcgttgatgaagctacgaagtgtgactttgatattgatgtattctataatcgtgtaaccattgatgcaaagtccattctcggggtgctgagcctggacctgacccggattctgaccgttcagtttaacggtgagaaccagggatttgaggagtatctggaaactatttccccggaagccaatgcaagcgctgcctgataggggcgcggattaagaggcggattgcgaacacctgtttgcaatccgcctctttttatggtatgatatcctatatcatatatggagtggacaggggaggaagaaagagttggggaatcattcgcagccccagatacgcatttcggtgcggaacctggtggagtttgtaatgagaagcggggatctggacaaccggaggacagctggggccaagaaggaggccatgcaggctggcagcagactgcaccggaagattcagaaacgtatgggaacctcctaccgttccgaagtgatgctgcggcatcaggtacaggaggacatgtttgatatcctggtggagggaagagcggacggaatcatcaccgagcctgccggagtcaccattgatgagattaagtgcatctatatggatgtatccaggctggaagaaccggatccggtccacctggcacaggctctgtgctacggctggttttacagcacccagaatgagctggaaaccatcggcatccagattacctactgtaacatagagacagaagaaatccgccggtttaaggaggccaggagctttgaggagctgaaggcatggtttgaggggctgattcatgagtatgtcaaatgggccagatatctgtaccaccatgggatccgccgccaggagtgcttaaaggaactgccttttccttatccctacagggaagggcagaaggagctggccgggaatgtgtaccgctccattgccagaaaacgcaacctgttcatccaggcgcctaccggggtgggaaagaccctgtccaccatctaccccagtctgaaggccatgggcgagggccacggagagaagctgttttacctgactgccaagaccattaccaggagcgtggcggaggaagccttttccattttaaggcgggaggggaatctctattttaatacggttaccatcacagcaaaggaaaagctctgcgtcatggaaaagccggactgcaatccccaggcatgtcccagggccaagggccactacgaccgggtcaatgacgctgtctacgaaatcatccaggaggtggacggcatcaccagggacaaggtgctggagtatgccgaaagatttaagatatgtccctttgaattctgtctggatatcagcaactgggtggacggcatcatatgcgattacaattatgtctttgatcccaatgtaaagctgaagcggtattttgaccagggggagccgggccaggggtacctgtttctggtggatgaggcccataatctggtgcccagggccagggagatgtacagcgccagccttataaaggaggatgtgcttctgacaaaacgcattttaaagacacagcccggagcggcaaaggtcattgcccagctggataagtgcaaccagcggttcctggaattaaagcgttcctacggcggggatgagggagagcgcaggaccgtgctggggagcacctacgagctgctgccggatgtgaatgttctggccctgaacctgatgaccatgttcggggagctggaaacctttatgaatgaaaacatagaatttcccgatcgggacctggtgctggagttctactttgcagtccgggattttctgtatgtgtatgacaggctggacgagagctacaggatatatgaccagattctcgcggacggcagttttatggtaaagctgctgtgcattaacccggccgtgaacctgaaggagtgcctgaacaagggcgtcagcaccctgtttttctcggccaccctgctacccatccagtactataaggaacttttaagcggcagccaggaggaatacgctgtctatgcaaagtctccttttccagaggaaaaccgcatggtgctggctgccagtgatgtcagcagccgttacagccgcagggggccttccgagtatgagaagattgtggactatatatgccgggtggtggagggaaaaaaaggaaattatatggtattctgtccttcctaccagtatctccatgccatagaggatattctggctgccagggaggcgtcgggagccctttcttttatctggaacgcccagacaaaccatatgactgaggaggacagagagacatttctgcatagctttgaggaggagcgggattgctccatggcagccttatgcgtcatgggagggatattttcggagggaatcgacctaaaagaagagcgccttatcggcgctgtgattattggaaccggtctgccccaggtgaacacggagcaggagattctaaaggaatattttgatgaacatggggaacacggctttgactacgcataccagtatccgggtatgaacaaggtgatgcaggcagccggccgggtcataaggactgtccatgacaggggaatcatcgccctgttagacgaccggttcctccgcccggagtacgtggccctgttcccaagggaatgggggacctacaccgtggtcaaccgatacaacgtggaccaggctgtgagggcgttttgggacggggcggtatagccggccttggcggtatccctggggaccatggcagacggctgtttcctataacatatccatgaactgtctggctgcctgggatacgggaagactttcgttgtaggccaccatcatctggcgggaggggagctgttccttcaaatccaggatgaacaggtcctcgtcatttttagggatacagaagtcagggacaaaggcaattcccaggccaatgcgggccaggtcgatgagcaggtcgttgctggacaattcgatttccggcaccaggtccagctggcttttctggaatacctgatgaaggaattcgctggtggtgctcttgcggtccagcatcataatgggataccgcagcagctcctccagggccagtttagatcccttcaggggaaatgcgctgcggctggccacgaacacatcatggaattcattgataaccctggtattcatgctgccggccagggcggaattaggatagtttgcaatgatgaagtcggcctgcccgttttccaggaaccttgcacattcaatggaggtctggttaatgaccttgatatggatgtttggaaattccttgtggaagcggttcagataggggaccaggtagtaacggcatatggtgtcgctggctccgatacgcagctgtccgccgtttagggtatgggcctccagcagctggttctctcccttttttatgagattcatggcaggttcaatatgttttaacagaatctccccttccggggtgagctgtactttttttgtgcttcggatgaacaggggctggttaagctttttctccaggactttaatggactggcttacggcagactgggagataaagagctgcttggaagcctcggaaaagctcagcgtcaccgctacatggtaaaataccttataaagttcatagttaatatccattattaagtcctccttataaactaagcatatcttatcacgattgccgggactttgtaaagagggaaacttgacttatggtctgccatggattatcctattaaggattataaaaggaacatgaaattctggagagttgaaaggatagaagcatgatggaacacgatttttttgatatgtatttggaagagatgagaagcattacaccgcttgaaagggatgaaatggtttctgtccttgagggaacagccaggggcgacgcaggggcccgcagccgcctggtggagggctgcctgggggaagtgctggagatggtgagggaatacggggacagcgagcttcccttatcagatttggtccaggaggccaatacagccctgatgctggccgccatagagtacgatggcagcgaaccctggaatgaacttatgacacgccgggtaaaggaaagcgtggagctggccctggaggagcagagaacggagaaccagattgaggaaaccatggctgccagggtcaatgtgcttcagaccgtgtcccaggtgctggcaaaggagcttggcagggaggcgaccctggaggagctttccgctaaaatgaagatgagtgaggatgaggtcagggacatcatgaagctggccctggatgcgctgaccgtcaatggagaaggccaggcggcggcttccggccaggatgaggaagaaagcccaaatcctgtgagaaacggctggaatttggaggaaggcctgtaggacgcaggatggcaggaggtaaaaacagatgaaactctatatcatacgccatggacagaccgactggaatgtacagggaaggatacagggaaggcaggatatcccgttaaacgcagccggccgcagccaggctcagatgctggcaaagggaatggagaaacggcctgtgacagccatttactccagcccccagctgcgggccatggagactgcaatggcccttgccgggaaccagggggtggaggtcatacccctgccggagctggtggagattggatacggcgactgggagggaaggactgcttcggatatattgacaaaggaacgaaagctgtatgaagaatggtggcagcatccggccacggtggcgcctcccggcggagagacactgaaccaggtggatgccaggtgcaaaaaagcctgggagcggataaagggggagataaaaggggacacggctgtggtggcccacgggggaacgctggcccattttattgtccatcttctggagggccagccggatgcagctgaaattgttgtgggaaatgccagcatcaccaccatagagtatgacccggttaccggacagtgcagtctggaagggttaaatgactgcagccatttattgtgaaaacattgacataatttttaggggaacaatgttcaaaacacttgcgttccatgggggaatatattaaaatgagagcagttttgtaagcgcttacaatttaaaaggaggtatttctatgacagaggtaagaggtaatgtaatcgtagggcagtccggcggccccaccgcggtgattaattccagcctggccggcgtgtttaagacagccaaggacaggggagccaggaaggtatacggcatgcttcatggcatacagggacttctgcaggagcggtatgtggatctggaggagcacatcaagtctgatctggatattgagcttttgaagagaacgccctccgcgtatctgggttcctgccgtttcaagctgccggagatatgtgacgaccgggagatatatgataagatattctccatcctggacaagctggaggtggaatacttcttctatatcggcggcaatgattccatggacaccatcaagaagctttctgactattccctgttaaacggcagtaagattcgcttcatgggcgtgcccaagaccattgacaatgacctggcagccacggaccataccccgggatacggaagcgcggccaagtatatcggcgctattacaaaagaggttatccgggacggccttgtatatgaccagcagaacgtgaccatcctggagatcatgggccggaacgcgggctggctcacaggggctgctgccctggcaaagggagaggactgcgaggggccggacatgctgttccttcccgaggtaacctttgacgtggattcctttatgaagaaggtggaggagctccataagaagaaagcatcggtggtggtggctgtatccgagggcgtgaagctggcagacggccggtatgtgtgcgagctgacagacggcattgagtttgtggacgcgttcggacataagcagcttaccggcacagcccggttcctggcagaaaaagtcaaccgggaagtgggatgcaagacaagggccattgagttcaattcccttcagcgctgcgcctcccatatcgtgtcaagggtggatattacggaagccttccaggtaggcggtgctgccgtgaaggaggcatttgagggcgagaccggcaagatggttattctcaagagggtgtccgacgatccttacgtctgtgtaacggatatatacgatgtacataaggtggccaacgtggagaaaaaggttcccagagagtggattaatgaggcgggggattatgtgaccgaggaatttgtgaactatatccgtccattgattcaggcggagctgacgcccattatgacggatggcctgccacggcatttgtattatacggatgtggagagaaagtagggattagaagtctgagctgaaggggaatgggggaagagtacgttcatgaagaggcggggggcagtgcctgcgccgtcccccgtctctccggggactggggagttggccgccggcagccgggctgatagggagcggctgccggcagcggaatcatcagtggtatagcttcttatgttcatataccggctcagacgttagctggacgcccagcttgctgaataccttaatatctacgtcggacaacatgacggatgtgtggacctggcagccccggagtttcggaagctgtgccagggctttttttgcggtttcatccgtggccgcgctcatgctcagggcaatgagtacctcgtcggtgtggaggcgggggtttttgcttcccatgtattgggtctttagggtctggatgggctcaatagccgatggggcaataaggtgtatattgtgggggatgtctcccaggaccttaatggcgtttaacaggagagcggcagaggctcccaacaggctgctggtcttgcctgtgacaatggtgccgtcatttaattccatggctgctgccgggccgccggataccttggaccgctccagacagggcgcaatcaccgcgcgcatggtggagtcaatttttgccttattcattaaaaggttgattttataaacttcgtcggaagtcccttcctccttggccagacggttgagggcatggtagtagcggcgaatgatttcctgtttggatgcttcgcagcaggcttcgtcgtccatgatgcagaagccggccatgttcacacccatgtctgtgggagatttgtaggggctttctccgtatatgccttcaaagatggcgtttaatacagggaaaatgtccacatcccggttgtagttcaccgtggttatgccgtaggcttccaggtggtaggggtctatcatattcacatcgtttaaatcagcggtggctgcctcgtaggctaggtttaccggatgctttaaaggaagattccagatggggaaagtctcaaatttggcgtagccggccttgatgccgcgtttgttctcatggtacagctgggagagacaggtggccatcttgccgctgcccggacccggagccgtgatgattaccagggggcgggtggtctcaatgtaatcgttcttgccgtagccttcgtcgctgacaatgaggggcacattgctggggtagccttcgatacagtaatggcggtatactttgatgtcacggtgctccagcttggttttgaactggtcggcgccgctctggccgctgtactgggtgatgacaacgcttcccacatagaggcccttgtcacggaactcctgtatcaggcggagtacatcctcgtcgtaagtgatgcccaggtcgtggcggaccttgttcttttcaatgtcagccgcattgatggcaatgaggatttcggcctggtcagccatttgaaggagcatacgaagcttgctgtccggtgcaaagccgggcaggaccctggaggcgtggtagtcgtcaaaaagctttcctccgaattccagatacagcttgtctccgaattccccaatacgctgtttgatgtgttctgactgcatggttaggtatttttcattatcaaatccgattttcatttcttctgtaatctcccggttttttataatcacatacttttttagtatagcacaactttcaggccttcgctacaaggagttttgaggggattatttgaatatttataagtgatgaatatatcaatgattaaatatattaattttactaatttattatttttgtgttatgataggaacagataaaagggcaagggtcctttttgtgttgtgtattaatgaaaaggtcatgatgagagcaggaggttgctaaatgagcgtaagacgaatatttgtggagaagaagccagcttatgcagtaaaggcaggggagcttcgtgaagaactggaaaattatctgggcatccataatgtgaaaaatgtgcgggttttaatccgctatgatattgagaatttgtcagaggagacctataaaaaggcgctggtgaccattttctcagaaccgccggtggacttggtttacgaggaagaatttaccaggaatccgggagacctggtgttttccgtggaatatctgccgggacagtttgaccagagggcggattcggcagagcagtgcgtgaagcttctgaaggaggatgaggagccggttatccggtccgccaccacctatgtggttacggcgcccctgaccgcagaacaggaggaggcgatcaagagcttctgcatcaatccggtggacagccgtcaggcggatgaggagaagccggaaaccctggtgacggaattcgaggttccggaggatatactgtattttgatggatttgcggattcttcagaggaggagctgaaagctctttacggcaccctgaacctggccatgacctttaaggacttccttcatatccagaattattataagaaggaagagcacagggatccgtctgtgacggagatccgtgtgctggatacctattggtcggatcactgccgccataccaccttttccacagagcttaaaaatgtaagctttacggacggcgattacagagagcccatggaggaaacctataagcagtacctggctgaccgggaagtgatttataagggaagggacgataagtacgtgtgccttatggacctggctcttatggctatgaagaagctgaggagcgagggaaagcttcaggacatggaagtttctgatgaaatcaatgcatgtagcatcgtggttccggtggagattgacggtgcgacagaagagtggctggtgaattttaagaatgagacacacaaccatcccacagagattgagcctttcggcggcgctgccacctgtctgggaggagcgatccgcgatccgctgtcagggcgtacctatgtgtaccaggctatgcgcgttaccggcgcggccgaccccaccaggcctcttggggagacgcttaaaggcaagctgccccagagaaagattgttaacagcgcagcccagggatattcctcctacggcaaccagattggtctggcaaccggttatgtgaaggagatctatcatcccggctatgttgcaaagagaatggaaatcggcgctgttatgggcgctgctcccagaaaggatgttatccgcgagacctctgatccgggggatatcatcattcttttgggcgggcgtacgggccgcgacggaatcggcggcgctaccggttcttccaaggttcacaccacttcctccatcgaggtatgcggggctgaggtacagaagggaaatgcgcccacagagcgcaagattcagaggatgttccgcaggcctgaggtcagcagaatcatcaagaagtgcaatgacttcggcgcaggcggcgtatcagtagccatcggagagctggctgccggccttaagattgatttggacaaggttcccaagaaatatgcgggcctggacggcacggagatcgccatttccgagtcccaggagcgtatggcagtggtggtggatccaaaggatgtggaccagttccttgggtatgctgcagaggaaaacctggaggcagtgaccgtggcagtggtgacagaggagccaaggcttaagatggactggcgcggcaagaccattgtggatctgagcagggctttcttggacaccaatggggcacatcaggaggcggacgtgaccctggaggttccaggccgggcaggcaacctgtttgataaggcagatgtggctgacgtcagggaaaaatggctgggcatgctttccgatctgaacgtgtgctcccagaaggggctggtggagcgttttgacggctccatcggtgcaggctccgtgttcatgccttacggcggcaggtatcagctgaccgagacccaggctatggtggctaaacttcccgtgctgaagggacatacagatactgttaccatgatgagttacggctttgacccaaggctttccagctggagcccataccacggcgcggtgtacgcagtggtttcctccgttgcaaagatcgtggcggccggcggcgattacagcaggattcgtttcaccttccaggagtatttccgaaggatgaacgagaacccatccaggtggagccagcccttctccgcacttctgggcgcctacagcgcacagctgggctttggcctgccctccatcggaggaaaggacagcatgtcaggcacctttgacacggaggacggtgaaatcaatgttccgccgaccctggtttcctttgccgtggatgtgaacagccataagaatgtgattacccctgagttcaagcgtccgggcagtaagattgttgtgttccggattgcaaagaatcaatatgacctgccggactacagccaggttatggacgggtatggaaagatatttgaagatataaaggcaggccgtattatatccgcctatgcggtggagggcaatggccttgcagaggcagtgagcaagatggcattcggcaataagctgggtgtgaagattgagcacaatgtggacccaagggatttctttgccgctgcatggggcgacattgtgtgcgaggtgccggatggaatggtgggacagctgtccatatcctataccgtcatcggtgaggtgaccgacagaggtgcatttgagtacggaaacgtgaccatttccatggaagaggcattagacgcgtggatgactcccctggaggacgtgttcccaactgccgcaggcagggaggcaagaggagaagcggctgcgctggaagagaagctgtatcacagcggcgcagtgtatgtgtgcgaccataaaatcggacagccaaccgtatttattccggtattcccgggaaccaactgcgagtatgacagcgccagggcctttgagcggtcgggagcaaaggtggttaccagggtgctgcgcaacatgagcgccgaagatatccgccagtctgtggacgaatacagaagagagattgcaaaggcccagatcgtcatgttcccgggcggattctcagcaggcgatgagccggagggctctgccaagttctttgccactgtattccgcaatgcagtgatgaaggaagaaattgagaagcttctgggcgagagagacggactgatgctgggcatctgcaacggcttccaggccctgattaagctgggcctcctgccggagggtgaaatcaaggagcagggaccggagtcacctacccttgccatgaataccattggccgccatgtctccaagatggtatataccaaggtggtatccgataaatccccatggctggccggggccggactgggcagcgtatactgcaatccggcatcccacggagagggccgtttcgttgccaatgaatcatggcttcacaggctctttgccaatggacaggtggcaacccagtatgtggacgaccagggcagatgcaccatggacgagtactggaatcccaatggctcttatatggccatcgagggcatcaccagccccgatggaaggattctgggcaaaatggcccattccgagcgccgaggcgaggcagttgccatgaatatttacggagagcaggatatgaagatatttgagtctggagtgaggtattttgggttgtagatggttacgcggacgtgtataggcagtcgcgtccgctgtcctttccacgccagggatagaaaaaaatctctggctattgatatttcggagattcggagaaatattgtctggctgggattgacaattgcacagatgctccagcaaaggccgcatttcaagatgaaatcaagataatgcggccttgtatattgattggtatgccggtagattcggcatgccatttttcttttttatgagtaggatataaatgatgcagatgcgaagatacgttgtgggtgagcgggatgggggcgggggaggcggaggcatctacaggagcgttggtatcacttgggatgcgggaaacggctttaagattcaggcgtacccttgtctgagcctgggaaatggattccaggctgagcctatagcgcgagttgggtcgcctgaatcttgcttaaagccgttttccgcggccttagtgattcccgctccgcagccggcctccgcctcccccgcccccatcccgttcacggacggatgccccttcccccttctgcatcccttaaatcctcttctgatacccaaccctcaaatcccctgcttcgcttccttctgtgagaatcagggtgccgcagcggatgtagccgcttttagccagggcgcgctgcatggcctgattgtcaggatgggtgtcaatgcggatattgcggatgcctgattggaggacatactgttctgcctctgaaaacagccgggcagccaggccccggcctttcagggagtccttcacacatacccggtggaatgcaaagtagggctcctggttcagccaggccccgtctatggaggcatagctggcttccggcccggggacaatggtaatcatcccgaccacctggcccatgtcctcaagaacatggagctgggactgaagaatggaagcctccatcacctggcggttgggctcccccttctgccattgatcgatattccttgctttaaatgattccttggcctggtccgacatggctacaagctggtccaggtcttctgtgtctgcaaaacgatatgtcataaaagtcctcctgttataagatgaagcgttctaaaacttgctgccggcgcattgatacagtcatatccagtatacagttgccggccctctgcgtcaataaaagcaggggaatgaagcgtacttttcctgtggatgttccggggcaggatggtattgcattttgccggacggctgattataattgtgatatcatatgatttcgcacagaggaaaggagcttaagtaagatgaacactgcattgacaagggagagggccttggaggccctgaaaaaatataacagggagccattccacatcctccacgcccttaccgtggaaggagtgatgcgttggtttgcccaggaccagggatatggggaggagacggatttctggggaaccgccggcctgctgcacgacattgactttgagatgtacccggagcagcactgcgttaaggctccggagcttctgaaggaagcaggagcggaggatgagctgattcatgccgtgtgcagccatgggtacggtcttgtctcagatgtgaagccggagcaccagatggaaaaaattctgtttgcgtcggacgagcttacgggtctgattggggctgcggccaggatgcgtccgtccgggagcgtaatggacatggaggtgtccagccttaagaagaagtttaaggacaaacgctttgcggcaggatgttccagggatgtaatcagggaaggggccgaggaactgggctggaccctggaggagcttatggataagactatccaggctatgcgctcctgtgaggccgccgtcagcgaggagatgaaattatacgaggcataacgccttcttaactgacctttgctttgcgatgcctgcaacggcccgtttatcatttcgaccccttcctttgatttgtaaagaaaatttatatatatattgtaaaaagacatgtagcgatatatacttgaggggaaatgttgtgtgaattttctggaataagcggtaagtgcctgactacgggcgtctggctgcttatgagaaggagggaatgtaatggttgctatgtattttgtaggagcaggttcgctgatggcgctggtgttcgcagccttcatgtttgtgcgggtcaggagagagcctggagggaacccggagatgctccgcatatccggagccgtacaaaagggcgccaatgcgtatctgagacgtcaatacaaaggtgtgggaattttctttgcagccgtgtttgtcatcctgctagtgatggcattctgcggctttttgagtttttttacgccctttgcattcctgacaggcggttttttctcgggtctgtccggatttatcggcatgcggacagccaccatggccaactgccggaccgcccagggagcgtcccggaacttgaacaagggactgagggtggcattctcggcgggctctgttatggggtttaccgtggtgggcttgggccttctggatttgactgtgtggtatttcatattgaacatggcttttggcgcgcttcctgatagccagcggattgcccagattacggccaacatgctgacctttggcatgggcgcttccagcatggccctgtttgccagggtgggcggcggcatctttaccaaggcggctgatgtgggcgccgacctggtgggtaaggtggaggccggaatccctgaggatgacccgagaaacccggctgtcatcgctgacaatgtgggtgataatgtgggcgatgtggctggtatgggcgctgatctgtacgagtcctatgtgggctccatcgtatccactgccgcgctggccgtggccgccggatacgggggaaagggcgtggctgttcccatgatgctggctgctctgggagtgctggcgtctatcctgggaaccttttttgtaaagacagaggaggacgcgtcacagaagaatcttttaaaggctctgaggacgggaacttacatcagcgcggcgctggtggtggcggcggcctatgcagccatccgtattctgcttccggaccacatgggtatctatgcggccatactatcggggctggccgccggtgtgctgattggagctgtcacggaatactatacgtctgatacgtataatcccaccagaaagctggcagcgtccagccggacaggaggggccacagtcatcatcagcggtctttccctgggcatgctgtccacggtggctcctgtggttattgtgggcgtatcggtcctgattagctattactgctcaggcggcagtgctgatttcaatgcagggctttacggtgtgggcgtgtccgcagtgggcatgctgtccaccctgggcattaccctggcaaccgatgcttacggaccggttgccgataatgcgggcggtattgcagagatgacgcacatgccggaggaggtgcgtcagagaaccgatgcactggattccctgggcaacaccacggctgccacaggcaagggatttgccattggttccgccgcgcttacggccctggccctgatagcgtcctatattgataaggtgaagcagattgacccgtccctgagcatggacctgtccatcaccaatcccacggtgctcattggcctttttatcggaggcatgctgccgttcctgtttgcggcccttaccatggaggcggtgggcgaggcggcccagtccatagtggtggaggtgcgcaggcagttcagggaaataaagggactgatggagggaaaggcagagccggactatggggcctgcgtggatatgtgtaccatttcggcccagaggctgatggttgccccggccatggtggcggtcatcatacctgtggcggtggggcttcttctggggccggagggtgtatccggactgctggcaggcaatacggttacagggtttgtgctggctgttatgatggcaaatgccggaggagcctgggataacgcaaaaaaatacatagagagcgggcagctgggaggaaagggcagtgaggaacacaaggcggctgtcataggcgataccgtaggagacccgtttaaggacacctcgggtccgtccatcaacatcctcataaagctgaccagtatggtatccattgtgtttgccgggcttattgtggcagtgcatctactgtaaaaccgtgagacggcgcatggacattctatgagaaaaagtccgccatagaaaaacaaatgtctcctgtacgcaaattttttcctttaaaagtattgacatacataacaaagtaaggtattatttgcacttgtaacgctatacatataaagtggcatttattttatgaaatacgctccatatccggcgcatagaaagaaacaagggagacagacaagatgaaaaaagtggtgaagttcggcggaagttcattggccagtgcaagacagttcaagaaagtagcagatatcattaaatctgataagtccagaagatacgtggtcccttccgcaccaggcaggcgaagcgacaaggatgagaaggtgacagacctgctctatgcctgttacgacgcagtggcagaaggaaggtcctataagaaaatcctggaaaagattaagagcagatatatggatatcatcgacggcctggatttgaacctgaacctggaccacgaatttgacaggatagaggagaattttctggcaaaggcaggacgggattacgctgcttcccgcggggaatacctaaacggcatcgtggcagccaacttcctgggatttgagtttgtggatgcggcggaggtcattttctttgatgaaaacggaaattttgagtccgagcacaccaaccgggagctgtccgagcgtctggagcatgtggagaaggctgttatccctggtttttacggttccaagccggatggaaccatcaaaacattttccagaggcggttccgatgtcacgggctctatcgtggccaaggccatccacgcggatatgtacgagaactggacggatgtgtccggcgttctggtgacagaccccagaatcgtggagaatccggaagttatcgagaccattacatacaaggaactgagggagctttcctacatgggagccagcgtccttcatgaggatgccattttcccggtgcgcaaggagggcattcccatcaatatcaggaacaccaatcgtcctgaggacaagggcactcttattgtggagagcacctgccgcaagccgcgttacaccatcaccggaattgccggcaagaagggattctgctccatcaacatagagaaggccatgatgaatgccgaggttgggtttgggagaaaggtgctcagcgtgtttgaacagtacggcatctcctttgagcacatgccctcaggcattgataccatgactgtctacgtgcaccagtcggaatttgaggagtttgagcagtctgtcatagccggaatccacagggctgtggagccggacaccgtggaactggagtcggacctggcactgattgcagtggtgggacggggcatgcgctccaccagaggaacagccggccgcatcttttccgccctggcccatgcaagggtcaatgtgaagatgatcgatcagggatccagtgagtggaacatcatcatcggtgtggagaacgatgattttgagacggcaatcagggccatctatgatatattcgtgatcacggaactgtaggcagtctgcttatggcatagtacacaggaagcttcgcggggtatgatagccctgcggggctttttctggctctttgtcaatagttggggtgggatttgttaaaatcccgccccaattctatgaaaagggcccttttta

SEQ ID NO: 3244 - DNA, 23424 bp, Unknown
  gut microbiota DNA sequence
ttttctgttaatcccagctttttttctgcaaatttatatattcttctatatattatcattatttttttgcacagtcctggtcaaagtgcacatttttttcatttaaattcaaaaaactgcacattgcttaataatatggcagctgatataattacatctagttgttttagaaaggatggaactccatggttacagttgcagattttacatcagaccttgaacaaatccgttgtgttgccggattttgcgggacaaacagagaagttacctcgttcaccataatcgacacacctgagattctggactggctgcatggaggagaatttgttgtggattccggatatatcaccagtcataatccatccatgctgaaaggttttatcgcttcccttaaggaaaaaggctgcgctgcgcttggtgtaaaactacaccgctatcacaacgagattcccggcatcatacttgacgacggaaacaaactggattttcccatatacgaaatgccatataatctttacttttgtgattttgcttctatgatttataaacgtatatttgaggagcagctagatgatatgtaccatgtttccattgcatacaaggatattgtcaattcattcagcaagtataaggtaccggagagaatgctgtctgaattaagcctggtgcttagaaatcctgttttcctgataaattcacagtttgagctgatagaatattcctatggtccaagtgacgatttttctttgcagaacctccttcacaaagaagttttgatggagctggataaaaatatacagaatactcttctgaaaaggcatcagcagcagccataccaattccaccaattctctatcagcagcccaaaaggtgaaataaactgtattctgttatcatcgggaaacattgacggagatacaacgttcttaattattccggagataaacaaactggaagactggcattacagggttgtaaaggacatatcggccttatttcaattaacagctaataataaagtaaacacccaggattttgcggcctccgtaatcatggcgcagtcaaattcaaacgaaacgattcttcgctattgcaagatgtacaattttgattactccaaacaccgtatttgtttatccatagaatttgacagtgaggtacccaccacatccacacgtaaatatataaccagagaaatcttctcgtccataaccacctggatcatgaacacctatggatgcaacgtttttttcctaaaaactcacacccattatgttctgtatctgctcttttctgatgtcatatcacaggaaacagcagaataccaggcttcggaagcagcaaaaaaaatctggcatatttttaatcacaataatatttccacatatattggtgtcagcttgtattcctctgatctacagcagatctcaaaggcgttttttcaggctatcgacgcaatgaaattgggcagaaaactctatccggaagaaaatgtgtttttattccgcaccattcaggtttatcaatggctctcgaccatgccccaggaaagtctggaggaaatgtacagagataccatagagcccttaagcaaggccggtaattccgatgtcaattatgtccatatattgagaacatatatcgggaatcattataacatcagcaaaactgcgtcttatctgcatatccatcgcaataccttgatgaattatctgaccagaattcaggaattgctgccttacaatatcgggctgccagaaaatatgctgaagctgcaaataggcatacatgcaatgtatttattggacagaaatacatagctatatactatcctttagattatccgcctgctcttggcatgcggctgtatttactgttataaatataaaagggggagtgaaaaggggctgtcctgaaaacgtaaatcagagataacctataaagaaacacccaaaagggaatccatctcccagagccacggcatctatgcaagccgggtttagcatatgaatgttaggaaatcaagttgaagagacacgaaagagctgatataatgaagttgatttaagaaaagcaactattaataaaaaatctctgcattttttctctgcttcttaataaggagaacgtttccatgaaaggaggccaaacccatgagccatgatcaacagctatatcagtatctgtatcagaccattaccacacagatatgtaacggtacttttatttatggacaggagtttccttcacagcgggaaatctgccagcgatacaacgcggggataactacggttcgcaaagtgatgaagctccttgctgaagaaggatatatccgcacagcgcagggacagccgtctgtagtaacttatcgtacctcaaaggaagcccatgccgaatttctggttcagaaccgtgaggaaattgccgacgcatataagggattggggttgctgatgccaatcctctatcgtgagggcgccaaacggtgtaacgagtcagatttgtattggttggataagattttgaatcatatatcagaacagatggaactgccagatcactatcagctggccaatgccttttttacagcattgctccgtccattaaaaaatcagttaatcatcgatctggagtttgacagtgaaaactatcttcacgtcccattcgtaccaattcccggcatagataatccttttgctacgacctttgaaagaacaaaaacttggttcagcaaagctatcattcaaattaaacagaaacagtttgatgacttttatgccgatgcgtcaaaattataccgcgattcaggagaaagggttgacaattacttatatgctttgggcaaatataccgaaagcaattcaaataagaatgaggacatccgctggttcagaataaaaggacattccgagctatattcccggctggcgatgaccattgtacgcaggattattgccggggagtttgacaacgaaccgtatttaccctctataccaaagctgatggaagaatacaacataacaaaaaatactgcaagacgggcggttagcctgctcaattcactggggatcgcacagacaattgataaaaaggggagtataattacgccggaaggatatacttcgtttaaaagtgagctggatctggcggagccggtgatacaggagcggctatcctttttcctggaagcccttcaaattgtagctctcactgcacgctgctgtgcatcatccatttcctttattccggattacctgggccagtccgtggaaagcaggcttcgcacagcatcagataacagaatcacccccttgtcttttcagttgcttatgaatgccttcatccagctcctgccataccaatcccttaaaaatatttttcggcagctagacgacctgctgatatggggacactatatgcaggcaattgacaagtcgtattatcctgattacagtgaaatcgcgctcgcaatggaagctgttatcactgccttgaaagcccaaaggagcgacgcattaccagatgcgtttagtaatgcgtttgccttgatctatcaagatgtttgtatggtcttatcaaaactcccctccggttccatctttaatacgttgaaggatccggaatgaattataatactgcaaaaagtaaagcaggtgcttcataagtaaaaaatgccaatataaaaatgaatatcttcactgttttctgtatgtacctcagagcaggccaggaatctgcatctgtgctatacgtgcagatattgtcctatttcacgcacaagctgtttaaaatccaaaggctttgccaaatggccgttcatacccgcggcctttgtgttctctatgtcctcaacaaaggcgtcagcggtcattgccaggataggaaccgtctttgcgtcctctcttgaaagcgaacggatagcgcgggctgcctcatatccgttcatcacaggcatctgaatatccatgagaatcaaagaataataccctggccggctctcctcaaaacgtttaagggcctccctcccgttgactgcagcttccagttccatcccgaatccgcccagcagttccagggcaatctcgcggttaagctcattatcctcaacgaggaggacctggcttccggcgaaatccagtggttccgtatccggctgtcccggcttcttttccagcctcaccagtttcgtatccggccgcatcaattcctcccctatccggcaccggttcatacagtcaatcaccccggaccggcatagcggtttactcataaatccacagaccccccatgccatggctctttctttcattccgcttacatcataggcagacaccaccaaaggcaccctgccatgaatccccctgcagatcatttctgtcttctccatacgttcaacttccgccagacttaaacccagaatgataaaaccgaagttttctgtcccccaatgtgtcaggaagcgtttccccgcttcctcaaaatccgtgcactccacctccatccccatagaacggagcaaactgcccgtacacgcctgctgtgcagggtcatcgtctatcagcaggacatgtaatcccctgaaatctttctgttcctcttctgaatcagccaggacatccatgggcatcagaacatcgaacacagttcccacacccaactggcttttaactgttatagtgccccccagcaggtcaatcagacgcttcgtaattgccattcccagcccgcttccctcgatttggtcgatacggctgtccctttcacgggtaaacggttcaaaaatctgctccagatattccggactcataccaatcccattgtcagacacggtaaagcagatcatggctttttttgcagactctgtttcctgtatctctatttttaagataatcctcccgtctttgggagtaaattttgaagcattggagagaagattgagaagaatctggcggaagcggagcgcgtcactcatgaagttctcccagcccggaccttccaggtacacatcaaatctctgattcattttgcggatgcctggcagcacaattgtgataatctcctgcagctcatccggcagacacattggagccatgctgatagaaaaattaccgttttcaattttggacatatccagcacgtcgttaatcagccccagaagatgatggctggataaacggattttctgaagacaatccttcacacggtcctgatccccaatatgggcggctgcaatttcagccataccggtgatcacattcatgggtgtacggatatcatggctcatgcgtgaaagaaagtcagactttgccgcattcgcatattttgccgcctccagggcgctgttaagcatgtcggtccgttcttccagtttgcgctgaagttccctcaattctgtaatatccgtaatatctataaacatagacaggaacacggggtcatccgatattgtatcaatgcaggtgctgttgaagtggaaccaccggtcacggtcatatttatctttaatacgtatagtcgcctcaaggggctcccctcttctcagacccggaaaatggctgattattagctcccggctttccccggacatcacctccagcgggtcgatggcggcgatatcctccatgctgacatcaaaaatatccttaatccgttcgctggcgtcaagcattacaatcccctgcggcaggatgcggtgcctgactatgaatcccggaatattctcataagcaatactcctctccttctgggtctgcaccaaatctgtgacatcaatcattgtggtgtaggcaatctgtattccatccatgtattcatctgtcagaaaacccactattttaacccagcgcatggaaccgtccggcattttaagcggcagatatgcctcgtaacttttctcatccgcattggtcatactctggatattctcattaataatcctcaaaccggtttcattgtcccagaaatacgcatcgcagcagttatggaatctggtctcatagtcctctttcgtgtacccaatcatccggtagtaacattcattagcccagataacagtaaaatgttcatccatcaagtgcctgctgacactgacctccattgcactcataagcatttcctgctcgttttttgttctcattaattctgttacatctgtcattaccgtgtaagaaatgcggaatccgtctatgtattcatctgtaaaaaagctcaccagcttgacccagtagcttgaaccgtcctcatatttcatgggcacaatcgcctcatatccatccccattatttttcagaacagcttcaactttgcttgtcaggagttcccagccctccgggttattggcaaagaactcatccggatgattgtggaacaacgcctcgtatcttgcctttgaatagccaatcagcttatagtaatactcattggccaggacacaggtataatgttcatcaatcaggtgtttgctgacgcttatattaagcgcactcataatcatcgcctgctcctgcatcattttatcaaaatcctgcctggtttccttttgttccagccgggcctgcatcatatcagtcacatcaaccatcgttgtataggacacacggtatccattgataaactcatcggtaaacaccgcctgcatcctgacccagaaagtccctccatccggatatatcatgggaagatataaggaatagccgcttttcccctgctccagtgcagaatggacctgttccgtcagcctggcccatcctttgggattattataaaaatattcatcgcagtgattgcgaaacagatgttcatacaggggcttcggatagcggattagctcatagtagtaatcatttgcccagatacaggtaaaatgatcatctaccagatgcttgctgacgcttgcgcctaaaacactcatcagcatactgtattcagcattgagctgttcataactcaggttaatctccattcaggtgtcctccgggattttactttctcatcgcctttatggctatttagtgattcacgccggatttgccggctgtttctggggaaaaatcactgtttaagtattttcctatttccctccacaggattgctttgtccaggggttttgccatatgtccgttcattccggcgtctttcgcagcctggatatcctccgaaaacgcatccgctgtcatggcaaggatgggaactgccttggccccgtcacggtccatggtgcggatggctctagtggcctcatatccgttcatcaccggcatctggacatccattaaaattacgtcatagaaaccgtccggggagcgtctgaacgtctccaccccctcggctccgtcacttgcagtatccacttcagcgcccatgtcggccaggagttccctggcaacctcctgattgattgcattgtcttctatgagcaggaagcgcctgcccgtaaacctggctccggtatctgtcccctgcgttttcctggccggctgtccctcaagcacataccgctgcagcccatgaatcagggtcgagacgaatatcggtttctgcagaaaacctgtgacacccgccttttttgcatctttttcaacatcgctccaatcgtaagctgagataatcagtaccggcagctggccgccgcacaattcccgaatccggcgggtggtttcaaatccgtccagatccggcattttccagtcaagaagcaccgcgtcatacatttccccgttctgctttgctgtctttatcatttccacagtctggatgccgctgtcgacccaatccgcatggatacccaattgtccgagcatctcagccatatactcgcacatgactgcgtcatcatctgtgacaatgattctcaaccctggaaattccccttttataaactggttctcttctattttcagtggtagttccaccctgaagcaggtcccttttcccaattcgctggtaacctcaatagttcctcccatcatatccacgaacctttttgtgattgccattccaagaccggttccttccgtcttatccacacggctgtcccgttctctgctgaatgccgtaaagatttgggccaggtattccggtttcatgccgattcccgtgtcagttattgaaaagctaaagagggctgttccgtccaccgcctgcttctcgcagacatccatggaaacagttccattgacaggggtaaacttatatgcgttagacaagatattgataaaaatctgcctcatacgcagggcatcacttaaaaactgttcgtgcaccactgaccgcaggcgaatggaaaaatgctgctccttctcgccgaactgtggctgcataatggccactacattctccagcacctccggcaaggacatggaatcttccctgagaagcatttctccgctttcaattttagacatatccagcacatcgttaataagactcagcagatgctgccctgacaaaccaatcttccttaagcagtccttcacctttgcagggtcgtccaaatgggcttccgcaatatccttcatgccgagcaccgcattcaagggagtcctgatatcatggctcattctggaaagaaaatctgattttgcacggttcgcctcctccgctgtctccagggcagaacgaagctccttcgcctgtgcctccaatttctgctgcatctgccgaagttctgtttcgttggtaatatcaatataaatggccaggtacaccggatcgccttcctgatacccgatgcaggaggcgttaatctgcagccaggcgtcattgccagaccggttcttcatctgtaccgtaaaatgaaccgaattgccattggtaacagcatttttatgttccagaaataccggcatgttgcgtattatattttcacgaaaaagagcattatccatgccgtccatgctgtctttcccaaaaaagtcaaaaaaacggtcatttgcctccagcagcttaaagtccaggttccggttaactctgaacttggagacaaatcccggcaggctgtcgtaggtcactgactgctccagcttcatatccatcacatcggtaatatccgtcatgaccgaatagctgacctggtagccatccacatattcatccgtaagatatgcattcagccgcacccacatataatcatgatggtttccgttatgtttccgccgcatccgcgtaaccagattataggacttttcccctgattccagtgtctccattaccttggcgctcagctgcatccacagcttttcatcgtggatattcaaatcgtcattcatatagtaatgagccggcttattgtggtacaatgcctcatactcctccctggaatatccaatcagttcataatagtagtcattgcaccataccagggtataatactcatccaatatatgcttgctgacgctgacatgcagcagattcatcagcgtatcatattcgtagcctgtccgtttgagcgtttcatttaatatttccatacttcctcctcctcagtgacccaacagggagagcatcatctttttaatcttcttccatgcgttaataacactccagagtggtcatggctttgcatctcttttgtaattatacatctttcatactttgactacaagtggttttgacaggcattggaaggaattgcattttggggacttcaggttattgaacagccttacctgcttcatcgcctcagcaagattagcgccatccccggcatacgcaaaaagccccggaaaagtcgtcttccggagcctggcatctatttcttatgtcctgaaaaggagctgtttttttattgagacaatgcttattctaatcaatattgtaaaatcttattgctccaacaggagataaccaagttagtccttatctttatccatatagtctgaaatgaagttttcatccatgccatgcagaagataaaaatcaaaataatctgtctgaagacgcttgagctgttcttcaaacacagcttgtatatccggattagctgccccatagaattttgtggcgaggtaaggctgtgtcaatatagttgatactactggacaatgactggtcaatgacttttcgtccttcttccctgtcaatacggtttggattgtccttttccatgggcaggcgcaatgcgcccagccccaatgctgataaatttaatgaacgaaactttttatagtacatggtcacccttctatcatcatcaacagctttcggctgcatattcctcataggtcttaacgccctgtttcaaacgctctaaaccatccagaagccgttctttcgggcaggctgtattcattcgcagaaattctctgccgtttccgccatataccataccggccgacaggtaaagtcctgtctcctttctgagataccggcataattctgacgcatccacaatgattttacggcagtccagccagagcagataggtggcgtgggccggtaccagagacatcttcgggatttcatcgttcagaaatttacggactgttttcctgttttcttccaaatactccctaagcgcatccagccagccctcgccttttgtaaatgctgcaatggcagcttcaatcgcaaaggcgttgggttccgctacttcatccgtattcaaagcgcgctccatcttgtgacgcagttcttcgtttggcaccatgacagctgctgtctgcaaaccagccagattaaaggctttcgttggagcgatgcaggtgacgctgttctgagcgcatgtttctgatactgatgcaaaggggatataaccgtaccccggctctgtcagatcacaatgaatctcatccgacataatcttcacatgattggccgcacatagctctccgattctccccagttcttcccgcgtccagatcattccggtgggattgtgaggattacagagaatcatcagagtcgtctgcggatctgacagcttcttctctaagtcctcccagtcaatccggtagcccgctccatcatagagcagcctgttctcgatgatgttccggccattgtttcggatagaattaaaaaagatgttgtagaccggtgtctgaaccagcacattttctccaaccgtcgtcagctttctgacgccgcttgaaatagccggaaccactccggtggtaaataccagccagtctttttccatcacaaagccgtgccgccgttcccaccagccggtgactgcttctctccatgtgtccggaactaccgtatagccaaaaatcccatgggctgcccgtttcatcagcgcttccctgatttccggggctgtctcaaaatccatatccgccacccacataggaagctcaccctccggtacatcccacttcatggaacctgttccccggcgctcggttaactcatcaaaattgtaaggcatcctacacagcctcctttaattcttccgtctgaatgaacgtttttgtcacatcaatctttgatgcatccataatcagttcttcgatttttcctgcccggattatgccgctgttgggatttaaaacgctgtcaatggtattgttcacctccacatccaccgtggaatattcaaatgcaagcgttgtatttaaaaggcggcagtttttcatcaccagattgtcaatgtaacacataccctggctgctttcaatggtacagttgatgagcgttaagttcttcgcattccagcctaaatattcgccggaaataaaggaatcataaaccgttacattttcactgttccagaacgcgtccttggacagcagccttgcgtgatgaatttccgcatttttaaccccatcaaaggaataatttccaaccagttcaaagccgtcgatataaagattgctgctgttcattgcaaaataatcgcctttcgcggatacctggtccatccggatctgatcgcagttccacagggtctcacctgcattcggcatggtaacgcgctccagttcgattccggtggtacggcggaaattttttggagcctccacaatacagtttttcatggagatattctccgtataccagattccggcacgccccatctcaaacagcacgcagtcctccattttaatattgtgactgtaccacagcggatatttccacttgaacatgctgcggtaaagctcaatgtttctgctttcctttaaaggggattccccatcagcaaaagtggtatcatagattttcaaatccttaccctggaataacgcgcgctctcctgttaaaaacttctgattaatctgtttcattttgtctgctcctccttaaaataatgtgagtcggtttcttaatatgaactatcctaactgacgaaaataacggctggctaacataagtataaactttaaataaactttgccgttttactctttttctttatctgacgatattctaataccaatagcatgaaatatcaaattcttatatcaaatttatttctatgctttttgagtatatcatatggctgggttttctggatttcagaactactcagccattttgggtacgggcggttttaactgtctgcatctcactatttagaggcgattgcagcgaccggtatggttgtcaccagggaaattgccccggcctccttctaaacatttctacccatttcatatgcggcagacagcgcttccccacattcctctattgctccttttttgtcagcaccggttccgcgcacgacgccggccagacgggacttttcaaaacagctgatccagccctccaggcctttcactgcagcctccatagagctttcctcctcgtccgccgaagtggccagcagataaatgtcacggaattcatactctgccgggaacagcggattggtgcggtccaacaatgttttcatctgccccgacatctcatagaaataaatcggggtcgcaaataccaatacatccattgctttcatctgcgctataattctctctgcgtcgtcgcgcaggatacatttccctgtggtctggcagcccaggcagcccttgcagaattcaattttcttatcataaacgcagattttctttgtctcatgacctgcctcctctgcgccttttataaatacatccgccagtgtctccgaatttccgccgatacgggggctggtcgataaaaccagaattcttttactcatacatttccttcctttcacaaattctctctgaaaaagcgctccagcttatcaaagggaatccgatctgtcctgtcatataaatcaatgtgctccgcatcctccaccacataaagttccttcggctcctgtgctttctcgtataccatttcagaaaagaactttgagtgggcacggtcacctgcaataaagagaacgggccttggtgatatctccccaacaaacgcggttaagtcggcattcaaaaatgccagatcactggttgtagtaaatccgcctctggcgttcggatggtggcctctctttactgcgtagaagcggaaccattcagctcccggctccggcattccttccggcactgcatctatgggttctaccggaaaactgggaatatattccggatatccctgttcaaaatcttcccaccgtttcagagacagccgttctttcatttctgccagcgcagcttgatcctgcgtgccgcggacggcggttgtcatgacatacatgcttgcggttgccaccgctttgattcttgtatccgcctgtgctgcggataaagcgaagcctccggaaccacagataccgattaccccgattttatcacagtccacatatgggactttgactccaaggtaatccaccgctgcgctgaaattctccgtaaagatttccggcgacgaaagattcctcggctccccggcggactcccccataaaggactggtcaaaggtcaggaccacaaatcctcttttggccagttcattggcataaacgcaaggcccctgctcttttacgccgccatagggcgcacccacgataatcgccggatgcgttccgctgccatcgatcgcctttgcctgatagagatctgctgcaatggcaagtccgtaacggttattatatctcacgtgttttctttctacatctttacttaattctgcaatgtaatttgccatgataatgttcctttcttttcttccatatcttaccgcgcaaagcgcgccctgcccgcaaggcttgaattgcggggtaccttttgggtatactttttatgccatgttttccttcaaaatctgtacaatctcatcatgggtcagtaccttatagccgccgtccatcacaaatgtaccgttcgctatgcccccgatcatttcctctgtgactcccagttcgcagatactcattacaaagcccagttccttcatgtagctatccatctgtttcaggccctccgccgcaagttcctcatcggtttttccggctgggtccacatcccatacattgacagcataccgttttaatttagcaaggccgtaaggcatcaggaatctgtaataggccatggaaacggcagacagtgtcattccgtgggtggcatccgtgtaagctcctaccggctgcccaatcatatgcaccatccagtctgttgtctttcctttggacaccagtgtatttaatgcccatgtagcggtccacatgatattgcttctggcctcatagtccaaaggattcttaactgcaatcctggagctgtgaatcatggattttaacatcccctccatgatataatcggaagtattgtcatcctcaccggaaaagtactgttccagaatatgagacataatatcataaaagtttgccaccatctgatacctgggcagcgtaaaggtataggcagggttcagcactccttccttatataatcctgttattcttctttattcatctgaaacaccagatagtccaggcagtcaatccgcttttcattcgtatgtactttttccaacaggcgttttctatgctgttccaacagctttaactggttctgccggtttccagcgatgcctaatttcataaactctgccaccatctccatatcacatccagcatcctccagattttgaatcacggaatcagggttttccacatagtttgccattctaatctatcacctcccttgtctccatttccctctatacccacaaagcatcgtgtgttctacatataattgacacttattgctttattgtttctatgcagtttcgaccctgttttccccataagtttctgccataggcgcaatcatattttgtgttacttttccatataaccacattccaaaaggaatggacagcgcctccgccaccacaaaccccgaccagataaccgttatatttcctatagctgctccaatcagaagaatcggtatgagcagaattacctggcgcatgaatgcaagatacatactgtagtttccatttccaaacccctgaaaaattgccgcaaatataatccccaccgacgatacaaaaaagctgaccgacataattctgaccgctggaataccgagccgtatcatctgctcagaggcgtcaaacaacatcaggattttatccggtatcaattcaagagaaatcaggaccactgtcatgattatcactgcataaagaaatgcgcaccggattgtctcatggattctcttttcttttccggccccataattgtaagcaataatcgggatcaggccgttgttcattccctggacgccaatctgtgccaggttctgaactttcatcaggattccatagattgccactgctgttgatgaaaactggtacaggatggtattgataaatattcccatgacggacatgattccctgtacaatcgctgtggggattccaactttcaggatattagccacatactttttctggatatgcagggtaaaatgaaccgggatttctttgttcctttttatattcagataaattccaagaagtcctcctgccagctgccccgtaacggtcgctgcggccgcccctgccgtccccatggccggaaaaccaaaatatccaaatatcaggattgggtctaaaatcacattcacgagggaagctgtccccagcgtggcaaggaacagattggattttcctgttgcaatcaacagccggtcaaacacccactggagcatctggccaaaggaaaagagcatgcagatccgtatataggaaattccgtaccgcgcaatcacttcattcccgccggcctgccatgcaaagtatggttttacaagtaacaggcagacaattacattaatcagatacgctccgaatgccatgacgattgccgccgatgttgtcttttttacttcctccggttgcttttctcccatggctttggataccattgcgttcagccccacggccagcccgcatcccagcgcaatcatgagcatctgcagcggcgccgcaattgagattcccgtcagcgcatcctcgctgacacgggagacaaagatactgtccacaaggttataaagattgtttaccagcaatgatataatcagtggtatggacatttttatgattaatcgggggatcggtgttgtccccatgatgctttccttctgcatattttcctcctcgcaaattatttgcttcttttatgtctttattgtaatccaaaatcatattcatatcaaatacttatattaaatacaatcccatacttgacaggcatatcacattctatatataatagacatagaagaattttcgtgtgtctggcataaataacaggaatggaggaatcagattggatattcgtgttttaagatactttatggctgtcaccagggaagaaagcatatcaggggccgcggagtccctccatatgacacagccaacgctgtcaaggcagctcatggacttagagaatgagatcggaaaaaaactgttgatccgcggaaaccgcagaatcacattgacagaggaagggatgctcctccgcaaacgggcggcggaaatactcgatctggtagataagacagaagcggaacttacggcgccggatgaggccattggcggagacatttacattggaggcggggagacagatgccatgcgtctgattgccaggatcgccacggatttacaaaagagctgtcctgatatccgctaccacttatacagcggaaacgcggatgatgtgatggaacggctggacaaggggcttctggactttggaatcctcatcgaaccggcagatatgaaaaagtatgattatatccgccttcctgccaccgatacctgggggctattaatgcccaaggactgccttctggccgcccacgatttcatccggccggaggatatctgggagctgcctcttatatcctcccgacagactacggtcagcaataaattttcaggctggctgaaaaaagattatgataagctgaatatcgtagccacctataatctggtatacaatgcctcccttatggtggaggagggactgggatatgccctgtgcctggacaagctggtgaacacctcagaaggcagccgcctgtgtttccggccgttgaaaccaaagatggacgcccatcttgacattgtctggaaaaaataccaggtattttccggagcagccgaccgttttcttaaaaatgtgcaggacgcttttcatagcagtatctaatcttccatgcagacctgccatatggcgtagaaaaacacgtgctctgcaaaatatagttactgtcaattcggacaaggacaggcagcctctgcaacacgccatgcagaggccgcctgtttcttttcccattccagctattccaaagaaaatgttactgtcacatcaccgcttccaagcgcttccgtccatccggataaatcatctattttgcccagcctcgtatagctccaggaattagaaccataaaatattacgatctgatttccgttatataaaacaatatcccctgactgcgtcgtggtttgactgttactggccggcagactggttccaatcgatcctaccttttcaaatccggaataatcattcatctggattactacaggagcagtctgcatcatcctgacaaaagaatccactgccgtattatcctccagcgttgctgtaaatgtactgctgcctatctgtacattcatcgttattgctctgctctcctccgtcgtcgctatttctgacgtctccattgttgtttcagctgtatgttcactcctggctgcttcttccggctgtagattcccggcactataggctgacgatacaaacgtggcagccaacaccaatcccgcaaacagcttcttcttatatagtctcatgaatcctatttcctttcgtaatatttttaatcgctctttttgcaaacatcccctgcggctttcttccccttacatttcttcttcggaacttagatggatttttctcctcactccaccttaaaccggtatccggctccccagaccgtctcaataaacggtgaggaatcggcattcttctccagtttctctctcaaacggtttatatgtactgtcacagtcgccgtatttcctaccgagtccatgccccaaatccggtcaaacaatgtatcttttgagaaaacaatattgggattctcagccaggaaaagaagcacttcaaattccttattggccaggttcatttcctcgccattcaagtatacccttctttccttaggacggatggcgagattcttcacgataattgcgtcctccttttgctgctcccggtgctccagcagtctctcgtgaatctggatatgggattttaccctggctaccaattccgcaggactgaaaggctttaccagataatcgtccgcccccagtccaagtccccgtattttgtctacatcctcttttttggctgtgaccatgataaccggcagatgcaaggatttccttacctccctgcacacctcaaacccacttttacccggcagcatcacatccagaatcagggcatcccagccgccggccattgcccggttaagcccctcatttccatcaaaaataagctctacttcaaaaccgccggcctccagataatcccgttccagttctgcaatcaactcgtcatcttctactatcaatactttattcatgctatttctcctctgtcattggcagatgtataataatcgcaaggcctccatgattttccgcatggacgattcctctgtggcctgatatgatctcctttacaacagccagtccgattccactgccttccccagaattactccttgccccatccacccggtaaaagctctcaaacaggctgtccaggctttcttccggcacccccggcccatcgtcggaaaagatgaactccaccactgtactgcgttccacacgtcttagggatatcaccacatttgaatggggatgcctgcggtagtgtatggtattggtaaacaggttgtccagcacgcgtttcatctcctctctatcaagaaggaccgggaattctcccccttcacttgtgagtttaaattccaccttattttgtctggcctcctcctcataagaaatcaggtattgccctataaacctttttaaatctgccggttccaaatggtaatggaagctgctgctgtccagccggttatattcggaaagactgtctaccaggcgagataaatcctttgcccttgttttgatggcggacagataccgctgccttttttccggggtattggcaatcccatccatcagcccgtccagatacccgctgatggacgtgagcggggtcctaaggtcatgggaaatcccaataatcaggtcctttttccgctgttcatccttcagccgctgctccactgactcctttaaataggctctcatctcatcaaagtcccggcataccccgccgaattcatcctccttcgtataatcaatgctggtatctaaattcccctccttgatttcctttgtgccgcggctcagtttctgcaaaggaaccagaacgctcttagatatccagcaggaaagaattccattgacacaaacagtcaggaccagaaatgcgctgataaagcccacaatatagttcaggatatagttctgcagataggagataacttcctggtcggtttccccagtatggaccgccaggatgcacacagccttctccccatggtaaaacgtatgcttcaccacagacacatcatggtagcttgctgtcagggtcttagccgattccatggctgtacctgctacagattccgccgccctcatctcctcctccgaaatattggaataaatctcatttccatttttggtaatcagaaaatgataccccattctggaaagtttattttccagatggttcattttgtcacttttcctgatttccgtcccggcctctctatgaaccccctgtccccagttattctcccacagttcctgttgataggtgtaaataaggctctgggccgactgaatcccattctcatcctgatacatggtctccagcgtataccagtaactgcccagcgaagtctgtaaacatactgcaacaataatggccgtcagcataatcggaataagcgccatcattacattagataatttaattttctgtctgattgtcattgcctgttttctccccatattcccattttttctccggaataaaaattgcggagcttttccaatcctgtacatgtctgcagcttccagatgtttttgtacggtatctgctttatataacgggaggagtcatgatgtgtttaaacaatttccaaaccatcgagccaatcttaaccgttcagacatcctctgacacctatcacgatgccaaataaaatcatcagagccccgaaaatccgattcaatatgaaataaacatcgtccgtaacctttttccgatacaggctaacaatcaccgcgattgcaagccaccagatacaggtacctgcaaagataccacatatcagttggacattctctcccacagattcattaccgccaattctgaacatggaaaatactaccataaaagataaaatcgttgcgggattggtaatcgcaatcacaaaggaggacaggaagcaggagaaaatatgtccgggatgttcctccttattgttccctgccgcactggcgaaggaatgactctcctttttcttgattgtgcggactccaatggcaaccaccatcagacagccaaccatgcagatagtgctctgatgtttcagcaaaatatctgagatgaaggtaagcccaaacacccccacacatgcgtaaaagatgtctgctgcagaggaaccaatcccggtcaaaaaacctgcaaatgcaccttgggtcagcacccgctgtatggataatatacccacgaccccggcgggtaccccgaatacaaccccgattaccaaaccttttaataaataattctccagcatattccttaccttttactccactgaaaacgaataatagttatcatagtcttccctgtgataataccggatttctccgctgtcctggctatatactatggtccattcagttgacgcaaattctccgaaattatttttactgacactgctcatcgcgtctttcatgttctccatatccatggccggctgttctgacaaacgttctagtaacatttcatatcgtgtatgagactgttctgtcccaatcccatatttatctccctgggtcaggtaaaaatttgtcaccacaggagtttcaaccaccgacatctcgttgttcacatattccacagccaccgaacgaccgcttttatctgacagagccaaatgaagcatcatgcctgcggaggaatgcatatcatactgtcccaataactgaaccgcctcgtccacactggcggctttgtccagaagcagcctgacagcggttgtggttgtaaggtccggctttccggtatcctgctccgtaaccgctgagtcatcaatcatcagcacggctacacagagaccttcttcgttaatcccatccattggggcatacagggctgcggccgatatgattttagatacggttttttccggatcgtattccgtacccagattcagaaaatccagatttacagtagaaaccgaagcatatcctctctccggttttgacttgacaaccatggaggtgcattccatccaatcaaagttcctgccatacatcacaccgcccttcggatttctggccgacagagtactgcatccgaagctgcctcctaaaaaacggggatatagaaatcctttgaacagagccttaccgacaaactttgccacatccagatcggaagctgctccaccctgttccagaaagcggtcgaacccataatcgtccctgtattccatataatagaaaccgtcttccagtttctgtacattgacagccgaatcaacgccagccctgattcggaaataaagataagcggcacccgaaatcagcagcattaacacaatcagcaggattcgtacaccctttttcattgttgtctccttcttttcattgcatctatttctcttgcaaacatttcttttccaaggattctcctttgcccctgattctgaccatgattggaattggattgaaattatgattcctgcgctccgcgtgtgccggcactccctgcttttcctggaaattcattttcttctctcccaaacgctgcaattttgtcaaaatcgtggaaaacaatatagagctggaccagcgctgtcagaaccgctatacaaagtgcctgagtgaaggaaattatggtcagcggaaccgtcatggtcaggcctggcagcaagatttttcaaaataaattcactaagctgctaatcaggacaatcttgttgccccaaccctccagtaccggattgctctccactgcttccctgaactccccggtgtcttcaatggtcccaatctttgtgtattccccggtaacttccacgtcctggtaaaacaggataatacggttaggctccgaataatatacctcacccgctttttctgcggtaaccatttctggctcagagggtatctcatagtggctgggaatgtcgtaatactgcattacttcccaattctcataatcgtcgtaatggtagattggcagtctccagttggcggttcccacatatccggcgattgcgtctgcggttgcattgtcctccatctgcataacaaaaggggctccgtcatcgccaaaacggacttccagtgccgatgctcctgtgagttcctcccctgcttcctctgccttggttcccgcattgcctgtgctattatcccgtccagcgctcattgtagtaccggcagatgtggaaggattgctgttttctctcctggtctcatctgttttttggcaccccgccagcatggaagccgcagccagggccagcataaatatgattgactgttttcttactatattctttttcatcctgattcctttcctgtgtctcgttctctgaatttctaaatgctgtattctgtttttttatt

SEQ ID NO: 3245 - DNA, 4582 bp, Unknown
  gut microbiota DNA sequence
tatgattaacactgccacggtcttattctatcagcttttcctgtccttttccagaaatattttaaccacatattataacaacatattcagcgggtatggaaaatggcagatgcaggtccactcctgcatctgccatatctatttacttctttagtacgccttgccccaataaaccatcttcttcgccggcttcccgcagcaaacgcatttatcggacaggttctcctgctcaaagggtatgcatctggatgtggctccggccacctccttgattttctcctcacactccaggcagccgcaccacatggcttttacaaagccgggcttgttgttgacagtattcacgaattcatcccagcctgcagctgtgtaagtgtgggcatccctgtgcttccttgccttctccagcatggcgtcatggatggtatccagcatttcacctgctcttgcctccagctcatccagggatacaaagctcttctcatggttatccctgcgcaccagcacagcctggttcttctctatatcctttggccctatctccacgcgaaggggcacaccgcgcatctcgcagtcagcgaacttccagcccgggctcttgtccgtatcatccacctttacagcgaatcctgcctttgtaaggcgctccttcagctcgtatgccttatccagcacgccttccttctgctgctgtaccggcaccaccataatctggaccggcgcaattctcggaggcagcaccagaccgttgtcatcgccgtgcaccatgatgatggcgccgatgatacgggtgctcacaccccaggatgtctggtgtacatactttaatgtattatccttgtccgtgaactggatgtcaaatgcctttgcaaatccatcgccaaagttatggctggtacctgactgcagggcttttccgtcgtgcatcagggattctatggtgtaggttgcctctgctccggcaaacttctccttatcggttttctgtcccttgatgacaggaatagccagcacctcctcacagaagtcggcatacaggttcagcatctggattgttctggcctcggcctcctcggctgacgcatgggccgtgtggccctcctgccacaggaattccctggagcgtaaaaacggacgtgtggtcttttcccagcgcacaacagaacaccactggttatagactctgggaaggtcgcggtaggaatggatatcctttgcgtaaaaatcacagaacagggtctcagaggtaggccttacgcacatacgctcctgaagttcctccagtcctccgtgggtcacccatgccacctcaggcgcaaatccctccacatggtccttttccttctctaacagactctccggtataaagatgggcatgtatacgttctgcacccctgtctccttaaaccttctgtccatctccttctggatgttttcccagattgcgtagccggccggcttaatcaccatgcatcccttgacgctggcataatcgcaaagctccgccttctttaccacatccgtataccactgggcgaaatcctcatccatggatgtgatggcctctaccattttcttgttgtctgccatgattcttctccttttcgttatttacattgacccttgcatatctttcattatgaaataaaaagagccatccaatcccctgtgccgtgtgcacaagggaccgaatgactcggcggtaccacccttattaaccttcgggcttaagccgcccttatggttctctcatcatccgttaacgccggacatacgctgcattcatcatacaggactccagggtgggttcagcatctgccaaccgtaaggacctctcacctgcggccctctctctgtgacgtgcaatcacgcttactgttccctttccatgtcatatctatgaattggtcatttctttatgtaagaatgattttacgtcagtttccggactttgtcaaccacagaatcgccatataacgcttctgcggcggacggataacacctttcccccttttcacctttaggggacaggaggtatcttaccctaaaatgcaatcagcatgggctgtcccttatcaggaccttccagggatttcttcaccatttccttaacaaagtcctccgccattgccatggttgagttattggcaatgtcaagctttattctactggctcctctcattaaatctacgtttgctccggttgtggagagataactgcatgctgtcagttcaaaatctccattgggaagctgattgatgtgtgcttgtgcctgaatcataattgtgactcctttctttcatttgatgagccaactatatcactcccagtccttaattgttcctttttggcacagatggcatacaatccgtcatagatggcctatttccagtttctatctgatccctattcccctatgtctcagtttcttcctccttcgtccacgcctccaccatatcctcaatcagcagcaaacccagcggccccagtataaatccaaaaaatccgaataactccaatcccacatacacagacgccagcgtctcaaggggagacagccccacctgtccgcccatcatccgaacctccagaatctgacgcacaaaataacacaccagataaatggctgtgagtaccagtgcctgtttccagtcccctacagccagccgaaggacagcccagggtatcagcaccgtgccggttccaaatatagggagtgcatccagtataccgataccaatacctgccatgatataataaggattgcgaatcaggaacattcccccgatacacagccctgtagtaataaaaagaatgattccctggcttctgaaccaggcctttcctgtctgtaccaggcggcttcctatcatattgaattccttgcggaaggcggactggtccctgcggtccctcagatcctccatttcctgcaggcttaatatggcggccaggaacaccaccaggcttacgatggcggcttttgccagacagctgatgacagacatggagttagccatgagaaagggcatggcagctgtcttgcatgtatctaccatatgatagagcatgtccccggccatgtcggccacacaccccggcctcagccccatggcatgctccaccctgtggcagtttcctgtgagccacaaatcaaactgttccagccaaaccggaagctgcaccataagcagttttccctctgcgcacaatttcagggcacctctgtagagcaccgcccccagtacggacagcacagccagaaactccacgccgcctatgacgccgatgggcatatggtaccgttttccctttaccgtaatcctcatccggtaggacaggaacctggccgacggccgcagcagaagggccaggatataacccacgaaaaaaggagccacgaggggcagcagatatttaaatcctgcatacaccgctcccgtggttcctgttataattaataatttcttcagtttcttacccggcttttccatggactcacctgtttctgattcgtacttcatttgtaccctcatagtatgagccgatggccggaaaatattctgtttcctatgtacaaatcatgccggtaaattattcctttgttaccaggctgtccactgtatcctgtgttaccagctggttgtccaggattacataaggctcaacctgcttgccttccagataatcataggcagtgttaaggatggccttgcctaagaagaatggcggttctgcgatggttgcgtcaaccttgccggccttcattgcatccaatgtgtcgtcgatggcgtcacagccgatttttacgatttcatcggttctgcctgctgcttccattgcctccaatgcgcctaaaagcatctcgtcatttgcagcgtaaagtccgtcgatttcaggattggcctgaagaatgttctccataacgctcatgcccttggccctgtcaaaatcagccacctggcaagccacgatttccatgtccgggttgtccttcatcacttcgttgaagccctgggaacggttctgggcaacgttggttcccatgatgccctgaatctcaacaatctttccttttccgcctaatgtatcaaccaggtactgtcctgccatgcggcctgacttgatagcgtcgtagccgatgtgtgaaataacctcgccgccgttggcctcgcggtccatggtaaatacaggaattcctgcctcgttgcacgcctcgatggaggatacgatagcgtcggaatcacaagtatcaataatgatggcatccggcttctttgtaatcaggttctccacgtccttcatctggatggtgggatcgtcctgtgcgtcggtaatatacagctcaataccgtgctcatcagcggccttctggacaccgtccttaacatccacaaagaatggattggtctgcgtgttcatggcaaggcctataacatatttctttccgcttccctcttctgaaccggcattttccgcctcagctgaagtatcctttgcttcatccttttttgcttcttccttggactcttcctttgccgcctcggtggtggctgctgcggtagtttctcctgaacctgag

SEQ ID NO: 3246 - DNA, 2017 bp, Unknown
  gut microbiota DNA sequence
gataacatatttctttccgcttccctcttctgaaccggcattttccgcctcagctgaagtatcctttgcttcttccttggactcttcctttgccgcctcggtggtggctgctgcggtagtttctcctgaacctgagctgcatccggccatcagtgaacacgccattgccagtgccagtacagttgccccaatttgtttcctcataatacaatctccttttcttaaaaaaatattttgtaacggttccgccgtttcatggataaaccggatgaaccggcagaaccgcaggtaccttatccttttggcccgtttccgggttttactgctctgtatttatactaatttgtattaactctgttctctaactgttattctgccttagccgacaaatccttcaccttcttgtccaccaggactgcaatcagtataacagcgccctttacaatgttggtggcatgaggatttacgttcataagcgtcaggatattatcaataatacccataatcatggcgcccaccacagtggggagcacaaagcccacgccaccgcttaaggacgtgccgcccaggataacagcagcaatggcgtccatctcaatgccggtgccgctggtggactgtgccgaaccaagccttgctgtcagaatcacgcctgcaacgccgcacataagaccgttaagggtataagccatccactctgtaaaacggacggaaatgccggacagacgcgctgcctcccgattgcctccaaaggcatagatgctgcggccgtagctggtctgtgtcagcacatagtgggcaatgaggaagaggatgataagaatgatgacaggaaccggcactccggccactgttcccttgccaaaaaacttgtaggcatccaccttaatgggaataggggaaccttttgtatatacaagaatgcatccgcgaagaagggtcatcatgcccagggtggagataaagggagggatctcacacactgccacaaagaaaccatttacggcgccgcatcctatgcctacggccaaagccaccaaaatggccgctcccgcatttcctgtggattccaggataccggaggccagaacgcctgccagtcccagaatggagcctacggaaaggtcgattcccccggtgagaatgacaaaggtcattccgcatcccacgataccggccactgtaatctgcttaaacacgttaaacaggttggccacgcttaagaagctgggggacaatatggttgcaaatacgcagattaccagtaaaatcagcacggagcggtagatattgagctggccgattaattttttcttatttacactattcattttcactgacacctccagatgcatgggctaagataatttcctgattcatctctgattttggtatttccaggaccgtatggccttccctcatgatgaccacccggtcactcatgccaataacctccggcaggtccgtggaaatcagtatgatgctttttccggccctggtgagctcatccatgatttgataaatctccgccttggcacccacatccacgccgcgggttggctcgtccagaatcagtatggacgggtttgcttccagaaccttggcaaataccaccttctgctggtttccgccgctgagcttaccggccagctgctgcaggctgctgattttaatgttaagccgcttaacctgtgcgttaatctgtttggtctccagcttcttatccagatgaataaaatgggttatcttatccagcgatgacaaggaaacattttccctgatattgcgtatgagcaccagcccttcctgtttcctgtcgtcggacacaaatccgattcccgcctttaaagccttcttggggctggaacaatctttcttttccccgtttatgtaaatttctccggaatccatggggagggctccgtacacgattttagacagctcgatggtgcctgatcccagcagtccggccacccccaggatttcacccttgtgaagcctgatattcacgttgtgg

SEQ ID NO: 3247 - DNA, 3104 bp, Unknown
  gut microbiota DNA sequence
aatggtgcctgatcccagcagtccggccacccccaggatttcacccttgtgaagcctgatattcacgttgtggacgcctttgccgcagatatccttaagttcaagtacggtctcgtcctgcgtgtaatccctctcaggatacaggttggtcacgctgcgtccaaccatcatggacaccacctcgtcgtaattggtgtcgcctatgtccttggtcgctatgtattttccgtctctgaacacagtcagacgatccgatatctggaaaatctcatccattcggtgggaaatatacagaatggaaatgccctccgccttaagctctgcaatgattttaaacagaatacgaatctcctcgtctgtcagggcagccgttggctcgtccatgatgataacctttgcgcctatggtcagacactttgcaatctccgtcatctgcgattccgccacagacaggttccgcaccttggtgcggctgtcaaacttaaggcccaaacggtccagctcctcctgggcatccttgtacagctttttccagtccactgctccgtagggtgtcttaggaagccttcccagatacatattttccgccacagacaggtcccgcaccatgttgaactcctggtatatcatggcaatacccttgcgctccgcatccttggtggaatggaacaccacttcctccccattgacatacatgtgtccggaagtatatccctgagcccccgctataattttcatcagggtggacttgcccgcgccgttctcaccgcacagggcatgtacctcgcccctcctcacatccagatggactccgtccagagctttaactcccggaaatgtcttcacaatcgaatccatctgcaatactaatttttcttccatgttacccctcccttgctgctaagagttcctgaacatgcccccttatgagagcagtatcagtaagcgcatcccgccgataaaatcacgttggtgtacccggtaaattcaccggtaagtacaatggcctttgcatctttgctgcgctccttaagctctgtgtggggaatgtattccaccggaagcccctggggcagaaggtccagcgccttcttgtggaaatccggcgtcacggtcagcgcctcgtcagcaaacacagctccctccaccacgatatatttgagtatctcctccagaacatccagataggccggatcaccgggcctccagcccaggtccacacgctccactccctttggaatgggaagtccggcgtccccgataataatggtatccttatgcctcagctccgccagcaccctggccagctgcggatgtaatattcctgtttttaacatgtctgtctccccttctactgattatgattctacatattatgattctaccgattatgattttcctgatgatgcttttgacaatggcgcttctgattgcggcccttttgtctgcagctcctttgaccgtggtccatctgactgtgttttttttgaccgtggtccatttgactgtgattcttttgactttggttcttttgtctgtagttcctctggttgcggagctttgattgtgctttgacaatacctatgttaagtgtctgtgcgtcagcaatccgcggtctgacgattcgcagccatgaatgcgtcaatctcctccctgaccggcatggagggcgtagtaccgattttctgtacagacagggctgccagggcattggcaaaatcagctgcctcccacaaattctttccctctgccagcgccgccagaaggccgccgttaaatgcatcccctgctccggtggtgtccactgcctccaccttataagccggaatgattcccttcttctctcccgtgtttatatatacgcctcgatgccccagtgtaatcaatacattctttacccctttggagaagaaccagtccgctgccttgtccgccgcttcctcgctgtccaccttaatgcctgtaagaatctctgcctccacctcattgggggtaatcaggtcaattttgcctaaaagctcatcactgacaggctgcacaggggcggtgtttaaaatgaccttaacgcccttcctgtatgcgatgtccacgatgcgctccacagaggacacattggtctccagctgtgtcagcaggtattcggaccggcccaccaaatcctccagggaatccacttcctggtccgtaatggtattgcaggccccgagtataaccacgatttcattctggctgctgttctcatccaccataatcagagcgcatcctgtctccgttgtctcggaatacaaaacccttcccgtatccatgtgaagctcattcatggtattgagggcaatatcggcaaacgcgtcccggccaagctttgtcaccatggtcacatccgctcctgccttgtgggccgccaccccctggttgaatcccttgccgccgggtcccatcttaaatacggtccccttcacggtctcccctgctgccggcagatgcggtgtcctgcccatcaaatccaccacaaagcttccaaatactgttactttttttcccatatgctccataatatgttctctctccttaatccatcttgccggcgcgctccgtacacgcttcatgacaatcctatggccggctccccatcggcaattctgcgccggcagtttcctatcgacatttttccattaacatatttccaccggcagacaatttaaatcagtacaatcccgttgccggctccgattctgtccgcccctgcctcaatcatagccgcagcgtcttccggtgtgcggatgccgccgctggcctttactctggcactgtctccaacagttctgcgcatcagggcaacgtcagctgccgtagctccgcctgtgctgaatccggtggaagttttcacgaaatcagcccccgccttcactgccagctggcaggcccttaccttttcctcatccgtcaggaggcaggtctctatgatgacctttaccactgcgcctgcagaggcttttaccacggcccggatatcctcctccacaaaggagtcgtccccgtccttaagggcgcttatgttgataaccatatccacctcatctgcccctgcctttacagcctcagaa

SEQ ID NO: 3248 - DNA, 5223 bp, Unknown
  gut microbiota DNA sequence
atccccgtccttaagggcgcttatgttgataaccatatccacctcatctgcccctgcctttacagcctcagaagcctcaaaggcctttgcgctggtaagcatggctcccagaggaaatcccaccacacagcacgtctttacaccgctcccctttaactgctccgctaccagcggcacaaagcaggtattgacacagacagaagcaaatttgtgttcccttgcctcactgcaatatcttatgatagtattcttactggcatccgccttcagcatcgtgtgatcaatcatgtgttcaattcccattttcattctccttttccgtttgaagcttttacaggttgaaattgtattatgtaatttctgtaaccggttacacatttctgtaaaaaaatatgataggctttacatttttgtgtaaccggttacagatttgtgcagaaaacaatctgactggattgtcaggttgttttcctgtgttctgaaccccgcaggattaccttgtagggaatggtaatccgctttcctctctgacggctctttcctgaatcttcaaagcactcctgaagaagtctcatggcttcccgcccctgttccctggcatccctgtccaccacggatatcctgtaatcgatcatccgcagggcgtcaatgtcatcgaatcccatcagtgaaatgtcccttcctatctttaccttgtgttccgtcagatacttaagacatcccagagtggaaaggttgttggatgtaaagatggctgtgggcgcttgcgcaagtcccaaaagccgtccggtacattcgtatgccttggcaatcttaaaatcgccgcaggcaacatattcctcaggaacagccagtccgctgtcctccatggcctgcagatagccctggcaccggtccttacccggcttggaggtctctgggccggttataatggcaatcctctcatggcctgcctttattaactccatcactccgtcataggatcccttctggttgtccacgaatacgccgtcaaactgggcccctttcacatcacggtccaccagcaccaccggtatgccggactcctccaatcggagcaggtaatccctggtaaccgtatctgtctctgaaatcggcgttatgattacgcccttcagtctctggctttccacgattttcaaaaaatcatgttccttgtccaacgtctcattggttcccagaaaaacaatattataatggtacgattcagccacttcgctgattccgcttataaccttggaaaaaaactcattctcaatatccgggataatggttcccacgcttaagctgtcctgaatgctcaggcttctggcgatggcgctgggtacataattatactcctccactgccctaagtaccttttgcctggtctcctctttcacgtatcctgaattattgagaaccctggaaatcgtagcggaagagacgcctgcccggcgtgcaatttctttaatgttcatgacccttcccctctctttttcctgtaaccatgccagcataatctgtaaccggttacatatataatactaccacatagattgttaaatgtaaatagtttttatcattttttcacaataaagtcaataggaattcagtggaaataatttaagatggatatcccggctaaccccctataggatacatacagaaaatctgccaaatggatcggatgatctggctgttatacagcagtctatactgctttaagtccgcttatacagtcaaagggagacagcccaaagactgtctccccttttaatcccaactcatgaaatgctaaatctataaaaatatcaattcacatcttaatttcagtatgtaatgacatcacctaaccgctgctatgcaaagaaggatataataagagccactacaaatcccgtaccgcccaccagcgtctccatgatagtccatgtcttaagggtagtcttttcatccagccccaccagtgatttcacaagccagaagccggaatcattaaaatgagagcacaccgttgctcctcctgccactgccgctgtgacacaggccaggtacagaggggacagggttgcaatttccggcatggccgcgatgatgccggctgccatggtcatggcaactgtagcagacccaacagaaatacgcaccagagcagccaccacaaaagccactaccacaatcggaagagaggcagatgacactgcattgccaatcacatcacccagaccggaattctgcagcatgaaccgcagcacgccgccgcaggccgttaccagaagaatcaggcccgtaggctccagagactttgtcagtaccttttccagctcctcgttgctgtatccgtgacggtatcccagaagaaacatagccacaaccgtcgctatggtgagagccacaaacggctcacccaggaatcctaacaccggctgtacagaggcaagggcaggaaccacctttgcaatggaattcaggataatgagaaccagcggaatcaaaataattcccacgattgtcccgaactttggaagctttgattcgtcaaaatcctcctggttggcaatgtgttccggaaccggtatatcgtacttgtttccgcagatagtcccccatatgggaccggccactatcatggcaaaaataccgcacacaatacctaccataatgacccagcccaggtccacgcccagcatggtagccaccagcacgggccccggtgtgggcggaataaatgcatggcctaccgccagaccggccagcaggggaatggcatagaacagggaggagcgtttggttctctttgcaagagaaaaggcaagaggaatcagaataatgagtcccgcatcgaagaataccggcatggctatgacaagtcccgtgattcccaaagcccaggcagccttcttgtcgccgaatttctttaccatggtgactgccagtgtctgagcgcctcctgatatctccaatatggaaccgaacatggagcccagacccacaagcagggcgattcccttaagagtacttccaattccttcatttacagagcttatgatatccgtaaagggcatgcctgcaatcagcccgatggccactgcgcctaccagaatggaaatcattgcctgcaccttaaatttgatgattaaaagtagcagaatcaccagccctgccaaggccgcgataatcagtctggtcggttccagagctgcagctgttgttgttgtcatacttattaccctcctataatttcacacaatatccctatttccgctgatacttccatctaatatttctcgttcatgtttcaacaatagctccggtccatacttcccacaaatatttcccggccagtttccggcaatcagaccatgtatccgcccttcatgggtgatacggcatgctcggaataaattttaagtacgccctttttatacttggcttccctgggcttccaggcttttctgcgctctgcaagaatacgttctacctcttccttgggaagttcctctcccttcacgcctatgatttccagaacgcgctccggtatatcaattctgataaggtcatcctcttccaccagggcaatgggtccaccgtccgctgcctcaggtgatacatgtccgatggctggccctttggatgccccggagaacctgccgtccgtaataagcgctatggtttttcccagctccggatcagaggagatggcttctgtggtatagaacatttccggcattcccgatcccttaggtccttcataccggataaacacggcatctcccggctgtatcttcctggaaatgactgcctcaatggcgtcctcctcacagtcaaaaggttttgccttcaggactgccttaaacatctccttaggaacagcagaatgtttcaccacagaaccctccggcgccagatttcctctcaatatggccacggttccgtctgtcccgatgggttcctcaaaggtcctgataacatcggtgcgcttcagcccccattttttcagatatccgtcgcacttgtcgtagaatccgccagccttaagctcttccagattttctcccagggtctttccggtaacagtcatcacatccaggtgcagcatggactttatttcctccatcacagcgggaacaccgcctgcatagtagaagaactgtgccggccattttccggcaggtctgatatccagcaggtaatgagctcccctgtgcatacggtcaaatgtgtcagcgtcaatctccagtcccagctcatgggcaatggcaggaatatgaagcagggaattggttgaaccggatatggcagcatgcaccataatggcattctcaaatgatttcatggtcacgatatcgcttaccttaagccccttcctggccagttccatgacctggaggcctgccttatacgccatttccttcaaatcttcgcaggttgcaggcatcagcgctgagccgggaagcatcagccccagagcttcggccatgatctgcatggtggaggcagtacccataaaggaacaggctccgcaggatggacaggcattgtgcttataataggtaagcttttcttcggtaatctcacctctctggcacatggctgaataggcgccaatctgttccagggtcagcaggtcggggccagcatccataacgccgccggtcaccacgatagacggcatatcaagtcttgccagtcccatcagacaggcaggcacggatttgtcgcagcttgcgatgaacacgcctccgtcaaaccctgtggaattgccgtgaatctcaatcatattggcaatcatatccctgtgcgcaagtgaatagttgataccgtcatgtccctgggcaatgccgtcgcatatgtctgtggtaaaatacctggctccctttccgcctgcatccgcgattccccgcatagcttcattcacaaactggtccagatgggcgctgcccggatggctgtcgccaaatgtactctcaaccataatctgcggtttatccaggtcttccaccttccaccccatacctatttttaaggggtcgttctccggtgccagcgctcttactctttgactgttcagttccattataatgcctcctctttttgctttacatctgacgtctgacttctttatggttttatagtagcatttttaatttattctttcaagtcatcagacttgttttctactatattgtcaaaaaaatttgatttatttatgcactatat

SEQ ID NO: 3249 - DNA, 32306 bp, Unknown
  gut microbiota DNA sequence
cgccggatggacaggtgagagccggatgagcttgattattgcgatgctgatgctgggaatcattatcatgattcacgaattcggccattttttgtttgcaaagttaaatgggataggtgtgattgaattttcccttggcatggggccaaggctgttcagctttgagaaaggcggcacccggtattcctttaagatactgccgtttggcggctcctgcatgatgctgggggaagacgaggggataacagacgaaagcgcgtttaacaacaagtccgtatgggccagaatttccgtggtggcagccggacctgtgtttaattttatcctggccttcggcctttccatggtgctcattggtattacggggtatgacaccacccggctggccggggttgtggacgggtatccggcccaggcagccggcatggaggccggcgatgtgattaaatccattaacggcagaaaggtccattcttacagggatattaactggtacctgttcacccacccgcagaaatctcttaaggttacctgggagaggacggaggaagggggagggaccgagcgcttcagcacggagctggagcctgtcttttccgcggagaacaaccagtatatgatgggggtccagtttaacccggtccccagcacggtagagaacatagggcagcttctggtacacagcgcctatgaggtacagtactggattcactatgtgtttgacaccttttatatgatgttccacggcatggtttcggtcaacgatatcagcggtcctgtggggattgtgaacgccattgacaccacggtggatgaaaccgcgccctatggcctgtcggctgtggtgctcatgctgattaattttaccatactcttaagcgccaacctgggcgtcatgaacctgctgcccattccggctctggacggagggcgccttgtgttcctcatcatagaggctgtaaggggaaagcccattgacaaggaaaaggaaggcatggtccacatggcgggaatgatggttcttctggcccttatggtgcttatcctgtttaacgatgtccggaaattattttaacggctttgtcctatattcagaaaagagaggtatatatgaccaggaaagatacaaaagtgattcagattggggaccgggtcatcggcgggggaaaccctgtcctgattcagtccatgtgcaataccaaaaccgaggatgtgcacgccacggtggagcagatccaaaggctggagcaggccggctgcgacattatccgcgtggccgtgcctaccatggaagccgcctcggcgctgggtgacatcaagaaggagattcatattccgctggtggcagacatccactttgattaccgtctggccattgccgccatggagaacggggcggataaaatccgcatcaatcccggcaacatcggcgaccgccataaggtgcaggcagtggtggaccgggccagggaatacggggtgcccatccgcgtgggcgtcaacagcggttccctggagaaaccgctgctggaaaaatacgggggagtcacagcggaaggaattgtggagagcgccctggataaggtgaagctcatcgaggatatgggctatgacaatctggtcatcagtatcaagtcctcggatgtgctcatgtgcgtaaaggcccatgagctgattgccatgcggacccattaccctctccatgtgggaatcacggagtccggcaccctgatgtccggcaacatcaagtcctcggtgggactgggtatcatccttcatgagggcatcggggataccatccgtgtgtccctgaccggagatccggtggaggagataaagagcgccaagctgattctgcggaccctgggactgagaaagggcggtattgaggtggtgtcctgtcccacctgcgggcgcacgcggattgatttgattggcctggcaaaccaggtggagaacatggtgacggagtttgatgacctggatgtgaaggtggctgtgatgggatgtgttgtaaacggtcccggagaggccagggaggcagacatcggcatcgcaggcggcgtgggagaaggcctgctgatacgaaggggcgaaatcatccgcaaggtgcctgagtctgagcttctggcagtactgcgggaagaactgctggccatgagccgggaacaccgggcatagaaggaagacggatatatggcaaagaattttctggaagtatttccaaccctcaatatagcggaatccctgaaggagcttttaggcctggcccaggtggagaaggtgaccaccaccagggatagaagctctatccgcatttatctgaagagcgcaaggctgatacataaacagaatatatacgacctggagcgaggcatccgggaccagctgttcccggataagcaggtggccatcaagattcaggaaaaatacaggctgtcggaccagtatacgcccaaaaagcttttggatgtatataaggacagtcttcttctggaacttaaaaactacagcatcatcgagtacaccatgttccgcaaggccgggattacctttgagaaggaggatatcatggtcttgaccgtggaggacaccatggtgaaccgggacaggacagccgagttaaagcgcgtcatagagaaggtctttgcggagcggtgcggcctgcctgtggaggtgcgctttgcctttgtggagccacagggcagcgaccgcagaaaacagattgagcttaaaatggagcgggaggcccaggccatatactggcagaaccacagggaggagctggaagcaatgggcgcctctttctccacccaggggctggagggccaggagctgctgtccggaaatggcggcaggtcaggccaggattcctatttggacgcaggccaggggccggagggcgctccctgggatgcacttatggcccaggctgcttccggggatgtgggagacgggagcgcgcctggagataacgggggccggtcaggggcgccgggttcgtcccaaagccagggaagcccggccagatcaggacagtctgggcagggacaatcaagccagtcaggccagggcggcggccagaagcagggctttaagggagataagccccagctcaacaaggggcgcaagggctggggacgggataaggacagtggtttcggcgacgacaagaagtactctgtcaagcgttccaacaaccccgatgtgctctacggacgtgactttgaggacgagcccatggagattgagaagatcgacggggaaatcggagaggtgaccttaagaggcaaggtgctgacctgcgagaaccgggagctgcgaagcggcaagttcatcctcacctttgatgtatcggattttacggataccattacggttaaaatgtttatccgtccggagatatttgatgaggtgaaatccgccatcaatccgggcatgtttatcaaggtaaagggagtcaccaccattgacaagtttgacggcgagctgacccttggctccatcgtgggaatcaagaaggcggatgattttaccagcaagcgcatggactccagcctggaaaagcgcgtggagctgcactgccatacaaagatgagcgatatggacggcgtatccgaggtaaaaagcatcatcaagagggccaagcagtggggcatgcccgctgtggctgttacggaccatggctgcgtccaggcattcccggatgccaaccacgccctggacaagggggatacctttaaaatcctctacggggtggagggatacctggtggacgataccaaacagctggtagagaattccaggggccaggattttggggacacctttgttgtgttcgatatcgagacaacaggcttcagccctaaaaagaacaaaattattgagattggcgccgtgaaggtggtagacggcaggattacggacaaattctccacctttgtgaatccggacgtgcccattccctttgacatagagaagctgacaggcatcaacgattccatggtgcttccatacccaaaaatcgacgtgattctgccgcaatttctggagtttgtgggggatgcggtccttgtagcccacaatgcaagcttcgatgtgggatttataggccatttcgcagagaaactggaactgcccttcgaccccacggtgctggacacggttgccattgccaggcttcttctgcctaatcttaaccggtttaagctggacaccgttgccaaagcccttaatatttcgctccagaaccaccacagagcggtggacgacgcgggagccacggcggagatattcgctgcctttgtaaagatgctgcgggaccgggatgtaaatgatttaaaccagctcaatgccctcagcaccatggacacggataccatacgcaagctccccacccaccatgtaatcatactggccaagaacgatatcgggcgtgtgaatatgtaccggctggtgagctggtcccacctggagtactatgccagaaggcccaggatacccaagagcctgctggagaaataccgggagggactgattattggatcggcctgcgaggccggagaattataccaggccctgcttcgcggcgctccggatacagagattgcccggcttgtgagtttctatgattacctggaaatccagcctctgggaaataatgcgttcatgctccgggacgagaagagcacggttaagtcccaggaggatttaatcgagataaataaaaagatagtggaactgggaatgcagtttaacaagctggtctgcgctacctgcgatgtccacttcctggatccccaggacgaggtataccgcagaatcatcatggctggccagggatttaaggattcggacgatcaggctcccctgtatctcaggacaacagaggagatgctggaggaattttcctacctgggaccggataaggcccatgaggtggtgatcaccaacaccaggaagattgccgatatgtgtgagaagattgccccggtgcggccggacaagtgtcctcctgtcatcgaggattccgataagacgctgaccaagatctgttatgacagggctcatgagatgtacggggaggacctgcctaaaatcgtagtggaccgcctggagcgggagcttcattccattatcaccaacggattcgcggttatgtacatcattgcccagaagctggtgtggaagtccaatgaggacggatacctggtgggttcccgtggttccgtaggttcctcctttgtggctaccatgtccggaatcaccgaggtaaacccgctgagcccccattaccattgccccaagtgccgttactatgactttgattccgaagaagtgaagcagttctccggcatggccggatgcgatatgccggacaaggaatgccctgtgtgcggcacaccgctggaaaaggacgggtttgacatcccctttgagaccttcctgggatttaagggagacaaggagccggatatcgaccttaacttctccggtgaataccagagcaaggcccatgattatacggaggttatctttggaaagggtcagaccttccgcgcgggaaccataggcaccctggcggacaagacggccttcggatatgtaaagaaatattatgaggaaaggggaaccaggaaaagaaactgcgagattaaccgcattgtacagggctgcgtgggagtgagaaggacaacgggacagcaccccggaggcattatcgtgcttccgctgggcgaggaaatctattcctttaccccggtgcagcaccctgccaacgatatgaccacctccacggtcaccacccattttgactaccattccattgaccacaacctgctgaagctggatatactgggacacgatgatcccaccatgatacgtatgcttcaggatctgatcggcattgaccctgtaaaggacattcccctggacagccgggaggtcatgagcctgttccaggacacgtccgctctgggaatcatgccggacgatatcggcggctgtcccctgggggccctgggcgtgcctgagttcggtacggactttgccatgcagatgcttcttgacaccaagcccaagtatttctccgacctggtgcgtatcgccggtctggcccatggtacggatgtgtggctgggcaatgcccagaccctgattcaggaggggaaggccaccattcagaccgccatctgtacccgagacgacatcatggtttacctgattgcccagggtttggagcagggactttcctttaccatcatggagagcgtgcgaaagggaaagggattaaagccggagtgggaggaggagatgaaagcccacggcgttccggaatggtatatctggtcctgtaagaaaatcaagtacatgttccccaaggcccatgcggctgcctacgttatgatggcatggcgtattgcctactgtaagatattttatcccctggcctattacgccgcgttcttcagcatccgggccagcgcgttttcctatgaaatcatgtgccagggaagggataagctggaatactatctggcggattataagaaaagggcggacaccctgtccaagaaggaacaggataccctgagggacatgaggattgtccaggaaatgtatgcaagaggctttgattttacgcccattgatatctaccgggccaaggcgcggcacttccaaatcatagacggcaagctgatgccatccctcagcagcatcgacggcctgggtgagaaggctgctgatgcagtggtggatgcggtcaaggacggagctttcctgtccatcgaggatttcagcaaccgttccaaggtaaacggcaccctttgttcccttatgtcggatctggggctgcttaaggaccttccaaaatccaatcagttatccttgtttgatttataaacagcttttatgtaggaatccgggagaggcggttaatgctcaggcatgccgcccctccctttatgttttggcggatatgacaaaaatatggttaaatggttgtaataatttgtaatttatgataagttagagttgtactgagacgctacgcaaccatatttgaagaggaggaatcaagcttatgaaaaaaaggatactggcacttgccatggcagcggtcatggccggttccctgacagcctgctcaggctcatcaggaacagacaccaaggcagctccggcggaaacagaagctccggcttcagagagcaaatcagaagcaaaggaagagtccaaggcaggggaaggggatgccgcaaacacatcctcatccaagggaggagccgaaggctatgagcttgccctggtcaccgacctggggaccatagacgataagtcctttaaccagggcgcatgggaaggacttaagaagtacgcggaggagaacagcatctcctataaatattaccagccccaggaaggcacgacggattcctatttggaaaccatcggcctggccattgagggcggcgctaagctggtggtatgtccgggattcctatttgaggagcccatctacctggcccaggacaagtatccggatgtgcactttatcctgctggacggggagccccatgatgcggactacaattataagacaaatgataatgtaatgcccattctgttccaggaggaccaggcaggttttctggccggttatgcggttgtaaaggacggctatacgaagcttggatttatgggaggcatggcagtgccggccgttatccgttttggatatggttttgtccagggcgctgagtttgcggccgaggaggacgggatcacaggcctggaaatcatgtataattacacaggtgcattttcagccacgcctgaagcgcagtccatggctgcttcctggtatcagaacggcacagaggtaatcttcggatgcggcggagcagtaggtaattccgtgatggcggccgcccaggaaaagaatgcaaaggtaatcggcgtggacgtggaccagagtgctgaatccgagaccgtgattacgtctgccatgaagcttctttccaactccgtgtacgacggggtaaaggatttctatgacggcagcttccctggtggcaagacctccgtgtttaccgttgccaacaacggcgtgggacttcccatggatacctccaagtttgagaagttctcccaggagcagtacgatgccgtttacaagaaactggctgacggcgagattgggctggttcagttctcagcggataataatgacccaacgaaggatttgaccgatttgaccaatacaaaggttacctttgtggagtagggactggcagcaatacgggctgtacaagggcctgaaatgacctgcggcagatagtcatgacacagagggtgccggcatgtccggcaccctgctgttataccggaacacctcatcccgccgggcggtggggcggccggaacatgctgtctggacggttttatatgagggggaaccgtatggatgattacattattgagatgttaggcattacaaaagaatttcccggtatcattgccaacgacaacatcacccttcagctgagaaagggggaaatccatgcgctgttaggtgagaacggcgccgggaaatccacgctgatgagcgttctgttcggcctttaccagccggagaagggaatcataaaggtcagaggccaggaagtgaagataaaggggcctttggacgcaaatgcccttggaatcggtatggtgcaccagcacttcaagctggtacacaattttaccgtgctccagaacattgtgctgggaatggagacagtcagtcacggctttcttaagatggacaacgccaggaagaaggtggtggagctcagcgagcgctacggcctctacattgacccggacgcgctgattcaggatataacagtagggatgcagcagcgggtggagatacttaagatgctctaccgggacaatgaaatcatgatatttgacgagcccacagcggttctgacgccccaggagatcgacgagctcatggaaatcatgagaagcctggtggcggaaggcaagtccattcttttcatcacccataagctggatgaaatcaaggcagtggcggacaggtgttctgtactgcggcggggaaaatacataggcaccgtggacgtggcttccatcaccaaggaagagatgtcggagatgatggtgggccgcaaggtgagtctgtctgttgaaaagactccggcagcgccgggcaggaccgtgctggaggcagagcatgtttccgtgaaatcccatatggaaggccataccaagctggtggtaaatgacgtgagctttcaggtaaggagcggtgagattgtctgtattgccggaattgacggcaacgggcagacagagctggtacacgccgttaccggcctgggggaaacagccggaggaagaatcctcataaacggccgggatgtgacgaaaaagagcatacgcgcccgcaatacaggcggactcagccatataccggaggaccgtcacaagcatggcctggtgctggattataatctggcctataacctggtgctgcagcagtattttgaacctgggttccagcgctgggggttccttaaggatgaggagatttataactatgccagcaagctgattgaggactttgacatacgaagcggcgagggagcggacacaatcacccgcagcatgtccggaggcaaccagcagaaggcaatcgtggcaagggagatatccagggaccacgatatcctgctggcggtccagcctaccagagggctggatgtgggcgccatcgagtacatccacagggagctggtaaagcagagggacgcaggtacggccattctgctcatatccctggaactggacgaggtcatgaacctcagcgaccggattctggtcatgtttgagggaaccattgtggctgacctgaatccccgggaagtgacggtacaggagctgggcctttacatggcaggttccaaacgccaggagccagaaggaaaggcaggtgagagggcgtgagcacaaacaacaggacagggagaaaacgggattatgtaggcgtgctttcatcggtctttgccattgtcatcggactgctggtaggatttgtcatactccttatatgcaatccgtcccaggcactgccgggatttgtgaccatcctgacaggagcatttacccacggtctgaagggcgtgggtcaggtgttttactatgcaacccccatcatactgaccggtctttccgttggctttgcctttaagacaggcctgttcaatatcggtacgccggggcagtttattgtgggcgccttcgcggcagtctatgtgggtatcatgtggacggggctggggaggatacagtgggccgtggccctgctggcagcaatactgggcggggctctgtggggaatggtcccgggatttctgaaagcctgctttaatgtaaatgaggttattgcctccattatgatgaactatatcggcatgtatatggtgaactggattgtaaagagctataagcctctctttaacaacctgcgcaatgaatccagaaatgtggctgccacggcccagattcccaagatgggaatggataagctgtttccggagtccagcgtgggcggcggtatccttctggccattgccgccgtgctgattatctgggttatcctcaataagaccacctttggctatgagcttaaggcagtgggctttaacagggatgccagcaggtacgcgggcatcaatgagaaaaggaatattatcatgagcatggtcatagccggggccatagcaggcatggcagggggacttctctacctggcaggcaccggcaagcacatagagataaaggatgtgcttgcgtcggaaggctttaccggtatctccgtggcgctgctgggactgagccatcccatcggagtgctgttttccgggctgttcattgcgtatctgacagccgggggattttacctgcagctctttgaattctccacggagatcattgatatcattgtggcggtcattatttatttcagcgcctttgccctgatagtgaagaccatcctgacccggatgaaccgtaaacgggagaaaggagacggccggacatgagtgtgatttattttatattccagcagaccatgctttttaccattcccctgatgattgtggcactgggaggcatgttttccgagcggagcggcgtggtcaacattgccctggagggaatcatgaccatgggagcctttacaggcatcctgttcctgaacatgacaggaggcaggatgagcggacagatgcagctgcttctggccatccttatctccacggccacaggagctgtctttgcctttttccatgcctacgcatccatcaacatgaaggcaaaccagaccatcagcggaaccgcccttaacatgtttgccccggcctttgccatctttgtggccagggtcatccagggagtacagcagattcagtttaacaataccttccggattgaatccgttcccctgctgggcagtatcccgtttttcgggcctttgttattccagaacacatacatcaccacgtatctgggcgtcgccattctgattttgtccaccctggtgctttaccggaccaggttcggcctgaggctgcgctcctgcggcgagcatccccaggcagcagacgcagcgggcatcaatgtctgccgcatgcagtacgcaggcgtcctcatatccggagtcctgggcggtttaggggggctggtgttcgtggtgcccacatccaccaactttaacgcggacgtggccggatacgggttcctggccctggcggtccttatcttcggacagtggaagccggtgaaaatcatgtgggcctccctgttcttcggcctcatgaaggcggtggcggcagcctattccggcataccgttcctggcggcaacagggatacccagctatgtgtataagatgataccctatgtggctaccctgattgtccttgtatttacatccaggaactcccaggcgcccagggcctccggcgttccctacgacaaaggacagagataggttgatatttatgtaataatatggtagtatatgaaagagtccttagggttaagggctcttttattgagtccggctgtctgaaaaggccggtaactcacgatataatacgaaacgggggatatatagatggaacgcgaaaaattctcgtccaggctgggcttcatccttataagcgcagggtgcgccattggtctgggcaatgtgtggcggttcccttatatagtaggcgaatacggaggggccgcttttgtgctggtatacctggtgttcctgctgatactgggacttcccatcgtagtcatggaatttgcagtgggaagggcaagccggaaaagcgctgccctgtcttttgatctgctggagccaaagggaagcaggtggcatctgaccaagtacatcgccatggcaggcaactatattctgatgatgttctacacaacagtgggcggatggatgatgctttatttctttaaaacccttaaaggggatttcggcggcatggatgcagaagcagtggccggtgaattcgtcagtatgctggccaatcccgcgctgatgggaggattcatggtcatcgtggtgctcctgtgctttggagtctgcgccatgggtcttcagaagggtgtggagcgcattacaaaggtcatgatggtgtgtctgctggtgctgatggtggtgctggccgtacattccatggttctgccgggaggcggtcccggtctggagttttacctgaagcctgacttcgggaaaatggtggattcgggtatcggggaagccgtgtttgctgccctgggacaatcctttttcaccctgagcatcggcattggagccctggccatcttcggaagctatatcggcaaggagaggacactgacaggggaggcagtcagcgtaaccctgctggacaccctggtggccttcatggcaggactcatcatattcccggcctgctttgcctacaacattgaggccaaatcagggccgtccctgatatttatcaccctgcccaatgtgtttaaccatatggcaggcggcagaatctgggggacgctgtttttcctgtttatgtcctttgcggctttttccaccattatcgcggtgttccagaacatcatttcctttgccacggatttgacgggctgcacccttaagaaggcggttctctgcaacatagccgccatcatcattttatcccttccatgtgtgctgggctttaacctctggagcagctttgcccccctgggagaaggaagcacggttctggatctggaggattttatcctcagcaacaaccttctgcctatcggcagcatgctttatctgctgttttgcaccagccgttacggatggggctttaagaaatttatggcggaggccaatgaaggggaggggattcatttccccgcatggaccagggtttatgtgagctatatcctgcctttgattgtacttatcatatttattcagggatatgcctccaagtttctgggaaattaaaaggtaattaaaaagtgtatttgacaagaacagaatgaatgcaaagggctgcccctggggatccgctgtaatcggaatcctcaggggcggtttttgtattcagatagatgtatttagataattgtactcagatagttgtattcaggtttttgtcttccggattttgttccggataaaaaatgtaaaacaaccttgacattcaatgttaagtatactatactaaaaatgtaaagcgaactatactgtaagagatggagacgagaatgaggagtgaagatttaaggccggaatgaatgatgccggaatgaggttagaacaaatagggtaagaacgaaacgagagggtggtgtgattgaaaaccaggatacaggaactaaggaaacagaacaaggtaacccaggaggagctggctttggccctgggggtgaccaggcagaccataatatccctggaaaacgggaagtataatgcttccctgcagctggcttttaagatttcaagatttttcggaaagagcatagaggatatatttttatttgaagaggaggaatgattatgtggctgaatcagttatttattgaaaatcccattgattttgagaagaggtgcagaaacaggattgtgtatggaatatgttttatcctgttgggcgcagcggccataggcctgtcctttgcggtcagaaaccacgctatggtgatgtatctggaacagggatacaaggattttatgccgggattttacagtgggaccggattcggcctggccgcggccggcgtcatatccatcatgcgcaatctgaaatatctgcgaaatcccgagcttaaggagaagcgcaggatatatgagaccgatgagaggaaccgtatgctggggctgcgctgctgggcctatacgggatacaccatgatgatatcgctttatatcggaatccttataagcgggttcatcagcatgaccgtgacaaagaccctgatatccgtagccgtattttttgcggtgctcctgctggtgttcagaaggcttttgcagaaggttatgtagggacataccagttagaggttctaggcaagggcataataagacaaatgaaaacacaggagccaacacacaacaaaaacgccgccattggagacaatgtgcggcgtttccgccggtatgggatttttttaattttataataatgacaaccatgtactcaaataaaaaagatgactaacccaacaaaaacatgacagagcgtgtcatggtatctatggtatactataattaacagataaagattaaagaggtgttttgatatggcagaaaaaattcgatatgaaaaaaagaaaacaaggctgactgaaaaatatcaacagccgccagagtctcttatccggatttttatgggcattgaggcttggaagcgtttaatgcgctttgaggaaatgctaagagagcggtacgatgtaagccgcgaaataaggtttcccttcggcaatgaatatggctggagtttccggtattctcataaaaagtcgttgctgctgtatgtgttttttgaagaaggcggtttttgctgtactatttctatcaacgacaaaggcgctcaggaggttgattccatatttggcgaattgttgccggaaatacaagcaagctggcttaaccgatatgcctgcggtgcagacggcggttggcttaatcgttcggttataagtgatgaagaactgcctgacctgatccgactggtaggcgttaaagtcaagccgaaaaagattgggggcaaaaatgcatgaagggcgccatttccgtattttatatattctgctaaacaatgagcgggttactgcaccagaacttgcagaagaatttggcgtttcagtacggaccatttaccgtgatatagatacaatgagtgctgctggtattccaatctacatgcagggaggccgtaagggcggtatctatcttttggagggatatcggttagataaagtaacgctttcaaagacagagcaggctgaaatacttttagcgctgcaagggctgggagctgttcaatatcctgatattgaccctgttcttctaaaattaggcgcgctatttatgagccaggaccgcgattggattgatgttgacttaacacgctggggaacagccgaaacggttcacagagataaggaactattttcaatacttcgtaaagctattaccgggctgcggcgtattcactttgaatattatagtgccaaaggtgaaatgacggtacgaactgttgaacctgcgaaactcatttatcgctgccgtgcatggtacttggccggatattgtctcatgagacaagaaccgcgtgtgtttcggctttcccgcatgaaaaagactggactgacagaagaactctttgaatattctcctgaaaaggaagctccatattttacgctggatgggaattacgggcctctgctcaatgtaaggctaatgtttaataagtcggtagcatatcgtttatatgatgcttttgaagatgatactatgattcggcaggatgataacatcatagtagaaacgcaattaccggattctgaatggctttacagctttttgctatcctttggtgggaatgtaactatcctggaaccggagaatttgaggcaggctgttaaagaacggattttacaggcgttgtcaatcatttagaacagctgtatactatatatctgacagcggttacttgtaaggaaaagattaatgatgcttttaagcattagggaatggtatatggatagaaaaaaacttatcaatcagagcattgattatattatgaaacatttagatgaaaatttgtctcttgatacagtagccgctcatttttttatatcgaaataccacttcagccgaatcttcaaggaagaaaccggcgaaagtgtctatgcatttatcaagcgctgtaaaattgaccaaagcgcaatcgacatgaaactcaacccagcaaaagcaatcacagacattggtttggattacggatatagtgcgtccaattatagctccgtattcagacagcaccatgataccccgccatctatgtttaggcagtcaatacccacccgcagtatgtctcttcccttttcctcagagcggattgtccattttaaaacagcggaggaatataccgcacaaatcgaagtccagaagcaggaggatctgtttgtgctgtatgaacgttttattggaacttatgcggaccttgaaaaaaactggtatcagtttttagataagtacaaggatttttgaatgaaaagacgcttttggttgagcggttttttaatgaccctgctattaccagcccgctgcaatgtatctgcgatatttgcatgactgtggaaccggattgtgggctaagtaatgtcatgcagatcagcggcggccaatggatcgtgtatcatttcgatggaaagatcaaagacatctttgaaacactggaggggattttcagcgtttggtttccccaaagtggttataagatgacgcggagatatggactcaatatttatcgccgcgttgaccgggataatcacagcgttataatggatttgtacatcccaatttcataacagcaagaattcagaagcgggcagcgcgctttctttttataatataagaagtattaagcctttatagaaattggtacaagataaatacggaggaaaatatgtttgatataagaaaagtgcaggagaaagtaatgtatgaagctgtcagagcaaaaagcaatgcagatgtggctggtgaagtggtatacggctgtgagaaggccgctcatacggaaaataattctgactgggtgaagtctgttatgcggcgtctggaaaataaatttgaatcagaggatgtcaaagaaatacgaatgaactgtcaatgcggttacggaatgaacgaaaagcttgtgcttgtaaaggagctgatggcaggagctgctaatatagaagaattcacaaatttggagaaggcaaaggcggcggggctgttttgtaaaggcggcgagctctttctgcaatttgatttttgtccctgtcctatgcttgccgaggtggaacgattagagacagccgcatggtgccagtgtactaccggctacagcaaggtcctttttgaacaagcgtttgcctgtaaagtggatgttgagttactgaaaagtataaagatgggggattctgtgtgtcttatgaaaattactccccacaaccctgtctggcaataaaagagaatacgacgcagggggttacacggcgctgcaccgccgccatgcccctgcccggtcaagtgcccggcaggggtcattgacatccgggtcattttcctttacagtgtagttggggaaacgaaggcgcagtgaaggagtccaagggaaggagacagccatgaacctggaatacagaatcaatgaaagctacgaccgtctgacggccaatgacagggaggttctgaatcggattttacggaacaaggcgcagtctgccggtatgaacagcacggaactggcggccttctgccatgtgtccaggacaaccctgatcaggctgtttaaaaaactgggaatcggcggctttgctgagttcaggcttttactgaaagaacgggccgggatgcaggagctggcccgcctggatatggaggaaatcatatccaactatcaccgcatggtggacggccttagggagtacgactacagcgtgattctggaggccatccatgaggcgggtaccatatatctctatggcacgggaaatgagcagaaggccattggggaggaattcaaacgtattttcctgatgtttggaaagtgctgcattgatttattcgattacggggaggtggagtacgcttcccggtattttaagtccggagatttgtttgtggccatctcattgtcgggggaatcggaaaacggcgtacaggtactgcgttttgtccagtgcagggaaataaaaaccctgtccattacccgctggaccaataataccatggcccggatgtgccggtacaatctctatgccggaaccagaatgataagcggaggcggggagccgggatatgagatggtggctgcattctacatcctgttagacatgctgtcggtaaattacctggaatatgagaggaagggccatgagactggaagaagcgttcaataaaaattataacaggttcacggaaaatgaacagtatatctgccggtatttgctggagcataaaaaggagtgcgccgtcatgagcataacagaatttgccggaagctgtcatgtgtcggaatccatgttggtgcgttttgcaaagaagaacggtttggcgggatatggggagctgaaggctaggctcagactggaggagcaggaaacagaagaagccctggggcctggggaagagctgcttaatacggtgacagacagttaccacaaaatgatggatgagctgattggccgcggcctggattccctctttgaaaagctgtacagggcccggcgggtatttctctatggcagcggctcagcccagactagggcagccagcgagatgaagcgcattttccttccggtgaaggaaatgtttcatatccatggacacgacatgcggggcgcattgtccagggtgatgacggaacgggacatggcagtcatcatatcactgaccggggagtctgaggccacggtaagtctggcccgggaactgcggctgagacaagtgcccaccctttccattacccggctgggcaataatacactggcatctgtctgtgatgagaatctctatatccattccatcaccctgccgtccagatacggggttgaatatgagatatccaccccctattttattctgatagaatatctgtatctggcataccaggagttcctgaaacgccggttggactccctgtaaatctctgaaataagcatttttaacatgtttacaaatattcaaaaaccgaaaaaatgtactataagtgtacaaagattttaagcgggtccaggctattgccggggcctttgttttttgctagaatgaggtcacacagataaggaaggtagggaaaatggttaaggcaattttcttggacatagacggcacactcagggacgaatgtagcggcgtgccccaaagcgcgtatacagcggtccgcatgtgcagggaaagaggaatccggatactgatatgcacggggcggaatctggcttccattcaggaggaaatcctgtccatggatacagacggcatcatagccggaggaggctgtctgatcgcggaaaacggatatgtgcagaaggaaagttattttcaaaaaccggaaacagaacggattcaggaatacctgttaacaagggaactgccttttgccatggagtcccaggagcgtatattcatgaacatggctgcggcagtgctgcttagacaggactttatcggcaagctaaagggactgggagcagaggaaataaggaaacgggagaaggaaaacagtatcccatatgaagatacccttaaagagtatatgcacagcccggatcacatacacaaattttgtctgtggtgccggcctgaggactgggaggccgtgtgtgcaacggttccgggatggggcgctgtcgtccagcagtctgcccccacggacggcaaaatcagaaaatggggatatctggagctccagcctgcgggctgcaccaaggggcaggccatacgctggtggtgcaggcgcaatggaataagattggaagataccatgagctttggggacggaaagaatgacgtggatatgattcggacaacgggaatcggagtggccatggaagacggggatgaggagctgaagcaatgggcggattccctgtgcaggccggctgcccgtgatgggatatacagggaactggtaaggcggggaattatcgagtgaggttttactgggaagagagatgttgagcagggatatatcaggcagagagatatgggcagggatatatcatacagagtgatattagacaaaatttatcgggagaaggagaggattagatgagagcagaagagcagttaagaatcaggctggaggaaccgtggtggaaggaagaggtggtgtatcagatttatcccagaagctttaaggacagcaacggcgatggtataggggatatacgggggattttggaaaagctggattatctgaaggcgcttgggattactatgctgtggctctgccccatataccagtctcccatggatgacaatggttacgatgtgtccgactactgtgcactggcccctgaattcggaaccatggaggaactggatgagctcatagagcgggcgggagatatgggaatcaaaatcatactggatttggttatcaaccatacctcggatgagcaccgatggttcagacaggccctggaggatcccgaaggggaggaacacggctactatatatttaagaagggggacagggaaccaaataactggcgttctgtattcggaggcagtgtgtgggaaaaggtggaaggacgcagcgaatattatttccatgcattcgggaagaaacagccggacttaaactgggaaaatgaaacccttcggaagaagctgtatgagatggtcaactggtggctggagaggggaattgccggattccgcatcgacgccattacctttataaagaaagacctgacctttgcagaccaagagccggacggggcagacggacgggccaaatgcaccaaggcttccaggaaccagccgggaatcggggaatttctcaatgaactgaagcgggaaacctttgacaggcatggatgtgtgactgtggcggaggcgcctggcgttccctatgaaggactgggggatttcatcggaaggaacggttatttttccatgatatttgatttccgctatgcggatttagatatagcctcgggcagcgaatggtttaagcgaagggaatggacggtgaaagagcttaaggataaaatcatggcaagccagatggctgtccagacctatggatggggggccaacttcatcgaaaaccatgatcagcccagagcggcaaccaaatatctgaaggaagcagcagaaaatcccagtgctgtcaagatgctggcagccatgtatttcttcctgaggggaacccccttcctgtaccaggggcaggagctgggaatggtgaattttgaacggagttccctggatgcatttaacgatatatccagcatagaccagtaccaccgttccctggaggaaggcttcagtgaagaggaggcgcttcaaatcatcaacctgagaagccgcgataatgccaggactccgttcccatggaccggcgggcgatacggcggattttctgaaacagcgccatggctgcccatgagccgggaatatccggagaacagcgcaaaaacccaggaaggggacagggacagcatactggagttttaccgctccatgattcggttcagacagtggggaccctggagggactgcctggtatacggcgccatacgtcctctggcgtgcagcgaacatgtaattgcctatgagagaagaacagaggatacggttatctggtgttactttaatttcagcggtacagggacggtggagagactgccgggaatcagtgcaggatgcatatgggccaatgaccgggaggcaatggacggaatgatgtttaatggggaaacagctgacaaaaagacagccggcaaagaaaccgccggtaatagaaccggcatagaggacggaacgctttatttggaaccatatcaggcgctgcttttaaagggcagctgttagaatgcggagggaatcgtgatggaagggaatcagtacagggatgcggcaggacggatagtggaggcggtgggaaaggacaatatattgtcagccacccactgcgccacaaggctcagactgatagtaaaggataaggagcggattgacgaaaagaagcttcaggaaatagggatggtcaagggaaccttcttcaacgccggccagtaccagattatcctgggcacagggattgtgaataaggtctatggggagatggaagggctggggctcaataccctgtccaagcaggaacaggatgaactggtaaagaaccagcaaaagggcgtcaagcgcatgatgcgcatgctgggcgacatctttattcctatcattccggtgattgcagctaccggtctgttcctgggacttaagggctgtgtgttcaatgacaatgtgctgggccttctgggcctgtccgcatccatcataccggactatgtggtgaccctggtgaacgtgctcacagagactgcctttgcctttcttccggcccttatatgctggtcggccttcaaggtgtttggaggaactccggtcatcggcctggtcatcggacttatgctggtatcccccagccttcccaacgcatatgcggtggctactcctggcagcggcgtggaggcagtgatggcattttcacgcatccccattgtaggctgtcagggaagcgttctgacagctatcctggcagcgtttctgggggcttccatggaaaaaaagctgagaaaaattatgcccaatgccctggacctgattatgaccccctttctggtgatgctgggaacatttctggtggtgatgctgggaatcggccccgtcatgcatgtggtggagcttaagctggtaaccattgtggagatgctggtgcacctgccctttggcataggaggattcctgattggagccacctatccgctgctggtgattacaggactccatcacacctataccatgatagagacctctctgctggccaataccggatttaaccctgtcattaccttatgcgccatgtacggatttgccaacgtgggaacctgccttgccttttttgtgaaatccaggaaacagagcgtaaaatccaccagcatcggggccatgctgtcccagctgttcggaatcagtgaaccggtgctgtttggaatccagctgcgctacaatctccgtccccttgtcatcatgctgtttacgtccggcctgggggcagcgcttttgtccgtgctgggaatacagtcaaattcttatggactggcggtgcttccctcatatctgatgtatatatacaagggaaaccagctgatgtggtatttcatcatttccatatgttctgttgcatgctgttttttccttacatgccttttcggaattccgcaggaggtgctggaagcggacggagaaccccatgacccagcgttccgggaaaatcagttgacaggaaaaaatgccggtgaaattccgggtgaaataacaggagaagcagtatatgatatggtttctccggcagacggatatatcctgcctctggaccaggtaaaggatgaggtatttgctggaagggtgctgggagacggttttgcggtggagcttaccagcggccgtatcctttcaccggcagacggtacaattgaagctgcctttgacacgggccatgcagtgggaatccgcacggagaatggaatggaaatcctgattcacattggtatcaataccgtggaactgggaggaaagggattccgccttcatgtttcccagggacagaaggtacgcaggggagattgtctggtggacgtggatttggaggaagtgaggaagtctggaaaagatctgaccaccatggttatttttaccacaggagaaagcgtagacgtaaaaagcggggaggccgtgacggccggggctggatttgaaatacggattgggcagaagggaacccgcgggtcagagctttcctgatataagctgttataaatggaaacggatgaggaagcaaaaaagtagacatataagaaaacaggcagatgcacccagggatacaagattatccccgccgtgcatctgtctgtttttgagtaatcataaattttgctgaatcagtaaatatagtaaattttttcattccgggcatactacctattgacaatatgcggttagtgctctataattgcaatatacccaggtggggtataaggagggagtgaaacatatgaccacgcagcaatatcatatagacggaatgtcctgtgccgcatgcagcagcgcagtggagcgtgttacgagaaagttaaacggtgtggagagcagtaatgtgaatctgacgaccaaccgcatggtgattacctatgacgagagtcaggtgacacctgaaatgatttgtgagaaggtatccaaggcgggtttttctgccagcctgattgtggaggaagaacagaacaagaaaaaggaagaagaggaatggcagcagcaggaggaacagctggaggctgtgaagcgcagggtggttacagctatctgttttgcggtgcctttgctctacatttccatgggtcatatgctgccctttaccctgcccttgccggcgttcatgcagatggataagaatcctctcaattttgccctggcccagctgatactgaccgtaccggttcttatttgcggacgtaagttctatctggtgggcatccgttccctgcttaagggcaatcccaacatggattccctggtggccattggtacgggaagcgcatttatctacagccttgtgatgacctttggcattcccggagatcacatgaaggcccaccagctgtattacgagtcggcggccgtggtggtcaccctggtcatgctgggcaaattcatggagagccgcagtaagggaaagacatctgaggccatacgcaagctcatggagctggcgccggacacagctattctctatgagaacggcatggaaagggaagtggagacctccctggtgtctgtgggtcagcatatccttataaaaccgggcagccggatacccctggatggtatacttgtacagggcagcagcagcgtggatgaatccatgcttaccggagagagcatcccggtggagaaacagccgggggacagcgtgatcggcggaagcatgaattacaatggagccatggaggtagaagtgacccatgtgggaagcgataccaccctgtctaaaatcattaagatgattgaggatgcccagggcaagaaggcccctatctccaagctggcggataaggtggccggatactttgttcccgcagtcatgggaattgccctggtggcggccctgctgtggtggatattgggaggaaaggaactttcctttgtgctgaccatattcgtggccgtactggtcattgcctgcccctgtgcgctggggcttgccacgcccacggccattatggtgggaaccggagtgggagccgggcacggtattttgattaaaagcggagaggccctggagatttgccataaggtggatgctgtcatactggataagacagggactatcacagagggaaagcccaaggtgaccgatgtaaatgtaatcagcggtgctgtggtggagcaggtgtggaaactggaatcctcctctgtgccgggggctgtgttgcctgccgcgggtgagaaccaggaaggcagtgcttccaaggacagcgccagggaacctcaggcctctgacgacgagaaaaaggagcaccttctgggaatcgctgcttcctgtgaacagatgtcggaacatcccctgggccaggccattgtaaacgccgccagggagaagcagatggacctggccatgcccgaagcatttgagagcatcaccggggcaggcatcatcaccacctggaagggatggaaggtggcagtgggcaaccggcgtctcctggaccacctccatgtgcctgtatcccaggatacggaaaagacagcctcagagtacgccaatacaggaaagactcccatgtatgttgtgatagacggacgtctggccggaatcgtgtgtgtggccgatacaattaaggaaaccagtgtggaggcagtggaaaaaataaagggtctgggagtgaccgtctacatggtcacaggtgacaatgagaaaacggcccagtacatcggtaagctggcccatgtggaccaggtggtggctgaggtgcttccggaagataaggcacaggtggtaaaccggttgcagaatgagggaaaaacagttatgatggtaggtgacggcatcaacgacgcacctgcgctggtacaggcggatgtgggctgtgcggttggaaacggcagcgatattgccctggagtcaggggatgtggtgctgatgaaatctgacctgatggatgtctacagggctgtcaaattgagcaaggcaaccatccggaatataaagcagaatctgttctgggcgtttttctataactcattgggcatcccggtggcagccggagtgctgtacctgttgggcggcccgcttttaagccctatgctgggaggatttgcgatgtctttaagctcagtgtgtgtggtgggaaatgccttaagactcaggaatctgaagctgtagcacaggtcttaaaagacctggggaaaccgatcctgtccggaacaggggcggtttcccccaggaacagtaaggtaaaaggagaggatcacatgaatcaggaagaaggctgcacctgccgccataaacacagggaagtgacggaagaacgcggtctaatgaaccggctgaaccggatagagggacagataaggggtatcaagtccatggtggaggacgagcgctactgcgtggatatcatcacccaggtggcagcggtccaggccgcccttaacagctttaacaaggtgcttctggagcgccacatcaagagctgcgtggtggatgatatccgccggggcgacagcgacgccacggtggaggagctttgcaggaccctgcagaagatgatgaaataacaggaaaccagacatagaaaacaattatagaaaccagagataaaggaaacgaaacgatacatgcagtttaattcatatttatttttattattattcctcccggctgtgctggcaggatatttcgggctttgccggatgaagcgccatacatgggccagaggatttttggctgccatgtccctggtatttttcgcttacgcgaatccatggtatctgggactgctggtgggaagcgcggtatttaactgggctgtttccagagtgctggcaggagaaggaaataaggagacagccaaaggaaatggtaagacgcccggcaggacggatggtaaaaagagcggcaggcccggcagtaggatggttctggtatttggcatatgcgccaatctggccctgcttttttactttaaatacacgaatttctttatagagaacctgaacgcgtttctgggaaaggacattgcctttacaaggcttttccttccggtggggatcagcttttttaccttccagcagattgcgtggctggttgactccttccgcatggagacaggagattacagtttttgggattatttcctgtttaccgtatattttcccaagatagccatgggacccattctcctgcacggagagttcattccccagcttaaggacccatcccgcctgaaggcagattcccgcaatatggcagagggactgatgatactggccgtgggactgtttaagaaggtcatcctggctgagttttttgcggggccggtaaactgggggtatgcccaggtggagatactcagctccacagacgcgtttctggtcatgctggcttacaccttccagctgtattttgatttcagcggttactgtgacatggccatgggaatttccaggatgttcaacctggaactgccccttaattttaactctccctacaaagcgctgtctccggtggaattctggaagcgctggcacatgacactgacccgtttcctcagaacatatatctattttcctctgggtggaagcaggaagggaagcctgcgcacctacatgaatatcatgatagtgtttctggtaagcggtttctggcacggcgctgcctggacctttatcctgtggggggcgcttcatggcgctgcccaggcccttaaccgtgtatttaaacggcagtgggagaatctgcacacggcttttaggtggatggccacctttctctttgtcaacctgacctgggttatcttccggtcagagagcatatcccaggcaaagctgtttttgaaacggctgctggattttggaaacatgcagattaatccgtcctttatggacagcttcaagatggtggaactgcctctctggctgacaggccaccgggtatttaccgtgctggggctgtatggaatcgtgctttgcctggtgatgaatgccaggaatatgggggagacagagcttcgtcccaccttccttcgcggagcgggaacagccgtccttctggtctggtccgtcctgtccctggcaggaatatccggcttcatttattttcagttctaattaggcttatttgaataaacagctacaggagagattatattggatacacaaaagcaggaaaatgggacagaagacatgaggtatgggagatggctgcggtttaccgtgggagccgtactggccatgttggttatgcttggcggactggtggtctgggtggatccttttttccactatcacaagccccttgaacatctggcataccccattgacagcgaacggtaccagaatgacggtatcagccgcaattttacatacgacgcagtgctaacagggacatccatgatggagaattttaaagccagccgttttgacagtcttttcggcgtctcatccgtcaagataccatatgcgggaggatattataaggaggtggaccaggctgtgaaaagggccctgtcctataacccccaggtaaaggtggtgtgcagaagccttgacaggagcttcctgttttatcagaaggaccagcaaaatccggcggctccttccccggattatctgacggatgacaatccctttaatgatgtgaattatattttcaacaaggaagtgatcttcggcactattcagggtgtctttgccaggacaaaggcaggcgggcagaccaccacctttgacgaatacatgcactgggcaccggagcgggactggggcagggaggctgtcttaaagacatatgaacgggagccgcaaaaaaatgaaaccgttccttttacagaagaagaccgccgtacggtcatggagaacctggaacagaatgtgctggccacggccagggccaatccccaggtcaccttttactactttattccgccctacagcatcagctggtgggacagcgagctgatggtaaaaggggagtttgaacggcagatggagggataccgcctcatggcccgtatgctgctggagtgcagaaacatacgtctctttgcctttgacgaccagtttgacattacctgcaatctggaccattatatggatgtaatccactactcggaggacattggtgaccagctgctggaatggatggcggcaggagagcatatgcttacaaacgacaatgtggaccgctattttgatagaatcacggatttctatgcaaactatgattatgacagcatttatgaatgacgggatgtttcagaaagtcatgacagcctcatgacagccggacaggatggcgtccctgcctccagagggcggggaaagcctgttaatataaaaacagaaaaggagaatgaacatgaaaacttataagtgcgaggaaatgatgtgcgagggttgtgtgaaccggattaagaagggactggacggagcaggcattaagaatacggtggatttgtccgtcaagacagtgaccattgacggggataaggactgcgaggccaaggcagtggagattttagacgaccttggatttaccgcggtggaagtgtagtacagaacctgtaactggggcttttcggaaattatcataattattttaaaaactttgacaatttatggttgactttctggaataaatgtattatactaccaaaggtatcgaggcgtggctcagtttggtagagcgctgcgttcgggacgcagaggccgcgtgttcgaatcacgtcgcctcgatttacctttaggcctgatggtcaagcggctaagacgacgccctctcacggcgtaaacccgggttcgattcccggtcaggtcatgatggcaaggctgttgcttaggcagcagccttgttgcatcaaaggaatggcaattgctgttcggatgccactgtagcgcagttggtagcgcaacgcattcgtaatgcgtgggtcgccggttcgagtccggccagtggcttgataaaaattccttgtgtccgcaggcaatattattaggatagtgatatttagttaagcattctttcatggctgataaacttttaatgtttaccagctattttttttgtcttgtttttcactcctgcaaaaaagtatactacaataaggcagatggaaatgtctgcgtatttagaaaaagtcccttattctgttaatctgataggatatgtggtaaaatgttgcttgtaaaacaaaatttttcggtataatgaatgattgagttaaaacatctgccgactgtcttatccaaaagaccaaggctgggggaatagagatacaataagattcccggacctgaatggatttgagatggcgcaagaaagctgggaggaattgtgatgaagggatatcatattctgctgggagaggatgaaccggatatattggaatataacagggaacagctggaacagcgcggctatcaggttacggcggtttccacactgggccaggcggagtcgtgtgttctcagggataatccggatttgctggttttggatgttatgatgccggacggttccggggtagatctgtgccgaaggctgcgtgagcagtttcaggggccgattctgttcctcacaagcttgggggagagcagtcagattgtccaggggctccgggccggaggtgatgattatattacaaagccttatgatattgaggagctggcagccagaattgaggcacatctccgaagattagagcgcaggggcggggaagatatccaccagggcggcagcaggttatatttgaatgtgaagagccagcgggcttatctggatgggagagacatgcttttaaagccaaaggagtaccgtctcctggccgcgttgatgagaaacaggggaagatatatggagtccggggagctttacagggagatatgggatatggcgcccaaccgggatatacggacagtctgggttcatatatctaatctgagaaagaagctgcaggatgcagacggagagttgatagcggatatagaatgtaaacgtgcactgggatataagcttgtgatgtttgaggatgagagtgaagattagacggtgggacagatgaggagaacgtattatagaattgtattgacagtggtactggctggctttctggctggaaaaacagtaatttttccagcttatggtatggtcagtgacggggatatgtccgaattatccacaggagaagatggaaaagaggatgcctctttatccccggacggagaaggaagccgggaggaagcgccggaaaattcgcatggagaaaacggagagggggaaaccccgccatccccggacggagaagacggagagggagaagccctgccatccccggacggagaaaacggagagggagaaaccccgccatccctggacggagaagatggagagggagaagccccgccatccccggacgaagaaaacggaaagggagaaaccccgccatccctggacgga

SEQ ID NO: 3250 - DNA, 2422 bp, Unknown
  gut microbiota DNA sequence
ggtccatacctgggaagggaattcctgcagccggaaaaactggcccagctatccaaaattatacaggctggttcggcatctaatattacggaggccattaagatgtaccaggatgcaggacagtcataaaattttaaatataagagctatgtaaacaggtcctgtagattgcaggacctgtgtaatttatggcgcagcatgtgtaattataatgaacagaggagggtgcaccagattggatatactattcgtagtgccatatccggaattagaaccggtagttcaggaggtatacaaggaatatcctgaaaaaaacaaggtcactgtggaatttaaagtgatgacggttgatatggttcgtcagtacaaaatggagagggaatatgatgttcttgtggggcgtaattttacacttgaagagctgaaacaccagtaccccactaaacccgttattaatattccaattacaggttacgatatagttcaggctctctgcgaggccaagaagatgtatcactgcaggaaggtggggattgtgggtcggttttttcatatgtatcaatacgaacatatggaagaaattaccggggtggagacctcctatcatccggttgaccagggacatgatttggaatgctgtgttgccgaggcagtgagccagggatgtgactgtattattggcggctattccacttatctgtatcttaagaacggccctattcctgtagtgactataaaggtcagccgtgaaactatttttaatgtgttggaagaagctgttcatatagcggaagaggttaagaaggaaaaagaaaagtctgagcttttcagaatcattactcaaatttcaaatgcaggaattttttatgttaatgataaaggacagatagagatagcaaacagagaagcaagaaagttgttcccgacagtgcagactttacggggggggggtcttatctgaggcaaattgctccgtttatgcagcaggaggcggaatgctgttttgagtctggtgaaagcatagtggatagagtatacctgagagaaggcaattctctttctacggatttccttcccgtaaaaataggaaattctatgccagggctggtggtcagttttatgaatgcatcaagaatacagcagatggaaagtcagatacgccggcagatgagtgataaagggttggctgcgcggtatacattccgggacatagtccataaaagtgatattatggataagaccattgagaatgccggaagatatgcgggagtatcctccaatgttcttcttgtaggggagacaggaaccggaaaggagctttttgctcagagcatacataatgccagcaaaagggcgggaaatgcttttgtggcagttaattgcgcggcactgccggaaagcctgttggaaagtgaattatttggttatgtagagggggcttttaccggttcaaaaaagggcggaaaaatgggattgtttgaaatggcccataagggcacactgtttttggatgagattgcagaaattcctttgacatttcagagtaaactgcttcgcgtgctgcaggaacgggaggtgcgccgtgttggcggtaactcagttatatccgtggatgtacggattattgcggccaccaataaaaatctgcaaagacaggtgagtgaagggaaattccggcaggatcttctttaccgtttgaatgttcttagattatacattcctccgctgcgcaagcggagtgaggatatcccccttctcttccattactatctccaatactacagtaatcaattcggttatgaaatgcctattttgtctgaaggagcagaggagctcattaagcaatatgcctttacaggcaatatcagggaacttaggaatatagctgagcggttgagcgtggttcatagcggatatatgataacagaagaagaaatggcaggagcactggggcaggatgatatagaaattactgagtatacagagcggccggccgcgaccggtccctcctatatgatgtatgcggaaggcaaaagggagcaggagaagcagtatatccagcgcctgttaagtgaatacggatataataggagcgagaccgccaaggccatgggaattgaccgctccactttatggcgaaaaatgaaaaaatatgggttgcagtagtgatgcgttgcaaaaatcatcaatagcaacgaattattactacaattgggaaaaaattaacaatacacggaaaagatgcttatttcgatggatatgagcatctttttttatattatggggtaattgtggttgagacatggtgaaatctaatagaaacattttgaaacaggtatacaacagaataatacaaaaaatttaaattatttgtaatcaacaagctttattgtgtattatttatatgtttggaaaaaaatga

SEQ ID NO: 3251 - DNA, 10062 bp, Unknown
  gut microbiota DNA sequence
tcaatttttttttattaaattatcttttttttgtgcaagactcacaaatttaatatagtaatttagtaaatatggagaaaatcaaaaatcaccccggcatagaacaaaaaccgttctgtgccggggcctgttaaggcgctcccactgccgcaaagtaatatcacagctgtatcagagccttaatgcatccatccctccgctgtgtaaatacgtcaaccgcctctctcatatcctccagggcaaagcggtgggttatcatgggcagcggatctgcaattcccattttcatcatctgcatcacctgttggtggctgttgggatttcctctgctgccgcacaaggtcagttcattccacatgatggctttcatgtcaatcccgtaagaggatttgcggggcgaggacaaaagggcaatccttccgccccgcttcacccctgcgatgcaattgcgaaaagacaattctgttccggcgcactcaatcacctggtccgcccctattccgccgcttatgctgtgaatccgctctccaatgtcctctgccgtataatcaagaaccacatccgcgcccatctgctttccccgttccagcctgtctcccctgccgcacagtataacccggctgcccattgcctttgccaaaagcatggcagacatgcccaccggaccgcagcccatgacggccgtgagccctccgggcctgattcccactgattcaatcccatgaagggccgtggccatcgtatctgccatggcaccgtgttcacaggtcaggccgtcgggaatatgatggacggcccgtatgtgatagacacagtattgggcatagcatccctgagcggtaaatccatactgcttatgcccctgctccctgataccgaaattaaggcacaggttataccgccccatcctgcagttggcgcagtgtccgcacccaagatgggcctctgccgccaccatatcccctggtttaaaatcagtcacgccgcttcccacggtttccaccacgccggctccctcatggcccggtataaaaggcatgtaagcgggcagtccgtccttcaggctctctcccgccagaaggggcggatctgatccgcagattgccacggaatgcattcttaccagtacttcctgaaagccgggaaccggcttttttacatcctccacgccgtattcccccggcgccctcataaccaatgccttcataagttatccttctaccttctgttcttcatgttgtcggccaccactgctattactataatggcgcccttgaaaatctgctgcaaatacggtgataccatcattaaatccaggccgttttgcagaacgcccattataagcactccgcccacaacgcccatcacattgccggaccctccggtcatgctgacgcctccgattaccgtggaggcaatggcatccatgtgatactcgattccgttggtggctgaacccgagcttacacgcccggtaatcaggatgccggaaatggtggcaaacacactcatcagcagaaataccttgattctggtcaaatcaacgttaatgccgcaaaccctggccgcttcctggttgcctcccagtgcataaattttcttgccaaaggccgtcttttgcagcatgatgctgaccactgcggcacatataatgaatacaattactaataccgggattcccataagcttcttgcttcccagccactctatctcaggccgtatgccgctgataggctggccctttgagacaatcaaagccaggccctttgccacgctcatcatgccaagggtagcgatgaaagaaggaatcctcattttcgcggtcaggacaccatttaccagaccgcagcacaatcctgccagcagaggcatcaggaaagccagaaccagcggacattccctgctggcaaagtaagcgcatataacggatgtaagcgcaatctgcggtcctcccgaaatatcaatatcgccaatcagtatcaccagcatcatgcccatggtgagaatccctaccagtgatatctggcgcagcatattcacaagatttcccggttttataaactgcggcttaatcattgtcagaacaatcatgagcgcaatcagtatcagtataatactgtattttttgattaagcggctggctgcggccctttctttattttccattttaatgtttcctcccttcatcttccccgaatgcaatctgcatcagaagctcctgcgtggcgtcttcccttccaatctcaccggccttgcggccttcgtgcataatgacaatgcggtcgctcatgcccaggacttctggcatctccgaggataccagaatgactgcagtgccgtttttgttcatttcacctagcaggcggtggatttccgcctttgcatttacatcaatccccctggtaggctcatccacaatcagaatcaagggggcattgatcatccatcttcccatcagaaccttttgctggttgccgcctgaaagcaattcaatatgttgctccatagagggtgttttaaccgccagtttggcccgcatggattccgtatgggccttaatccggttaaagtccagaaacatcccctttttctggagttccagattcgacataatcatattgtcagtgatatccaggggaagaaagcatccgctggcctttctgtcctctgtcagcaggccgatgccaagggcgatggcatcatgcggattccttatatgtacttcctttccccggataaataccctgccctccgtatggggacgcaggccgaacaccgcttctaaaagctcgcttctgcccgacccaatcagtcctgtaaaccctaacatttcccgctcatgcacgcagaaggatacgtcaaagaaccgttttccgtcagaaaaatgttcaactctcagcaattcctctcccggctcgtaatatactttggggaacatttccgtcagttcccttcctaccatgagagaaatcagcttattgttatccaggtcagcagtcaggtcccctcctaccagctctccatctctgaggaccgaaatctcatctgttatctcaaacacttccgacatcttatgtgtaatataaataatggtcacgccctcttccttcaacattcttatgatgttaaaaaggctttccacttccttgtctgcaattgcagatgtaggctcatccattatgatcagcttggaatgaaatgatatagcctttgcgatttccaccatctgcatatttcccacgctgagttccctcatcaatatggtggggctcagcttaagcctcagcctgcctaacagacaggctgtcatctcattcaattgtttgtggtcaacaaatccccatttattctttggttctcttcccaaaaagatattctccgccaccgtcatgtccggaattgggctcatttcctggtgaatcatggatatccccgcttccagggcatgatagattgtctttagctccaatggttttccatcaaatatcattgtccccgatgtgggtgtatagattccctgaaggattttcataagagtggatttacctgccccattctcccccataaggccatgcaccacccctttgcgcaccttaaaggtaacatccttcaacgctttgactcctggaaactcctttgttatgtggttcatttccagaatgtatccggtatcactgcccatttgttttcctcccttctgtccgtttccaaaatctgaatggatgggcgcctgccaagcgccctcttctatttttgctacttctgggaatactgcacataatcatcaacattgtccgctgtcacaagttcaaagggaatcatgatcttgctctccggcttctccccgtgaatatactgcaaagctgcctccagcgcttcctctgcctggcggtcgggattctggaatacggtggcagcaatcttgccgtccctgaccgcattgattccatccggatccccgttgacgccgcagacaataatatcatcgcttttgcccgcctgctctactgccagctgcgtacccatggccatatcatcgttcagacacagaattgcatctatatctgttccggactgcagccatgtctctacaagctgaagcgctttgtctcgtttccagtcgccggcgccttcaatcaccacctgcatatccggatacatttcacctaaggtttctacaattgcgtcacgcctgataaactggttctcctggcccataattccgtttacaatcgctacattgccttttcctcctgtcttttcccctgtaaaccgggccagcagagaaccggccactgcgccgtccgcacccacaaaactgtcacagttttcaaatatgcggttaaaggcaataaggggcacccccgcctccttgcaagccctcacaatgggttctgactgcttggcatccactgccaggcagataatggcctgggtgccgttgagaatctgattctccacctggctgatctgcgtgttggcatcctgcttggagtccaaatatgtaatgtggattttatccttatgctcttcctcgtattttttcatggcattcatcacaaaagatgcaaatgtattgtcaaaggtttcaatgatgacagaaacctcagccggttctccagaagtcccgcccggtccctcttcaccatttccggcggcaggtgcattggctgtttctgccactttgtccgcggcttccaggctgccgctctctgcgctgccgcatcctgtcaggatacatcccgccatcattgtggccgccagcaaaatgctcactatttttcctgatacaattcttccctttaacatgttatttctcctttttactattttatttacggtttgtatgaatacgtattaatggttttggcctaaaaaaataaactttgatacatttctttggtatgcaaagaatcattttaaaaaccacatacagattaacatggttttaaggatatctattcttgtcatttgttgtcattttttacattgtccccaagtttttgccatggttttgtcatttcttctaatttttcctcctttttccgttaattttttgttaattatacgtattcatttcatggacacattgtaagtcccgcaaactttaaagtcaactgtttttttgatccgtcctttatttcgtgtatattattcaaaattacgtacttaattttgtgcacttttaattgagaatggggattcatttccgtgacaaccagataaaaccgcgagaatttgcagcttcagataaaagtaaaatgaccagtcggggaactggtcattttaggagaaggtatttcgtttcttatggggtgtagcaaaaactatataatgtattggggggggttacgtctattataatagcatagggtcataaaaaagtctgcccaaagttttgccagaagaaaactttattttgtgcattttgcgccgctcctgccggttgatggcgaaatatgtctttgtattccgaaaatcaagccttcccgcacataatctttttctgcgcataagatatgacaaagcatatttatgaaaggttaccttatgtataacgataatttttatccatccacaacagaggatgactttaattcagccgctgaatattccgaatatgattcagagccttacggctccgatgaatggctgaactcccaggaaaccactcccattcttcctcttccggaggatggaagcgactggtcagaccaggagaatgattttggcatgcaggacagggatgccagtcccatgcaggcaatgcccaggcgccctatgcccgacaggccggttgccccgcttcctgacaggcccggacgccctattcccgacagacccgtacggcccgacaggccggtccctcctatacccgacaggcccggacgtcccgacagaccggttcctccgcttccagacagacccgggcgccccattcccgacagaccgggatggcctaacagaccggttcctcccaggcccattcctcccaggcccactcctcccagacccatccctcccaggcctgttcctcccgtacggcccgactggtcctggaactggggtacaatcctgccaggcatcgttctccccctctctcctgcccgcgtcagattctacaatgcatctgtccccggaccgattcagatttacgtgaacaaccgcctggtggtatccaatctgaactatttgcagtactcccgcatatacaatgtgattcccggacgctatcgtattacagtctaccaggggaacgacatgcgttcacctctggtagatacctggatgagcttccggcagaatcaggactatacagttgccttgattcgttcaggctccaatttccgccttcagacatcttcgttctaacttattaaccatggactgagtaatatttcggggcgctgcagcaggccaagaatgaccgctgcagcgcccctgtattttcataaaaccatattcataaaaccatcatgattcaatataaatgatttctatatcagaaaaaatccataaggtttccttacccgtgctgtcataatgatagaatttgaggattctcagcctcagctggctcccatcctttttccggtaagtaaaatcaggtatctcctctccctccagcatggcttcaagacggctgtaatcacagcagagctcaaataacgaagcgtattggggttccaccattctatctgcatacagcagcagggccctgctgtatttgtcaccacattccttcagcatttcctggaaataggaaggtatgaagatttgccgcactgtatccgtctccagattcacaaaaaacacaccctcaaacacaggagccagtatgctgaggaaccggtccgcatcctttttctcagatataagccgttccatatgctggttcagttcacgcctctgccgctctccccccttggaagaataaaagcccttcttattctcctgcatggctctctctgccttttgtacaatgtcctcaattctaagatccgactcccgccattccagtcctgtggagagtgaaaaacctgcctcctccgttttcctgcagacctgctctatcctgcgcaccagctcctcgcgtcccatatttttacacagaatgacaaactcatctcccccaatgcgaaaaatatcctgggaatcaaaatattccaggaagatgtccgatatggttttaagcatccgggctcctgcctgatgccccaggtgattgttaatctcatggaggccgtttacatcaatataaatacagccaagagtcccgcatccctgcttatcaaactcaaaagcctgaattgttttctcaaagcggtttctgtttccaaggtttgtcagggcttctgacagagcctcctggctcagcatctggttggcggcctcaatctgccggtactgcctgcctcttcctgtcaatccatgtctccagccatgtaacacctgccgctgccagtataaggaccagatacaaaacaaaatatgtcactctgcggggcttggcaaagggcccgcccggacgcatggatatggaaatgaccatcacaaattcaaacacaatgatgaatatgtgaaaaagaaaatttcttttaaccacgtcaccatgcaaggcacggaatacctcctcagaatccgtaaaatccggaatgattcccagaaattgtttcaatctgctccacatttatattcctcctgccccgcatgtttacgtgtcttttcctgtaagaattttgaatgatttttgtcacaaactacttacaaactgttcacatttaggtaacagactgctcataattagtggatatactttatattgtaaacagctaatgcttataagactttttttcataatactcggccagtgggatatatcccactggctcctccctttttcagggccaattcacgatatggcccatgaattatatgtattttatcatatctttctctgattttgtagtctgttttttctccttcccatcaagctccagctaacccaatgtcataaatgcatatcttaccacgaacacaaccgaaatggccagggtcagtatcttcacatcctgcctcctgccagtggtaagcttcatcaggcagtaagtaatcagtccgaatgcaacgccattggcaattgaatatgtaaacggcatgaatacaatggtgcagaaagcgggaagcgcgttgctcatatcagaaaaatctacgtccctgatatttcccagcattaaaatacccacaaaaatcagtgccggtgcagtggcagctgcgggaacaatacttacaatgggcgcaaacagaatagcccccagaaacataagggctgttaccaggcttgtaagtccggtccgtcctccggctgcaatgcctgcgctggattccaccactgtggttacggtggatgttcccaccatggcaccggcagccgtagaaatggcatctgacatcagcgcctgcttcatccggatcacctcgccattttcatcaatcatgcccgactgcttggccgcgcccagaagtgtgccgatggaatcaaacatatttaccagcgaaaagctgatgaccagcatggttacagtaaagatggtctccaccatattggctcctgaaaataatccggcaaagtccattttcataaacgatacctctgcaaaatccctgaatttcattccgatgttcatatccaggtttgaaatatgagtcaccccaagaggtatacctataagtgttgcagccacaatgcccagaaggattgaacccttgacttttctggcatgaagcattcccatgataaccagtccggccagtgcaaccagagcgctgctcatgagagccagatcagccccttctattttccattgggaaaagtccaccaggcttacaagggttgctggatttgatatgactatacccgcatttttcagaccgatgatagtaataaacaaaccgattccgggggtgatggccgtttttaccgcatcgggtatggaccttataattgcctcacgcagtccgatagctgttatcacaatgaaaaatacgcctgaaatgaacacaaccaccagggcctgaccataagtatagcccattcccaacacaaccgtgtatgcaaaaaaagcattcaatcccattccgggcgcctgcgcaaagggcactctggcatacaatgcacagagaattgttccgataaaagctccgatacatgttccaataaatacgccatttgcaattttgcctgccatggcggcatcccccatgatgacgtaggggtctgctaaaatctgtgggttcaaaattaaaatataggcaatggttataaatgtggtgattcccgcaagcacttccgtcctgacgcttgaatggttctgagatacctggaaaaagcggtctatacgtcctgtttcttgtttcaatgctatgtcctccatgtcatgttttaatctgtgtaatgtgatcagattcctcacgtcgctatcccttgtagccggtctccagctgctttacctcactctcccccctccgccagcagatctttaactgcaaaaaaagagccaactacaaaaagccatgtagtcaactctttacggtagttggtagaaactctgagccaattctcaggatatacatagtgaatagcaccaatatttaatacaaaattaattatataccctaaaacatttttagtctattggcttttttattcaataatcccgtcctgtttttgtgcaatatgtacattcttatttcattcataaacttattacaaaccgttcatacttttgcaacagactgctcacattttctgaatatactaatcattgtaaaaggtcaatgctaataactttttttcataatactcagccagcgggaacagcccgctggctgctcctcttttcaggaatagcaaaagatacatcccatctcaggttgaaatcccatcccggtctgaagaaaggcagggcaatggggttaaaaatacagataaaaaaggttctatactgaatgttggggtgtgctgaaaagcacacttccaacattcttttcgttgtaataaaa

SEQ ID NO: 3252 - DNA, 25502 bp, Unknown
  gut microbiota DNA sequence
aagcaaatttaatgccaatttttttaatctttttttcattatatttgaacaattacacaagtcttttgtcatatgttttatcattcgttaaattttaaaacgtttttatgtttttaatgtttaatttcaaaacacaatatgataaactggatgtagattacgctgcatttgtgttttatatctttgttattccgggaggaagcttatgaagagtcatgaactgatgctgatatctgtttaccctgaaatgctggaggatatccaggctgtctgccagaccatgcatatcgaacctaccattcttcaatgggaaatagcccaacagggacttctggacaagctgaaccagatgtttttggaactgcctaagcccgatgtcattatcagccgcggggccaccgcaggcatgattgaacaatacttccccgaaatcgtatccatacgtgctgaaccggacaatctggaaatactggagatactaaacaaggcacgggaatatggttcacgaatcggtcttattctttttgatgaatacgtagatcactataagattaaaactgtagaacatctgttagatgtggaagaggtacgtatctatcccttccgttcccgggctgatatcgagtcccaggttctaagaggcaaacgggacggaatggatgtaatggtgggcggcggaaccctggccctgcgcatgggcaaacaatgtggaatgaatgtatgctttgtcgaatccggaaggctgagcttaaaaaaagccatacggcaggctgaatccatcatatatgccagacaacgtgaaaagctgcagctgaaatgcttcagttctgcagcttcttccatccaggagggaatcctctccacggagaacgggaccatcgtggttgccaatcaggaaatggggcatatcctaaatatcaatgaacggctcatactgaataaaaaggcagaagctctgccgtcttccctgatggctccctgtatactcacattcatgttccatgacacggcagatgacggaatcctgaaaatcaacgggcagaactattatgttaaaaaaagtactgcccgcagcaaaacaaatcagagaatcatagccgtatttcagggcacacgcaacattcaataccaggaacaaagggttcgttcagagctgcgcaacaacggctttatggcaaaatacacttttgaggacatcgtggcggaaagcgctctgatgaaaagcctgatggataaagccagactgtatgcctccaccaacgcaggaatcctaatcaacggaaacagcggtaccggcaaggaacttctggcccagagcatacataacgcaagccccagacacaatcagcccttcgtggctgtcaactgtgcagccatccccgcctcccttctggaaagcgaattattcggttatgaggaaggagcattttccggagcaaaaaaaggaggaaagcgcggactgttcgaattggcccataaaggtaccatctttctggatgaaatcaattccatgcccattgaactgcagagtgttctgctgcgtaccattcaggagaaagaaattcgaagagtaggcgctcaaaaaaatatctatgtggatatccgcatcatctccgcctgcaacaagaacatggaagaactcattgcggacggcaaattccgggccgacctgtactaccgcctgaatacactgaagctgactatgcccgacctggagaccagaaaagaagatattccgccgctgtgcggatatttcctaaaacgctattctgccaagtacagtgttccaattcccgctctttccccggaagacagtgagattctcctcaaacgtagctggccgggtaatgtcagggaactggaaaacaccatgcaccgctatgtcattttaagcagcctgcagcattgctctgtaaatgactgtctggatggaaccccgccggagcaggctgcatcctccggagcttcgcagccaccgttagaaggtacattggcccagatggagctggcccttatccggaagtgcctggaggaaaatcacggcagccgtgaaaaaacggctaagcagctgggcatttcacgctcaactctctggaagaagctgtcacagcaggcttgacggactacctgatactgcggtaataattaatcatgcctcccagtaccagcatcctgcgctcctcctctgtcatttcccctatggacagccggaccttctctcctgttttcagtatgattccctctagctgctcctctcccatccttatcttcccggatgcgtccggcagcagcagataatctccctttttcaggtccggcctttccttacaggacaaaggtataagtccccagctgatgcagttggaacgataacgcttagtgctgtattctattgccagattagcccatccccccagaaccttctggttgctggccgcctgttccctgctgcttccgtcaccaatcttatcactgattaggagactgccgtaagaaatatccttcatctccgaccctaacatggtgcagacctgttccagaacagaacgtgtccctgtattttcattctccagggcatctcggatatttcctgcatactccacatattcccggtccttacttataagggtataggctgcaatcttcccggggttgcttcgaagagaggaggcttccccgcttggacacaattcatctgtagtaatgcttccttcaaaacaggctgctgcctttaacaacacgtgcttcctcatctcaggaaaatcaggccaatccttgatatttggtcccttgggcacatgaatgcaggggttgggacagccaaatccattatatacgcctcccctatatatggtattctcgaaatgataatcaaattttctatatacagtatccatctccgtagctgctgtgaggaggcctccattgcgtacagtggaagcaatactcctggcatccataagcgcagtagcactaagctgtccgctgtctgtcttagatccctcccggctgtaataattgcgggatacatgccggatacctaatgtattattggccggcacatccacggtgccgaagcagggaccgcagatacacggccgtatggtgactcctgacagcaggagacgttcagccactccctgccgcatagtttccaaaaatacaggctggctggccggataaatgcccaggctgatgccgtctcctgatatcttatatccatccaatatatctgctacggctgctatattatcaaaagtaccaccggcacatcccgcaatggatgcctgctgaaccatcagtctcttattctttatcttatccctcaaagtgtaggttaatccgctgcgcatatacgcatccttctctacagactccagtaccccatccaggtatgcgcgatccctgcacaattccctgatagaatatacattactgggatggaacggaagtgcaatcatgggttccatactactcaggtcaatttcaattaaaccgtcatacagggcgtctcctgtgggttccagtttttcatacgcatcctcccttccatgtatagccagccactccctgacggtttcatcggtcatccatatactggaaagggctgcggtctctgtggtcatcacatcaatacccatccggtattccatggaaagattagcaattccatctcctaccacttcaagaatcttattcttacagaaaccacagtcaaagactgctcctatcagagtaagggctacatccataggccccacacccggtacaggagctccactcagtttcacagctatgacaggaggacgtcttatgtcataagtgcttcccagagcctgtctggcaatctctgtccccccttctccgattcccatggtaccaaggcagccataacgggtatggctgtcacttccaaggatcattctgcctccccctgccgcacattccctcatatactgatgaataacagctgtatatggcggcacaaaaataccacccagctttttcatgcaccctaatccgtaggcgtggtcatcattattaatggtgccgcctgtagctgccagtgtattgtggcaattggtcagtatccacgggatggcaagaggcctctccccaaccgcgcaaagctcctgaaggatgctggtataattatcatccgggcttacaagcatatcaaatttcaggtaaagattttccatatccgggccttcattatgggcttcaagaatcctccatgccatggtgtgggacctggccgtttctatatctgcgcagtaatcacaggcacggacaaacgttccatcagccaggcggacaaagggttcttttttcaactgaatcatgtggcattcctctctttcatcaatgtttgaacctgtcttaaatattaaatactgtcatctttaatatagagcaattctcatgccaaattccacagcagcacatgtccaatctccctggtaaaacagtaaaaaacaaaaaactcttccttcaactgccccccaaaacaaaaaaagcgcccggtcacccgggcatcccacatctcatttttcctattttccaaatatcacaaaacggttatcccttaacatcttcacaaacttggccagccgttcatacagcggctcggcctggtctccgaattcttccctgaccagcgctccaatggcaatgatatttctgtttccatccatctgcttccagacaaagcttccgaaccggtccagctttacatggctcaccctgggcgtgacccacagcttctgggccagcttatcaaagattcccttgtgcaccatatccacggtcacgattccctgctggtcctctttccatgagaactcagggtttctgaccggtaccttttccagataattctggtcttttttcttattgaagcccaatgtaatccttccttccatctcctgctgttcataaacatgcacagggcgccaggattcctgacaccccatgcacacagaacccgcactgttataccagtatggttatttcctgttctctttatgccagatggtaaatttacacatggtaagcatcagtaacccaaagacaataagtgatacaatctttgccgccggacttaccagaaaagcgcctaagccgttatccagggcagacagattgataaaatcgcccagatacccgccccgcgcgcttgcaagggggatgatggcgaatacagccagcaggattccgaccagaccttctcccgcaatcatgcccgatgtatagagcacgccccggtcaatggcctctttcttatcctcctcctttgcatatttacgcttttcataccagtggcggatgagtccacccaccatgatggcggccgtggtcctcagaggcaggtataaacctactgctaccggcattaccggtatcccaaggatctcaatgacaacggcaatggctgctcctgccagaatcatgttccatggaaggttgccgtccatgacgccctctaccacagtcttcataatcatggcctgaggagccggaagttccgccgagccatagccccaggcctggttcagaaggtaaagtacgccgccgatggcaatggcagaagaaaccacgccaatcagctctcccatctgctggttccttggagtggagccaaccagataacctgtttttaaatcctgggaggtatccccggcaatagctgcaataacgcagataacaccgccgatggagataacgcccatcatgctctcatgggtggcgccggacacggctttaagcaccagcgccgataccagaagtgtggcaatggccatgccggataccgggttattggaggatccgaccaatcccaccagacgtgaggacacggccgcaaacaggaaaccgaacactgcaatcagcatggcgcccacaaaatttacaggaacagccggcaccagccatatgattaccacggcaatgaggacgcctatgagtaccacattcataggaatatccctgtccgtgcgcagagtggaagcctggcgtccgccctttaagtcccgcatggcatccctgaaggtatttacaatcatgggaagggacttaatcaggcttatgatgcctgccgctgccacggcgccggcgccgatgtaacggatataagagccccacatagcctggctgctcatctcgctgatcagcacatcagccggtgcaaagggcgctgtgagtccgcttccgaacagcttgataatgggcatcagaatcagccatgatataatgcctcccgaaaacatgtaggaggaaatctttggaccgcagatgtagcccactcccgcaagggcaggaagcacggaaatacccacgcctccgccgtatttttggatatcataatccacatcgctggggaacagcttcaggccgtcagccacaaacttgtacaaagcggcaattcccatgcccgcaaatacaacgcctgccttggaaccgccctgctctcccgcaatcagtacctcggcacacgcctggccttccggatagggaagcactccgtgctccttcacaatcagcgcctggcgcagaggaatcataaacagcacgcccagcacacctccgcacagcgcaatcagcgcaatctcaaccagggaaggcgcgccctctccccactcactcatccacataaacagggcaggcagggtaaagatggctcctgctgccacagattcaccggcagaaccaatggtctgcaccatgttgttttccagaatagaatcccttctgaggattacccggataacgcccatggagataactgccgcaggtatggatgcggacacggtcataccgacgcgaaggcccagataagcattggcagcaccaaagagaacagccagaaggatacccaggatcacagaaaccgcggttacttccggaaccaccttgtccgccggtataaatggtttaaaaccattttcatctttcatgtatctatcgctcctttcgtattgaccacataaaaaccggatatttgggctcttacgtgagatacaagccaaccctgccgagacaggacggcttgtatcttatccccgtaattatagcatccttcagaaaaattttccacaatttttgtgtaaatggtaagaattgcattaatttttttaatttttccatcatttttatttaataaaacggccacataaccttacaaaacaaagtgttttctctgttttgtggcctgtggccggaaaaaatttccgaaatccattatttttcacaatcaaacacaagtccccaggaagcccttatatcatccataagtctaagaatgtccagtgtgtcctctttcttaagtacatcactggaggacatacccagccggacgcacctgtttacttcccgtatctgatactcaaagccatttacctcaaaaggaaaatccatgacatattcctcccccttcatgggacggataatcagccgttctgccttctggtaatccggcagataaatggagcccccggatccgaacacggctgcttcccttggcatatccatgccgatggaggcggtagccgccgccctgaaaccgcccggatatcggagcagaaccgtgctgtaatcatcggtgccgaattcattcagatgatactccgatgtaacatgttccggctgtttatctcccataaccatgcgcagaaatcccaggttatagatgcccacatccagaagagcccctccgcccagcccggaatcaaacttgcgcgccttccttgccccttcagccacaaagccgaaatcacacctggcaaatcccacctggccgataactcccccgtttatcagctcctgcatctttttcagggccggaagatggcggatccagaaggcttccatgatgaacaggcctctttcctctgccgcggcgaaaagacgttccccttcctttacattggtggtaaagggcttctcacataacacatgctttcccgcttcaagacatgccatacagttctcataatgcatgttgttgggagtcgccacatagaccgcgtccacctcctcgtctctgagaagctcctcataagaaccgtatgtcctgggaattccgtatttcttaccgaaagcctccgccttctcccgggaacgggaaccgcaggccgccaatcggtcctcccccttcataccgtttactgtttcagcgaactttgccgctatggtgccggttgccaagattgcccaattcatataagatgcctccaactgttttatttactcaaaattttcaatcaaatatacccgcaggcgagtccgatacaatatttaacgcttcatcttatgctttttcctgtacatgtaagtgtccgccctggccagcgtgctttccaggctcacatccttacccgggtcaaagaaggcatagcctgccgcaatgcccgccggaaatacattcccgtcgctgtaagccttcacagccctctccatggccagaattccacgggtcacctgctcctgtcccaaaccgtctaactggaccacaaactcatcccctccaatgcggaacaggggcgcccccggaaacgcttcccgtataatgtcagcggacctgcggatgtattcgtcccccttgtcatggccgaagcggtcattgacccccttgaggtcattgagatcgcacatcaggaaaccgcttcccggtatctcctgcggatggctgttcttgtgctgcagcatgtgttcatatgccagcctgtttccgacacccgtaagtccgtccctgtcacgttccaccttaagcgcctttgtttcaaggatttcatccgtcacatcctccaccacacagcggatgggatgaactgctgttttgcatgttattttaatccaccgggttccttccgcggtatccatctttatcacaccgggacctccgtcccggtgtgaggcaaggctctttaggaaacgtatgaattcatccttatcccgggaaaacaggtgctcctgctcctttgtaagccttaaaagcctgggtatctggctggtcataagcaccttggaggaacgccctgatatctcaaaggctcccacaggaagttccgacaattctataagcttggcatgcctggcaaaccactggctggtaaacacagctatgataagaccggctgccagggaaagaaccagggaatactccagtatctgaccgattctgcgcggaaactgcaagagcaccggctcctccataagtccgatcaggtaccactcatccccttcgaacggggtattgtggtaatacatccccatctggttcacacaggcgttaatttttcggccgctcctgtccgtgttcagcagggtatatatggaattttccttgtccttaagctccatctcaaacttgcggtcctgcccggccagctgtccctgaagggcgccgtaagtaaccgctgtctctttcttctcccgctccgaccggtatccgatgacataaccgtaggagtcccctgtctgaagttcagaggcaggaaggaaccggtacagatagctcacggatatctccacgccaaagacagccagcaccctgccgtcctggccgaacagtggcacggaataggtaatcacatcctcatctccctcgtttacctgaaaagggggactccagtatcccagccatttagagcgcccgttttccgctgccgcgctccagggcttttggaaaaaatcgcggttttcttcattgacctccaaccggaagttccagttagccgtggtggaaattttcatcttttcggctacattccatgggccgatgagcatatacagattttcattctggctgctgttgcggtccggattattattcctgaaatacagggcggccagggaaccgtccgtctccccctcgtccggcagtatcaggaacacgccggtggtctttgtgtcgtacagggcatccaggacctcaggcgccagcgcctccagcatgcggtccggctgtccctgatattccagcccgtccggactgtcaaaataccggcttatggtatccgtatgatggctgaaattagtccagacattcttcatctggttctccagattattcctgcggccctttaccttttccgcaaatatgcggtactggttggcctctgcctgttccatcactccccctgccaccataaaggacaccagaagcacgctttgcagtaccaatgataccacaaatgctatggtcagcttaaatgctatggatttacttctgaattttctgtccatctgtcttaccagccatttcttttaggagtgtttcataccaacggtcaaaatgctcctcgtccagcagttctctttccaccgactccctgctctcacctttttccatcctctgcttcagagtttccaaatccacattcacacagttctccagggatgaagaaaatatctggtccatatcataagatcccagaaaggtctcccggacatatacattgtggtttttcagggcattaagggaggtccggatgctctgctccactgcctggacattgtcccggctttccacatgggacaccagatctgatacggattccagagccttctcctgcacaggcagatatcccgtggccactgcaaagcgtatattctgctccggctgcgtgaaccatttaaggaaccggaccgcggcctgctggtggctctcatctgaggcaaacaccgccatgttggcccctctctgtcccatataaggcgtaccatcctgaaaaacaggataggcatagctttggcaggaaatgggatgggactgtttttcatcctcaatcaccaactgcggaaagaagcctgcgcctgccgaggagccgatataggccatcagccttccgcttttaatgccgtcctggttgtaggttctgctctcgtaccagccctttatatggggtacatagtatgcgtcccatacccttctggccgtgtccctggaataattgaattcaggcccatcctgcgtccagcggataccctctcccagctgggcggccgacagtgcggcaaaatcattgaatgcgttcatacccaggaacggactgcccccggaccattcataatacatgcccgccgcctgagccagaccctcccaggtcttaagcatctccttgtccgcgcctgtttcccctgcaaatgtctcccaatccgtttcattgagatagagaatctccgtggattttgccaccggaatcatccggtgaatgccgtctccttcccagactccctccttcaggaattcggaccggtaagcgtccagttcttcctcggtaaaatagtcatccagatgaaccagaggcacgatcccgtccagcctgtacgcgctgtccgggtaggatgaaaatatatccggcagcgggtctgagcctataacatggctggcggatgcgtacagcacatcatccagctcattgctggagccgtatcccaccggttccactataattccctgctccatacccacagtctcgttaaattccatcaccaggtcgtcaaaggcgcccttggccaccgcgttataggaatgccagagcactaccaccacgggtttttcattttcttccttttttccatctccggccatacagccgccaagccccaaagcagcggccatgacagccgccagcataaatacatataatctgcgattcataatgaattacctccccgtgcagtccccccatggcaggcacagatgccgccattctccaaacacgttacatcttaagtataacacgcggcacggcctgctgtctattctggatgtatgataacagaacctgagccgcccctggttccgggtatatcgggattcccagctctttaacctttgaatccagggtctttaccagcacaggaccggaggctgatgttttattttattatggaatttctgaatatgcaagaaaaatatggcgggaatatccgcagaaaagattggtctgagtcagaaagaaaatggagaaggcgagcggtatgaaacagaatccgccgaaagaaaaagacaggacccccatggccctgccctgttctttttatgcctctctgcctgaatgtgagtaaaatgtaatcagatacaggccacacaatcccaccagcgcatagattatcctggttacccatgaggctgttccgaaaatccatgaaaccaggttgaaattaaagaatcctaccagcccccagttcactgccccaatcagggcgattgtaagagcggtataatccaatgccttattacccatcgcatgctacctccttgtcatgagcattttgcgcctgttttccaggcacttatgcagcttactatacgctggtagtatgtaccgttttgtggaattccatacattttttgctgtttttcatgattgatgtttcaatcagatgacggcgcttctgccggtcagtcctgcttgtcctccgcggcagcctctttcatctgccggattacctcttccggaagtatatcatacaggcggttccgtttaagaccgggctgttccagatattcttccctcagcataccgttaacccggtccagctcctcctttagttccctggctgagataagacggcatccctggcccaggatgatgacctgctccactccgtcggaggtggccacggacacatcgaacctgcgggcattttcatgggcgaacttctcgatatactggtccgctgtctcagcctcctttgtgtagaccacctggatattgtggtattcagaaacctctgtggcatgtcccgccacccggtaggcgtcaaaaacaaccataagacagcacttgcgtatggcctgatagttgcagagcagatccataagcctgcctctggctccgtccatattgtcctgtgccagctccctcagctcctcccaggcaaaaataatattatagccgtccaccagaagatattcctgtctggcctcctgcttctggtaggtacgggtcaccgggccgctgtaggctgcagcactcctgcttcccctgctcttgcctggatatcctttgcgcgctgacttatcccggctgttggcataaaaggtgcgctccagtatcgcgtcaatttcatccgtacccagccatacctctgaggattcttcctgtccggcagaggattgccccggatgcctgccggaaaaaggattcctctcaccctccatctcctccccatcaggggattctattacaagaccgctgtccacatgcatgtattccttcacctggtcccagcttaccacaaatccggccccatgggcgcagaacacggatcccgtgggattttccgtatctctctccgggtcatagccggtctgcccgataatttcccggctgttatgacagggctcgtatcctttcagcgcacatgccagccttccctgtcccctggtataggacataacctctgcctgatacccccgcatggcggcgaccggagcctgtcccgtgaggacggcctgtccctgcctgttttcctcgataacgcaggtcccgcaccgcttttcaatatcggtcatggcgcgcccaatggacgcctccggcacttccaggcggaaggtataccacggttccaaaagaatgcaggaggcctccataagcccctggcgcagggcccggtaggtagcctgcctgaaatctccgccctccgtgtgcttgttatgagccctgcccgccacaagggtgatcttcatatctgttatggctgccccggtcagaaccccccggtgtaccttctcttccaggtgggtcagcaccaggcgctgccagttcctgtccaggtcatcctcgctgcatcttgtctcaaactggagtccgcttccccgctctcccggttccataagaagatggacctccgcataatggcgaaggggctcaaaatgacccacaccctccacggcgccagcgattgtctctttatacacgatgtttcctgtgccaaattcaacctgtatgccgaaacgctcttcaatcaggctctttaacacctcaatctgcacttctcccatcagctgcatggatatctctttcagttcctcattccatactacccgcagcaggggatcttcctcctccagctggcggaactttggcagcatcacagccccgtcgcagccctccggcagttttacctggtaattgagcaccggctccagcaccggaaccatggaatcctgcccggctcccagtccctgcccaggataggtcctggtaaggccggaaacagcgcagatggttccggcctcagcctcagccactgtctcataccggtccccggaatatacgcggatctggtttaccttttcctgccatgtctcggatggcttttcggtatttccgccggatatgattccctttaccttaaggcttccgcctgtaatctttaagtaggtcaggcggtttccctggtcatccctggaaatcttgtacacctttgcctcgaattcctgcggatattccggcgccagggcccatttacggattccccctaacagctcctccaccccggtaagtttaagggcagagccaaaaaaacatggaaaaagccggcgttccttaatcagacggcgtatctcatcatcatccacatcccctgtctccagatatcgctccagcagcttctcgtcacacatggcagcgtgttccgtgaattcttctgtccccgcaccggcaaaatccgcacatccgtcgtccagacgcttctgcagctccctcattcgctgttcccggtccgtaccgggctggtccattttattgacaaaaaggaaaacaggtatcctgtattttgccagcagacgccataaggttatggtatggctttgtactccgtccgcgccgcttatgaccagcaccgcataatccagcacctggagcgttctctccatttccgcggaaaaatccacatggcccggcgtatctaacagcgtcatgggcattccctcccacgtcagagctgcctgctttgagaaaatagtgatgcccctggctctctcaagggcataggtatctaaaaatgcatccctgttgtccactcttcccatcttgcgtatgcttcctgccagatacagaagcgcctccgataatgtagtttttccggcatccacatgggccagaataccaagtactattgatttcatatcctgtctctcttcctgctgtcttatgtctcttaacatggccgtacatccaccgtattgtcgttaagggtggtggctgctcctatatcggacagccgttcatggtgaagggcattgaccaaaagcccgtcctttgtaaagctcctgtcgtaaacgccctcggccgcagccgttccttccgccaccagagacgtgattttcgcggtaaactccacctctgccagctcattgaaggctgtaacgagactgccgtccgcgatttttcttgccgccgcatctcttggatggagcatcagcgccatagggccccggcctgactttaaatcctccctgtccataaagactgaattcagcgtatatgcgctgggcaccgccaccagccgcagggggtatgttcccccgtggcatttaacataccggggcatggactcctccaggttttcattataaatcatcattttaccggaaggcgtcctgaatcttccatggtctgcaaaggctgtggatacagctcccccctcccttaatatacgccattcctcttctgagatacaggatagcccctccatgggatgggccagaagctcctcaaacatctcttcctctgtcttcttaaaatatgcctcctcatatcccatggcctgagccagcaggcagaaggtgttccaattgctcttactctgtccggccggctcgatgattttcctggctgtcccaaaggtacagtatccgtacgctgtatacacatcagtctgttccacggaaaaggcggcgggcagaaggatgtccgcatacatggccgtatctgtcatgaaccgctcatggaccaccgtaaataaatctgggcgcaatagtccctccatgattcccttctgacagcagacagaggctaccggattgcctccgtagacatagaagctgcgtatgggcttctctcccctgctccctgtaagggcggaggcaatctcattgatgttcaccctgcgtcccggtttcttcctgaaatccggcctggtgaccagccggttgtccacatagggaccagcccccggattacagccgcacaagccgccgccagggcgtccccaggctcctgtataagcagacagaatggtgataaggcgcgtggtcattccaccgttgccatagcgggagggaccgcttcccagaatgatggccggagccgcagctgaggcgtattcctttgccaggtccgcaattacctctgcggggacgcctgtctccttttctgcccaggcaggggtgtatggtgaaagagtctttctgaacgcctcatatccttctgtctgatgggcgaggaaatccctgtccgccaggttttcttcctccatcacatgcatcatggccaatgccagggcgccgtccgtgcccggacgaatcagaatggtctggtcgcagtatacatccatatctgccgcgcaggattctatgagcaccacccgttttccttgactgcgcgcccggatcagtgccggcatggactgaagcctggtggccttcatattgcttccccacaccaggtaaaagctgctgtccgaaagctccctaggatccagacagcctgtctgccccatgaccgcctcatagcctgctccctttgcggaagaacacagtgtcctgaccatgtcacaggcacccatccggttgaaaaaggcatccccgcatttgcgctgcaggacgctcatgacccctgagtaatacatgggcaggatagcatcagccccgtcttcttccagaatacggttccacctgcctgcaatctcctttaccgccgcatcccaggttatgggttcaaatttcccctctcccttggcgcccacccgcttcatgggtgtaagaatccgctcagatgaatggatggactgctcatagcgctgcatcttcctgcatatcagcccctttgcagccggatggtccgggtcgcctttcacactcaaaatccgggttccgtctgtttctgccaaaagtccgcaggatgtgggacagtcgtagggacagattgtttttcttatatatgatgccatcttttgtcactccctctattaccgcgcccggggcatcatccggcctggcagattacggtctggtatggaccggcacaatccgccggatcctgcatggtccgggcctattactgcctgaattccgggcgctgttatctgatattaagtatagccagcaatcgcttttccgtcaaactaattttccttcccctccaggcctgtgctgccttcgggactcacctgtaccgaacagtgtttgacctgcgggaatcttgcttcgatggtatcgtggacttcctttgcaattgtgaatgcctgctccagcataaggcttttgtctgcttcaatctccaggtcaacatatatcctggaaccgaaaagccttgttttcatggagcccacacgttccactccccgtgtatctaacgccgcctgctctatggatctgacggtctcctcgtcacacgccttatccaccatcttatccatggaatccctgaacacatccagggctgcctttactatgaatatacagatgacgaagctggccaacgggtccatgaccggcactcccattctggcgcccagaataccgataaaagcgcccactgaggacagcgcgtcgctgcggtgatgccatgcgtccgccatcagtgcacctgattttaattttctggccgcagccctggtataccagaacatccattccttaaccacaatggatataaccgcggcccctaaagccagcattccaggaacactcctgctcccttccgttcccgaaccaatggtttccacagcgctcaccccaatggcgattcctgtggcaaacagtacggctgacagtaacagagccgccacgcattccatccgctcatggccatagggatgttccttatctgactttctggaagccatggtaattcctgccatgacaatcagcgtgctgaacacatccgaggcagaatggaccccatccgatatcatggcgccggaatgggccaggatacccgcacctaccttgaatacggagagtactacgttgatggcaatgctgacacaggatacccgcatggccagccccgcaccatgacttcttatctttttccctgaaaccttctgctcattaccttctcccatctgtgatttcctcccatatatatgacaaccacctaatctgacatcctgcccccaaaacataaaaaacgcctgggggcaatgtaagtaaaccactgtcccacagacgcttctgtctgctgccgccgcccgcggcccggctcccaaggcagtaaacgcctttggcctgctcagtttgtactgtagattagatatgcagcgcaaagagtgtctttctgcagactgatatgaaagtctgttactgataggatatgaggaacgtttctgtttggtgaggtaatgattgtaaatttatccaaatcaggccgtgataaacggatgaaaaaaacagccgtatccgcagaagggaacatatcagtgcccctgaagctctgcccatatggctgttttccattatctaaatttcctgcatgaagttttcaaacgtaattaaaagcaaaatttaaagcaaatgctttctgagctctgccccatccgcagcgctcaggtaagccggtgcaatgtcgaacacggtcttgcagccggactgcccttccctgctcaggcggtatgcggccctggcatatgccgcaataacagatgcagtgaattccgggttggagtccagcttcaggctgtattcaatcacatgtccgttctcgtcattccatcccgtgctgccggtgcggataacaaaaccgccatggggaattcctgcatggtcacgcatcagttcttcctggctgataaagtgcaccgtggtgtcataatcagcaaagtagttcggcatggttacgatggcttcctcgatggcctttaaatcagctcccttctctgccaccacaaagcactccctggtgtgtttatccctggtggtaagctccggcgcttttttgcttctcactgccgtaagagctgcctccaccggaatagtgtactgccttgcgtccttcacgcctttgattctgcggattgcatcggaatggccctggctgacgcccttgccccagaaggtataatcactgccgcccggcaggatggcattggcatagagtctgttaagggagaacatgcccggatcccagccaacggatataattcccacatgaccgctttcctttgcagccttgtccactgcctcaaaatgccgggggatattggcgtgggtgtcaaagctgtctattacattgaaatgcgctgccatttccggggtctgtccgggaaggtccgtggcgcttcctccgcagagtatcatcacgtcaatctggtccttcatggacagaacatcctctgcccggcaaaccttagccccctcagtcaatatgctgaggctgtcaggattcctcctggtgaacactgctttcagctccatgtcgggattgtgcttaacggcacactccacaccccttccaaggtttccgtagcctaagattccaactctgattgccatatttttattctcctttgtaacataatagtgtgggttgtcggtttttgtaaattatactacagccttcttttcttggcaaatcattttttatcactgcaccttgacgcagtgccagttttttgttactttcgctttctccgtcggaagcagacagctgtgcagccaatcaccgcagcagcgaggacagcccctgcataccattttaatccggatttcccggaatcttccccatcctgcacttcctcctttgacggttcctgctccgtgtccgtgacttcattttctccctccggcagccctgctgtatcctccactccatctgccggctggatttgcgggtcactgtccctgttcttttcaccccggccgcggacctgggaaggcgttgcctctttaagcatttcctctgcagtctgtccggcggctgttcccccgtctttataaccgggagcagaatacggagtataggattcccgcctgcggcctccccggcctctcaccggcgcctccggtgcgtcagactcctcctgcgtgcctggctgggcagaggaatttcctcctgatgtaacacctcccccatatccgccagaactgctgccgtagctgcctgtgtatcctcctgcatagctgtagctcccgccgtatgaaaaggtgagtccctggccaacggtctccggtatggctatctttaccttgtccgtctcacagcttcctccgggccactcgatgctggccttcacataaaaggagctgtcccctgactggaacctgtatatgagataaccatcctccacaatgcttgtattcagcgtgtttccggtctccttcaggaaattctcgtactccaccgtctcctgcccgctctgtgacgacgctgcagtcactttgttcttttcctttttccaggaatgtccgctttcactgcgcagtatgtaaagagcgttgatatcggaaggcaggttcttaaattccagcctggcagaaccgctgccgtccgctcctagattcaaaaggaccgcctctgtcagctggggctgtgtgccgccatattccggggtctggctctcaccgggaggaaccggctccggcgggtctatgcgctcatcgcggatgtctgtcttcttaagccccacaaagtccttgccttcttcccataccagcatcccctgatttctcaggataatggccggttcatccgaagcatccctttgtatctgtccccgtttcagtgtcaggcatccttccccctcaaccgatatcaggctttttgttcccgttatgagcagatttggattatcaatgacaacgcctgtctgggtcaggtttttaggtgccaggatttttatgggtccctcaggtatcctgatttcaatggggctggtactcgtctggccgtcaggaagccccagggtaagaggttttgtaattaccagattttttggcagaactgctatgctgtttccccccattaaacgctggtcgtaccattgctttaactggtcttcacctgcaatgtccaccagtacctcccctgtccccgtggatgtatccgccgtagggtcatgtacatcggcaaaggctgtgaaagcagtgagtcctgccgcccccggccccccgcacgcaaccgctgccgcacaccccccgcacagcagccacaccagggcagccatccctgcggtcatccttcctttcttgttccttctcctctttccccccgtgtctctgtccattcgtttcatcctttaaattcctttcacaccgtatcacaaagggagcagctcatcctccagcaaaattccaatcctgccgttggaagacagtatatccgacggtccggatacatccaccgctctgccggcaaaggttgtcacccttccccctgcctcttcaatcagcagcatacctgccgcaaaatcccagggattcagacaacgctcgaaatatgcatccagccttccgcaggcaacataggccagatccactgccgcggaaccggtgcgcctgatatcagaacacttgaggaatacacgcttgatatcctcaaaattcctgtctgccagatcatggttataagggctggttccaatggaaatcaggctctgccccaaatccttgacagagctgacatggatggggttcccgttgagaaacgctcccttgccccgctgtgccagaaacagctcatcctcatagggctgatatataattcccagctccatctgtcccctgtcacacagagccagcgaaagggcgctgcacctgaaatcatgaatcaggttggtagtcccgtccaccgggtcaagtatccatactgccccagaaaaatcaatgtccctgttatctttttcctcccccatgaactgtacctggggatacatgtcaaaaagtccgctgcgcatccgctcctggaccaggaaatcaacctgagtcacaaaatccgctgccccttttaccgttatcctggacgccctctcatggtccataaaaaggggccgcaccgattttaccagctcaatgaccctttctgcgtttatctccatatgttttacctcctgcagccccataatccgggacatattgcatttaatcgcctgtcacagaaggattataccacagaaacagcttttatgacatatcttcataatccatcaatggccaatcccgctcaatataaaacatatcatccatcagcagccagttggccctgaaaaaccgcatcagctgccaatacccggccccatacagattaaattccttgataaggtcaaactttgccctgatgctccttgcatcctcataccatacctcatgctggataccatactgccagtaccggaaataaggagacatggcagtttcatcaaaccggatatccactccaaaatcaactgccagcttcactgcctccagggtgcccagtgacctggctctggttactcccctttcaaaaggaaggggccagtcatagccgtagttaggaattcccaggatgattttctcaggaggaatctcgctcaccgcatattccacaaccttcctcaccatattgatgggggccacggccataggaggtccctggctgtatccccactcgtaggtcatcagcataacatggttagccgcctcccccagcagccggtaatcaatgccctcatagagaagccccctctgctgggccgacgtcttaggcgcaagggccaccgtaaccgtataaccgaaaatgttgaggacctgggtggcacggcgcacaaaatcagcatactccacccggtcttccgccagcacatactcaaaatcaatgtccaggccctcgtatcccttttcctgcatcgtgcgtcccagctcccatataaggcgctgctggttttcctggcttctcaccagggctgataccagattattgttaaaacgcccgtcctctcccaggggcgtcagggtaagcaccgggcggaccccccactgcagagccctttctatcatccacgcgtcatccgccatgggaagaaccagattcccatcctcagtaaaaccataggaaaatacattgatggcgctcagataaggcagggtatcctccagtaccacgctgtctataaagggatatgcataaccgctggaaaacaggggccttcgtccctccccgatctccccgtcagagatataaagagcctggccaacggccaggcggtatggatattctatctgatttgcccaaacaagggtctcaacgggaatcccctgggattctgcgatggagtcaacactgtctccctgtttcactacatatattttcatgcatttcattcctcagcctgaatttatacaatatatgcagcactgccggtctttaatccaccagtctcctggccatccacttcccgctccttacgcgcaggaaggagaacaatgctcccacagcccatcctgtaggtatggaccaccatatggcgctggctccgatgaaatgcgccagcaggtaggcaatggccacgcgggagaacaggtttaccactgagctgagcataaacgcccccatgtcgccggctccccgcagcagaccattgcttacgaacagggctcccatcaatatgtaaaatacagatacggttttcatatagctgagcccgtagctcatggcgctgccctcagccccctgtttcagaaaaagtcccagaagctgcggaccgaacaggaaaatgatgctggtaataataagagagaataccaccaccataaacatgctggccttatatccctgcttcacacggtccattttcctggctccgatgttctgggccgcgtagctggacatggcgttggaaaagttcatgttgggcatcattgccagggtatcaatcttagtggcagccgtataaccggccacaaacaccttcccataagaatttacaagcccctgcatcagcatcatgctgatggagacaatggactgctggagcatggagggcacgcccactttggcaatacgctcagccgaggacatatcaaaaaaagtaaatgactttcctttggcagcctcctcattttccatttttctcaggcgggctatcaatacaaaaaaggaaaaaacagcgcacatgccctgggctataagagttgcccaggccacacccgccacacccatgttgaattgaatgacaaacagcaggtccaggacaatattggtcagggccgacaccataaggaacttaagaggcgtctggctgtctcccagtgcattgtagataccgttcagcgaattatacaaaaacaggaaaacggctcccccgaaatatatcctcaggtaggcaagggagtcagccataatgtccgggtctgttcccaaaagggtcagcagaggtcccgcgatgatttccccgattcccataataataagtccaatcactcccagggatatgagggccgtggaaacagttatcttcatttcaagtatcttacctgccccgaaaaactgggaaataaccacggtacagcccatggacagccccgccgcaatggcaacggacaaaaagaccacgggaaaggatgagccaacggctgccagggcatcctcccccacaaaacgccccaccaccatggagtccaccatgttgtagagctgctggaacagattacccacgaccatgggcattgcaaagaaaaacagcaatttaagaggttttccctcagtcagattatttaccatatgtacattctcctactctgtgtttatattcaattgcattttcagcaatccgccgcagataatcctgctgctgcccgcgctcttcctctgtgaatcccgcaaaacaaatctcgtcccacctgcctgatatgcggtgtatttcttccagaacctgatttcccctgacagtaagacttacaaacttctgccttttattcttctcgttgatgagacgccgcaccagtcccttttcctccagctcagacagacttctggcaatcctgcccttgtccaggtcaaaatgggcgccgatgtcctcctgggtacactggttgtcctgaagaaacataatgattttcccctccagaggctgcagtccaaactgctctaactccctccggataaaccaaagctcacaacgccggtatattcccgtatactgattcattctgctctccctgttatttctattgtataatgcaactgttgtatcagtcaaccattatacacagcatccgccaatttgtcaacccgcggttcatccccctgcaaagtgaaacacatttttaataaaaataaaatatttct

SEQ ID NO: 3253 - DNA, 27855 bp, Unknown
  gut microbiota DNA sequence
cccgcctgattatggtatgatacatcataacagcagccccataccagaaaggaatgaaaatcatgataagacctctgaaaaaaagcccgcgccagatggaatggaaggcgttagaaaaaaaggaggagcgttttataaccgcagcccggcatcaaaaggagcctctgctgaaccggaagctggagcgttttgtcccggaaaaactggaggataccctgaacctggcattttataaggcatttgagctgatattcaaccgaggaacatccatcatagaaaaaacataccggaaggaggatatggaaaatacctataaaatcaatgcttacgccgcagggctgaaggaaagcagaaagactatgaaggcattttccagggaagccggtaagaataaggtcaggaacctggccgcagccggtgccggcggaatcggcctgggagctttgggcatcggacttcccgacataccgctgtttaccggcatggtcctgaaaagcatctatgaaacagccataagctacggattctcttacgatacggctgaggaacaatgttatatattaaagctgatttccactgccctgtccagaggtgatgcggctgaatccggcaaccggagtctggacgcttaatccgcaccgggacgcctctgtctgaaacggccctgtctggaacacctctgtccggaacgttcgccggccaggacggccttgctgctcttcccggcggacctgaatcccatgatacagcctctctttgcaccagccttatgcagcaggcatcccatgccctttcctcagaactgctgtacatgaaatttttgcagggaatccccattgcgggaatcataggtggaatgtatgacgctgtttatctcaaacggatcgctgattatgcggatatgaaatataagcgcagatttctggaaaaaagcaatcctgatatataggaccgcatatagggcagatataggtcaatataggtcaaactatatgtttaatttgcaaatgtcggacatttatggtaaaatataggtaaatttcagaagaaagcggggctatcaattatggataaggaagtattaagtttcgtcgtcgaaaaaactcacgaattaatgaatgcagcatcatgcagcaaagaggcaaaggcatccgcccagacctggctggatgcggttggaactgagaatgaggccgcagcaacaaaaacatacattgctgagctggaagcagacatcatgccggttgacggcctgattggctttgcagaatctgagatgggcgcccaggtcttcggggcagacaaggccaaggaagtggcagcccatgcaaaggaaatcaaggccgcaggggcaaaatactgtgattgtcctgcctgcgcagccgcagaggccattcttgaaaagaaggatgacattcttaaataagaataacagttcagacaagccgtatatcggacatatcgtatatccgattcgcataacatcaaaagagtatcccctggaaatggcggatgctcttttttctttgcagcgatgccggaatttaaccattgactttccgacacaagtgtcgtatatttaaaacagacacgagtgtcggaaattggcaaaatgaaaggcaggtgacaaaagcacgggcaaaaaaggagacaaaacaaaggccgccatacggaaagcggcactggctttatttgttcagaagggatttaaggatgttacaatgaaagatatctgtgaggcagcatgtcttagccgcggcggattatatacgcactacgggagtaccggccaggtatttgccgacatcatagaggaacttatgtcaggccttgaaagccaggttgccgggaaaatggaacggggcctgccggcgtccctcatattggacgaattattagagcgttaccagtccgagatgcttgaccggagcggttcgttaggacttgctttttatgagtattacagcggcctgccgttaacagaggacaatgccatgctgaagcagtattacagttcaaagacaatgctttgcagcctgattgaatacggcattggcaaaggcgagttcaggcaggcccatgcagacgcggttgcggatttgctgctgttctcttatcagggcgtgcggatgctgagcagtatcatgccactggacgatgataatataccagagggcatgatccgtgaaatcagatctatgttggtaaagtaaaattcatgccaggaggtgaatacggatgaagcttaaaattgcaggaagcggcggtatgtttctgattcccaaccctttttgtaaatgcccggtatgccaggaagcaagaaccaaacggggccggtacgagcgcttggggcccagtctttatattgaggacatcggaatgctcattgacacgccggaggacattgcagtcgcctgtgaaaggcagggtatttccaggattgattatctttccatctcccacaaggatcctgaccatacgcggggcatgcgaatcgtggagccgttgggttatgactgcattaccggcaagggaacccctatacagttcatagcacttccagaggttatagacgatatcaatgcctggaacggcgatggcctgtactactatcagaatattctgaactgcatttcaatcaacaggactaactatgctaaaatcggttccatagaattacacctggtaaataacaaaacccatcgtggcaatatgacattttatgttatatcagacggctccaaaaaagctgtttacgcctgctgcgatgtgaagccgtttgtccccaatgaattgtattatgacgcggatgttttaatcatcgggctggtttccgacgacggcatacttaaagacgggtcctctcttgattctgcaccgttcagagacgatatgttcaccttggacgagatgctggagctgaagcgcacatacaggataaagcgcattgtcattacccatattgatgagtactggggtaaatcctatgcttactaccgggaatttgaaaaaaagctggacaatgtatcatttgcctatgacggcatggagattgtcctatagccgccgcaggccggaaccctttatctgcgtcatgggttccccctggaccacctttttttaatctggacaaaaccccagaccaggaacagaaaaccgatcaaaacagacgctattataccggcggggctcagtgaaaactcagacccgctttttacaaacggagactgcatcacagaaaaaacattgttggagatatgtatcatcattgttattcttatgtctcctgtcagggtgaggagtgagccgagaaccagccccatacatattgcactggcaaactgcacaggattgcggtggaaaacaggaaataggcaggagtcctggcactgtttatgattcggctctgttcctcagccgtcatttgtcccaatgtactctgtgcaatctggggaaataggaaaaaaaggacgcggtgtgccatacacaggccaattcctgtcatggctgaaaacaggaccatctgcaagccgttcctgagccctgcctctttttttcctgccgcatggggcaggtgggaacggaaaatccatataaaaaccacgtgtgcccccgcctgggccgcatacgtaatcccggccaggaatccgtaccctgccggagcaaagaaagcctgaaccaggctgatcattacctgcgacaaaatcagccatgcggtaaacaccagaaataccataggaatcacctctgcccttcagtcaaatactcatttccctactcttcaaatgtccccttcataataacctctttatcccacacagccttcctgcctccggccataacatggaggatatccatggaatcatcgtacaccacaaaatccgcgtctgcgccttccgccacagtccccttgactcccgtcagtcccagcacccttgctggattcttagtcaggaggttcagcaccttctccaggctggctccccgctcgcacaccagcaccttcagctgttggtgaaggcttttgggggatgcataggtgaggccgatgcactccatcttgtcattgaacctgggcgcgcttccgtacgcatcgctggacatggtcatgttaagcccctccgggtcctgcttaaggtagctcagaatctggtccgccgtctcttctaattcctcccttgtaagccctgccgtcatatcaatggttccgccccgcttcacaaattccagtccctgttcaaacagctcctgggtgcgtcccatatgggtgggaaggaacttctgaaccggcacatcgctgttgtcaatcgcatagaacagaggatccagcccggcctttccgcttcccatatggatagtgacatagccacagcaccccgagagcatgcccgcccttcgggcctgggttgccagggaaatcagctgctctcctgtcagattggagcttctgtggtcgctcatggcgattttaactcccaccatcaggtcaattagagctatatcccgctccacgctccctgtgatggtgggggacgggtatccatatgctcctgtaaggatacggcaggtgattccctcttcattgaaagcccttgcctttgccagaaggttctccaggcttctggttataccgtctgtgcccaaaagtcccaccaccgtggtaatgccgtttttcaccagcacgctgaggctcgcctccggcaccctggtggcgggtccgctctcgccgcccccgcctgttatgtggacatggatatccatgtatcccggcgtcaggatgtgcccgcccaggtccaccttctccacctcctcaatctggtcgtattcatctatatggtccgctatcctggctatgcggcttccttctatcagaatatccttccttcccagatgctccggcgcatatatatctccctgtttcaatactttcatggattcatttcctctctttcagcaaaatcattacagcacggccgtaatatatatgtgcctattatattattaatatggaaaaaaagaaagtgcctgttgacggttacaggcactttcataaaacgcaggaagatatcagtccagatgcagcaaagcttctgccagagccaatatggtcagcgactgcccataggccatgggcgcaatcaatatatttttatagtggtccgcatcatatcccatgccggtgccgcccgacacattgagtacggtgccgtccctgtcaatgttgtccagaatggcttccactgccttccaggcgcaggccaaataggaatcgtccagaattccgtagcggattcccttgagaatgcccgcggtgatggcggcgctgcccgacacctcctcatagctgcccgcatcggtcagcaccgtgtgccacaggccgcttttgccctgaagtcccttaagggcctcagcctgggctttatatgtatccaccacaaacttctttacaccggcattcatggtccccctgaacatgtcgatataatccagtatccctaaggtaaaccagctgtttcccctgcaccagaagattccgccgaaattattcctttcattgaaggtccagccatggtagaaaagtccggtctccttgtcgcacagatatttaatgtgcatcagcacctggtggacggactcgtcaatccatgcctggttctggtacttctgccccatccggttgagaaagagcactgtcatgaaaatggtgtcaatccacatctcattttcattgagccgcacaccctgtcggtctccgttggcgctggtcacatgctggaaccccccttccctggtcctgggcaggcagttcatgagccagtccgcccatttcaggcacagcgtttcaaattcctggtcgtgataatactcgttaagctctgccagggtgaggaggggcgtggtggtattgatgtttttggagggaagcccttcccttatgttatccttgaaccactggtacaggaactccttataatcctcgttcttccgggcctgcatgattcttaacaggccgtacagtcccacgccctggggccagtcccattcccggattccaaaatcccgtttgaaaaagccaatggcttcaccgccctcagctaactcctccccgttctccggtccgcccagattcatgagcttttcaatgacaaggtccagcttttcctgcactttctttttatctgacgtcctaagttttacacttctcattctgattccctatcctcctactttaacaatcccaggacaccgggcagccacatgctgaatccgggcacaaaggttatgaacatcaatgccgccacaatcgccagaaagaacggaagcagctttttcatcacgtcctccacctgcagtctggcaacgctgcagcccacaaagagtacatttcccaccggaggtgtgatggtgccgatggacagattcatgacaatcatgacgccgaactggatggggtccattcccaggctctttacaatgggaaggaaaataggcgtgaagataagcagggccggagccatgtccatgaaggttcccacaatcagcagtgttatattgatgattaacagtatgacaatccggttatcggagattcctaaaagcaggctgctgatggcctgcggcagtcctgtgaaggacaggacaaaggacagcacagaggacgcgccgataatcagcatgacaatggtggtcataaccgctgtgtccaccagtatcttggggatgtccttaatctgaatgctcttataaacaaataccgacaaaaggaaggcgtacaccactgccacgcctgaagcctcggtgggtgtgaaatagccggaaaggatgcctccaatgatgatgacaatgaggaacaggctgggaatagcctcccatatggtctttaaaatgatggccgcagtcatcttgtcccgtttcatcacatatccgtgctttgcgccgtagacgcaggctaccaccatgcacagggctgcccacaaaagtcccggcacccagcccgccatgagaagggccgcaacagagacgccgccgctggcagctgaatatacgataaaggaagcagtggggggaatcagctggcccacaggcgcagtggcaatattcacggctgctgaaaagcccttgtcgtatccctgctcctcttccagaggaagcatgacgcctccgatagctgttgccgctgcaatgcctgaaccggatatggaaccaaacatggcattgcctgctatgttggtcatggccagggaaccgggaaccctgcccagaaacagcatggccaggttaatcagccgtttggctatgccgccgctgctcatgagcagacctgccagcacaaagaagggcacggccaaaagtgtaaagctgtcaatgccgctgacaatcttctgggcagagacaaacattccaaatccgggtgtcaggaacataatgatggtcagcagtgacgctgagataatgctgaatgataccggtacgctcatggccagcatgagaaagaataccaggaccagaacaatggctgcctgaatttccatactatttttcctcctttaatttctttgtgaacgtgatgagacgctgcaggcagtataacaccatcagaacgccgcttatgggtacgcagatataatatacctgcatgggcagttccatggccggtgatatctgtccggctgagttaagggtcaccataacgcctcctgctatcatcacaaagacgctgatgaacaggaccaggaattcgattccgatttttgtcctggtcaggttctttggcttaaatgtcctggtaatcaggttaatggacaggtggctctccttgccgtaggcgtagggcacccccagcatggtaagccatatgagcatgtaccttaacagttcttccgtatatttgctgggattgtgcagcagaaaacgggtgattacctgccagaagcaccccactaccataagcgccaccagaatggccagcacggtttccagaaaccggttcaatattttcatcatcttgctttcccccttcttactctgcatacttctggatatcgtcatacagggccttatagctctcgccctttgcacagaatttattatggatgggctgtactgcctgtatgaacgcagtcttgtctatgtctctgtaaacgtgcacaccgttggattcggcctcttccatggcctggtccatcattccgttgtaaagctgcttgaagttctcgttggtcttttcaaagccctttaccaggtagtcctgctgttccctggtcatgcggttccaggtcttggtgctgataatgtagatgtccggggagtactggtgctctgtatatgtataggacttcaccaaatcctgatggccgtccacggtaagggccagctccgtattctccgctccgtccacaattccctgctgcagtgaagcgtatgtctctcctgccgccatgggaaccggggttcctcccatggcctcaatcatatccatggaggtggtgttgggcatggaacgtatcttcttgccctttaatgcagacggttccacacagggcttgtcttccttcagatagaagttcctggcgccattggcatagtagcctatggctatgtagccctcgtcctccgtggacataaacagttctttcaccttctccgatttctgcatggcatcgtaataatgctgctgtccgttaaaaagatatggtactgcaaatatggagtactcctctttaaactgccccagagtgttggagctgaccttggccatgtccaggattcccgccttcaccatctcgatgatatccttttcagtcccaaggacgccgctgggataaatctgcacctccatgttcatggatgcatcctcggccacgatatctgaaatcagggcaatggaatccgctatctcggatccggccgcctggttgtgggccagcctgattaccagcttatcgctggcctttgcacttgtcacctggaaaaaggtcacacatattacggctatgcttaaaagcgccgccgcgataccgattgttttcctgcaagatttcatgttctctctccttttcatacgtgattcacgctgaatttgctgctgtgcttttgtttgactagattgtatcacaggaaggaggctgtttcttattccctgttgcattcttttttaatttttcaaactatattgctctcctctgttgacatgtccgcctttatttattacaactatactatagaaagatacatgggaacaggaggatgtggccggtatatggaaaaagtgacattttacggagagattgagggaatttccctggagcagatggtccggtacggcaaatttgacatgcgggtaaagcatttccataaccagtatgaaattttttatatcattgaaggggaacgccttttctttttcaacaacagggaatatgtggcccgctccggagacctgattctggtggactccaacctgattcacatgacaaagtccgtcacggcagaggatacgggccacaaccgcgtcatcctgtatgtcagctatgacaggatgaaagcctttgacgggcagtacccttccctgcagctggtccggttctttcatgaacactacggggtctaccatctggacaaggaacagcaggccctgttcctcaatttctaccgcaacctgcgcattgccatgactgaaaaagcccataattacaaggtcggcattgatcttgagacccttacgtggctctttaagataacctcctatgtgtcaaagcaggagggcgccagcccccactcctcagaccatcccaaataccgcacagcctacgccatcgcagactatctctccgaaaactgcgaacagaacatatccctggaggagctggccgcacacttttatctcagtaaatattatgtctgccgcacctttaaggagattacgggatacacagtcactgagtacaccaacatacaccgcatccgcaaggccaaacgcctgctggaggagacagacatgagcatctcggagattgcccatgagctgggttatgaaagcctgacctattttgagcggatgttcaagtccttcatgactatttccccgctcaaataccgcaagaccctgaacacagtgacctataccaatgaacagaccacagaatttgaggaggacacagagcagctttcctcccaccggcagccatagattcaccacaactttgtatgattcctttcatgcatcaaaaaagagagcatgccccttaacggcggaacgctccctcttttctttgtctttatattgccttctcaatcttcctgattttctttgttcttcctatttctcatacaggaatttctcgggcaggtttacatggaaatccgctgccagatttctgaaatcctggggtgtaatggtctgtagcttgtccggacggatgctcaacacctttaccaggatttccgctgacttctcaatggtatgcatcaggccaaaggtcaaatcaaagtcctcgcccgcgcagaacaggccgtggtgggcccatacggctgcgtcgtactcttccatcagcctgctggtggccactgcaatgtcgcggccgcccggcaccatccagccaaccacgcctatgccggatgggaataccaccggacattccgtggccatttcccacagttccctggtaaatacctcgtctgtcagaggcaggacaaaggtcagcgcaatgatgttcgccggatgggcatggtaaatcaccctgtatctcccctctgttgccttcattttcacctcatggttcatcagatgggtgggcagctcgctggtgggcctgccgccctctgcgagtccccagcagatacggtagttctcccctgcctggtccacttctatgatgcagcagttggactccggttccagaatcatgttgcgcataaaccggccgcttcccgacaccatgaaatactcccctgccagggcaggaacactggtgccgatgggctgccatttcccgtcataagaaagctcctccttcacggactccacttcctcatgtttgatgcggtagcttaagttgccgccgttcctctcatgccagttctggttaaaaccatcgtcacacacacgtatgaagccttttgcaaaggctgtgtccaatactctcattttctaatcctcactctctttctgagattcactatcctgaatttatgctgctgggataaacgtccctggctccattaacacattaactgcgttttaagagcacttccttctcataggcctggacttccttaaaccactgctccttcaccggaacctggttcatctggcagaaatagtcccatacatccccaaagggatacgttttaagctcttcctgctccatcataagctccgtgaacctgcgctcctcctgaagctttgcaagcttctcatttggcatcagcagggcgtataaaagggccttctgcatgtttctcatgcccaccacccatgcgcagatgcggttgatgctggcgtcaaagaagtccagggccagaagcaccctgtccgggtcatttctgacgatttccttggcaatctcccttgtctcgtcgtcaaagagcaccacgtggtcgctgtcccagcgcacggggcggcttacatggagggcaatcttgtctgaaaacagcagcatggaagatatcttatcagatatcatttccgtggggtggaaatggccgctgtccagcaggcacataatacccctggaagccgcatagttcatatagaactcatgggagcccacggtacagctctccatgccaatgccgaacaccttggattccactgcgataagcaccttgctcttatcgtaatccatggccaaaatctggtccagggagtccttaagcctggccctggggctcattcggtcagccggaatatccttgaatccgtccggaatccagatattcatggcgcaggggcttcccagctcctcggcaaagtactgggatatgcgcacacaggccttacagtggtcaatccagaattttctgatttcgggatcctcactggacaaagtggcgttctcagcctttggatgggagaacatggtggggttaaaatccagtcccaggcctctctccttagcaaatttcacccaatctgcaaagtgtcttggttccagtgcatctcggtccactttttccccatcctggaaaatggcgtagctggcatgaaggttgattctgtgcctgcccggaatcaggttaagcgccttgtcaatatccgccataagctcctggggattcctggcctttcccggatagtttcccgttgcctgtatgccgcctgacagactgtccgcgccctcaaagcccataacgtcatccccctgccagcagtgcatggaaacagggatatgattaagccgctccactgcggcgtccacgtcaacccctaatccggcgtaaatttcttttgctgattcatatctttcctgtatattcatggttctctccttttcatcattaaatcttacttatataccagtcatctgttaatccaaatgaaacaccggtacaaaatccacacataccggactgttatctgcattcgtttccatgatgtcggccatatagtcccaccatctgcggtttataggcgtatctgctgattcagcccagagcgcctcatcctccacttccagatacccatagagcacattggtttccctgtccagaaaaatgctgtagttatgacctccgtactggcgtatcatctctttcatctcaggccacagcgcattgtggcgcttctcgtattcctctgccattcccggattaaggaacattttaaatcccttcctgaccatgcggtaccctcccttcgtcaaatcatttctcgtaacagcctcaacagtcatcatttatcaaacttctcagaaggttcataggtcttgatttcaaatgagcaaaaaatactgtccctggcctccttcaggctcttaaactccttcccctctatcatctgcaccgccagattgccgatggctgtggcctccgtgggtcccgcgtaaacggtctttcctgtggcctccgccgtcaggcggtttaagtagtccgcattggctccgcctcccacgatatggatgcagtcatatctcacgcctgtaaaggcctcgatttcccggcagcagatgcggtagcagtccgccaggctgttgtaaattacagccgccatctcccacttagtctcaggaacctgctgtccgctctcctcacagtaagttttcactgctttgcacatgctttcaggagccaggaaacggctgtcattgcagtccacaatggaggaaatggtttcgcgggaagccctcttacatatctcgccaaaggaataatcctcccctgattccttccattcctttttcacggactgaatcatccacagccccatgatatttttaaggaaacggtacctgtactcatatccgccctcgtttgtaaagttggcctccatgctcatctcccggcagtcagcgtccttaagctctgtccccattaaggaccaggtaccggagctgatatagagcacatggtcccggttggacggtacggcggccacggcggagccagtgtcgtgggtggccggaagcaccacccggcaatccagtccggtctccttttgcacatcctcactaagccttcccaccacggttcccggcatggacagcccgccaaaaagcttctgcggatatcccagagcctcaatcagttccctgtcccaggtacgttcagagggattgaccaactgagttgtggtggcattggtatactcctgtttctgtaccccggtcagcaggaagtttaagtaatccggtatcataaggaagctttctgcctgtgaaaggatatccggctgtttttccttcacagccatcagctggtaaaccgtgttgaaaatctgtttctggataccggtcctccggtacagttcctccctggaaatccgctcatacacctttaaatccattccctcagtgcgcctgtccctgtagccggcagtcttgcccagcacatgtccctgtttgtccagaaggacaaaatccacagcccaggtgtcgatgcccatgctttccgggttgatgcccagttttttacattctctcattccggccttaatttcctcaaaaagcccaacgagattccagcacagggtcccgtccaccatttccatcccattggaaaaacggtagatttcccgcagattcatcttcccattctccatccaccccaggatatggcggccgctggaggcccctatatccactgcaagataataacggttcactgtcacacctcctagttatgagcacttggcgaccgtctttgggccgcttacgtgcgatacatgtcactggcacttagcgaggtcttttacgtacctagtgcagtggctcgttatgagcacttggcgtctgtcttttagacgcttacgtgcgatacatgtcactggcacttagcgaggtcttttacgagcttagtgcagtggctcattgctttcatgatataccatataaaacaaaaaaataagaacggcatttatgaaaaaatgcgtccttatttgcacataagcagaatttgaaactgaggggcattccacgcccggaacattctatccgttcttcctgtactccttgggagacataccgtaataggtcctgaatattctgtaaaagtagctggtattgtcataccccacagcaaagctcacgtccgccaccggcatgcgcgtgctgtgcaggagaaacgcggcctggttcagccgtttaatctgcagtaattccttgtaattgcggcccagcaggcggttgatggcacggctgagccagtacacatcatatcccatcagagctgccagctctgtcaggcttccctcccggtaatgctcgtctatgtagcgcagcacctgaagggtaagctgctgctcaaaggattgttcgctgtcgcggtttacccggatccgccccgtataatgcataagatgccgcagcagcagacccatggtagtctggttcatggcctgcattccttcccgctcatgcataagggaccacaccaggttctccaccaggttctggaccggcagcacatccgcaatctggaaatgaagatagcgtccgtacctggtatcgtcgcagaggcatcccacaataaaatcccgcagcagattctcctcctcccccatcatgcggaaggccgtatcaaaaaattcgggaagaatgataaaattcaccgcaatgtcatcctgacccgcaggctggatttcctggaccgcgtgctggtttaaaaacagcagttccccttccttaagcttcagttccctgccgtccaccacatgggtggtctctcccctgcacatatagattacctccacatagttgtgggtgtgctccggaaaatgcacgaaacgggtatggggccggatggtaatgagctgtccggcttccaggagcttatcgctgtcaatgaccatgtcctcacgatccatatacagggtcctgtcaatatctgcactgcctgccagtatcttctgttcttcttctgtaatgacgctcaggctttgaatcagctcctggttcatgtaaatcccctttctataattaaagaaaactgacgaaaagcaatttccagacacgcaacggcgcatcctatatactctaatctccattcaccacacttaccggttcccctgcgggaaaagtattgagcagctcttctatcagccaatattttgtatccattataaaaaattatataattgtacacgaataacgcaaccttttactcccctcccccagcggaaccgtctctgtttattttaagaaactcctccatctcttccatggacaagggcttggaataatagtatccctgtatctgttccactcctatatcctcaaccagctgtctctggctttccgtttccacgccctcggcaatcactgtcattcccaggtctctgaaggcatgcaccagatgccttatggtcagggccgaggtgggattatctatggacgcccataccaggcttttatccagtttaatggttccaaacgggatgcggatcactgtggcaatattggagtagcctgtcccaaaatcatccagtcccatttcaatcccatgttttctcatctccaaggcaaaatccgtcaccacctgcgggttctctgccagcgtactctctgtaaactcgattttaacggctgacataggcgtaccgttgcgctgtatgatctccagcactttccgggacaaatccggctgggaaaactggatggcggaaaaattcacatggatggcctccatgggcagtcctttttcaatcagccggttaatatatttacagacttcatccagaatcacatacgtgagttcaataataagacccgtctcctccgcaatgggtatgaattcatttggatagaccggccctatggaggtgtgattcatgcgcatcagggactccgcgtacaggaactgcctggttctcactgagtagataggctggtaatacatctccacactgtgattagcaagctgctctttcagaatcctgatgattttcttccttctctccagtttttcaagcatctcctggtcacaataacaaatctgtccatatctgcccgtcttggcctgggacactgcgtattcgatgtaactgactgcttcctccaatgttttcacgtactccgatcgccgtataactcccatcacaacaggaagcttgaactggtaatcctggttctgccacggctgcttcatgcgggcctctatatcaaggacacattgccggacgcgttcccccctgtcattgataaacaaaagcgcaaactcatccccgctgtaccggtagacattttccttaggacctgcactgcacagaaaggcacatacctgctttaaaaaggcgtctcctccgtgctgtccgcatacattattaatctgcctgaaatcacgtatggaaacaaccagcagagtgaaatccttatccggataccttctcagtagaaggtccagcatattcagaagttcctgacggttgggtacattggtgagatagtccagggatatctgacggttctggagatgcaggtaaataatcagcagtgcgcaggtggcagcggtaccggacaatatgatattagggtacatctgttggaaaaatattacaattacagccaatactggaaatgtcgccaatatgtgataaatatggcggtctatatatcgcctgttccttaccgcaataacaatgcagccggcacagtacccataaaaaataagataggttataaaaatcaggctgccctgttcataaccctgattcgcagtgatatcaaacagacattttgtaaaaaaattagacagtaccagcaatgtatagacagctcccggaatcccgcctaacagaatcatgcggtaaagctgaggcctttcttcatacaaaacggaaaccgcataaagataatacaccagccccataagaggtgtcagtataaagtatatggtggtgattgcccatgtaacccagacaggcaccggaatatagccgcacagcataaaagtagacaggatattgctcagcatggccgcaaaagtaacggtcaggcactcctggaatatcctgtttttcagacttggcagatggctgcctttcctggcatacacccatataattcccaggataaccaatgatattgtttccggagctatgttccatctcacccttatgtacctgccatttcccacccctgcccgctgtactaaaaccccttttcaatcttttttctcaacgtgtacaaggtgtcatcatttcttaatcatataccaaatttctgtttacatcaataaccaatatgggaaatatttcttttttccagtcccggatttcctatatttataaggttctctatactgtcctttcttcatcccatgatttttaaatattttgcttttgcaaatctttttccaaacctgagaaaagcaaaaaaagttcccggctcacattgccgccgggaactttttgtcaatacaatcgcttacgcctctgctttccatccttccttcattgtgcccttaaaattcataaggcgggttgccggaaaaatcagcaatcacaccgtggggattctccaggtaaaaaacaacaaaaatgggattgtcggctgtattatactggcctttcacaatcggattggccatgcaggcttcctttacctccatattatcttcaaaaactgccctgccgtggagacgaagccacgcataagcgggatcagaaacagatacttccacctccggattggcctgcatgtccttgtacacatccttctggttgttggtgcagaaccacagctttccatctttctcaaaacagaacatgaagggacggcactttgctttcccatccctgccaacggtccccagatactgtacaggatttgcctgtaaaaaatccacaactttattcatcataattctcatccttcctttaacttattttttataccagtattataaaatgcgtaccgtgcgcctgcaagaacgcacttttaagtgggataggcacctgacagtgctatagtatcttaaagataccatttgttttacaattattttaaggtattctaacattttttgttgaaaaatcccagtaactctgttacaatcccattaagaagatcttatcttaaccaatcatttaggagggtattatggaacaaatgttattcttagtcccagtagtggggctgcttggactcctgtttgctgtcattttaagacagcaggtcgtcaaggaggatccaggcactgacaagatgcgtgagattgctgacgcaatcgcagagggcgccaatgcatttctggcttctgagtaccgcatactggtcgtttttgtagctgtgttattctttgtcatcggtttcggaacacggaactggattacagccggatgtttccttgtgggaagcggattttccaccatggccggttatctgggcatgaacgccgccatccgcgccaacagccgtaccgctaatgctgcccgtacgtccggcatgcaccgcgcactggcccttgcattctccggcggaagcgttatgggaatggccgtggtaggcttaggcctgctgggcgtaggcgttctctacataattacaagagacgtatccgttttatcaggcttcagcctgggcgcttcttccatcgcactttttgcccgtgtgggcggaggcatttacaccaaggcagctgacgttggcgctgacctggtaggcaaggtagaggccggcattccagaggacgatccccgtaacccagctgttattgcagacaacgtaggcgacaatgtaggcgatgtggccggtatgggtgccgacctgtttgaatcctatgtgggttccctgatttcagctctgacactgggactggttttctatcaggaagcaggcattgtttttccgctggtgctgtcagcatgcggtatcattgccgcaatcataggctccctgttagtcaagagcatcggcaattccgatccgcacaaggcattaaaaacaggcgagtacagcgcaaccgctttggtagtggtctgctcccttatcctcagccgcatattcttcggcaatttcatggctgcctttaccatcattaccggtttattggtaggcgtgctgattggagctgtcactgaaatatatacatccggcgattaccgttttgtcaaaaaaattgccaagcagtctgaaaccggctccgccaccaccattatcagcggccttgcagtgggaatgcagtcaaccgcagttcctatcctgctggtgtgtgtgggtgttctgatttccaacaaacttatgggcctttacggaattgccctggcagctgtaggcatgctgtccaccaccggaatcaccgtagccattgacgcttacggtcccatcgctgacaatgcaggcggaatcgccgagatggccggtctggacaaaaacgtcagggatataactgacaaactggactctgttggcaatacaaccgctgccatcggcaaaggttttgccatcggttctgctgcccttacagctctggccctgtttgtttcctatgctgaggcagtaaaactcaccaccattgacatccttaacgcgcatgttattgtaggacttttcatcggcggaatgctgacattcctcttctctgccatgaccatggaatccgtatccaaggccgcccatcagatgattgaggaggtacgccgccagttcagggaaaaacccggtattctcaagggaactgaccggcctgactacgcttcctgcgtatccatttccaccaaagccgcccttcgcgagatgttcctgccaggtctgatggcagtgctggcgcctctggcaaccggtctcatcctgggaccatctgcccttggcggacttctgaccggcgctctggtaaccggtgtgttaatggccatcttcatgtccaactccggcggcgcatgggataatgcaaagaagtacatcgaggaaggaaaccacggcggcaaaggcagtgattctcataaggccgctgtagttggcgatacagttggcgatcccttcaaggatacctcaggtccttccatcaacattcttattaagctgatgacgattgtgtctctggtatttgctcctctgttcctgcagtttggaggattaatttaatctcaaagccaaattctctttatggctatacaacagttaatgggaaggaaaatccaaaccacggattttccttcccattattttattaaaatcctgttgataaggggctgtatcctgccccagcaatccctgacacaatctcatccgccagcccgtccagagccttcaccacctcgtctatctgctccggcttcatgttgtcaatatggaagcctccggtgcacaccaccacccggccggtttccctgcacagtttctccgccagcctccggcacagggcctcgtccttgtggcctgtcaggttcagtatggaagatgtaacgcttatggttccgtttcctgtcagggacggccttggcactgactggaccgtacatccaatatgcggcttgtctcctccttgtacaaaggccagaatatcctcccctaaaaaagcagtgcctgcctccatataagaacaggacagttcctttcgtccccttataatccagtccatctgcggtactcctttccctcgattccaaacggctccagcagcctggaagcaatatgatatatcatctcctccatattctccggcctgtgataaaaggtcatcatgggaggaattattctcactccgggcatcatggacagctcgtacatattcctcaggtgtatggggcttaagggggtctccctggctgccaggaccagcgtccgctgctccttgatggtcacatccgctgcccgcagaatcagattttcagcataccctccatggattccggcaatggtcttcatgctgcagggcacaatcagcatcccttccgcggcaaaggatccgctggcaggcccggctccaatctcatccgggcccaggacatggtcagccagcccttccacctgctccgcagacaggtccgtctcctggcctaatgtaagaacagcactgtggctcataatgagataggactcatattccggctgttcccctattaactccagacattttatcaggatgggcagcccgctggcgcctgtagcccctactataatcctcttacccccacggttggcacccgtgcttctcatgaaatcttcccctcattttcctgctttacccattcggacgggtccaattccatgaacctggcccgtacaaagcggtccttctggtcaaatgggaccgtgcagtcaaaaatagtcttacaagcaatgccatggtccctgatgctcggtgaaaatgccgggtcattggacgggtccagaggatggcatctcacccccggaatggtgatggtatccacatctccctggaaccttgtgttcatggcccatagcacatcgttcatatcaaaacagtccacgtcctcatctaccaggaaaatatgcttcaattcactgaaagcggaaaaggccagaagggctgcctgtctctgcctgccttcatcactggcaacagacttcttaaactgaagcaccgccatgtattttccgcctccggcagaacagcagtatacattctgaagccggcccggcatggctttttccaccataccgtatatgctggcctctgtggggattccagccatggacacgtgttcctcgctgggcccgatgcaggtctgcataatgggatgcaccctgtgggtgaccgctttgaccttgatgagccagcactggtcgctggccggccctgtatatccgggaaattccggcatggcaaagcctgtatgggtgttctggtcctccttgactctcacgttgggaaccacctctccctcaatgacgtactccgcattggctatggccagttcatccacggtcaggcacctgcacagttttaccggctctccccgaagcgcacctgccaccgacagctcgtcataccccaatggcgtggtgggcggttcaaagcaggaaccaatctcaatggccggatccactccgatgctgatggagatgggaagcctgcggcccagctgctccgccctctccgccatggctccgatatgtctggcacctggcgtaaagaaaatggacagctcatctctgccctggatacagagcctgtggatagtcacatcatgggcccctgtatccggatgggcagcatagcacatgcccagagtaatatatgggccggcgtcataaggcgtgttagttggcgcaggaaccagcttatacaggtcaaaatccggctcatcagccctgtgcaccacctgctggcagaccggttccccctggcacatcacaggtaaaaccggcttctccacactgcggcagagcatctttcccagctcctccggcttacagtccaaaagggcagccacacgcttcctgctggccagcacgccgatggcaacactggcatcgggatgtcccttcacattgtgaaaaatcatggccgggccttccttggtaggccgctttaccgtacctcccgctcccacataccggtacaccccggataattgcgccattggctcaacctccacgtctgtttccagcagctgccccggcagctctgccaataattccagcgcacttctcaaatccctgaccttctttgccatatcataatctcctgtccggcgtttcttaccatacgcctgttatcatttcttttctcattgacggatgtttcatgcatcgtgcttctgtcacacagcttttatcacacggcttatacctcacatcttctatctcacatcttaacggaaaaggactggagaatcaattcatcttatggtataattgtttccaaattggaatgtattcacaaagcaaaccggaacatataaagaacaggcatgaatctgaatatgccctctcatatgtcccagaaagaaacggatgacagatatgacctttgaacaactggattattttattgcggccgttcaatgcgacacctttttggacgccgcggagacacttcacatcagccagtccgccctgtccaaacacatcatgaagctggaaaaggaactggatatccagctgtgggacagaagccggcgctccgccgtcctgacagaggcagggcacatgttctacgaggaagccctgaacctgtccaaagaataccgcagaaccctctttcgaatcagcgaattcaaggaaaaagcaggccagaggctgtccatcggcaccctccccatcctgtcccagtaccatctcacagccatgctgaaggattttgcagacagccatcccctcatccatgtttttctggaggaagttgaggaacacgacctgctgcagggattttccaacaacgcctatgacctcatcatcacccgcagcaacatgctggacagtaaaacccataccttccttccattggcagaagacaggctggttgcaatcctgcctgaaaaccacagactggcagacagatcctgcatctccctgaacgacattgacggagagggcttcatactgatgcacagctatacatctatctaccatttctgtatggacctgttccagaaggctggaatccgcctccatctgctgcgcacagcccgcatggaatccattatcagcgctgtggctgtccatgaaggcatcagcctgctgccggaggaaaatttcaggctgttccaatataaagacattgtctctgttcccatagagcccgccggcaaactgtccatcggcatagccggaaaaaagcagggacaggtttcatctgccatggccgaatttctccgctatgcaaaaggttatacgcgctgaacctgctccggcaccacagcccacatacggacaggaagtcctgtggctccctcaataggagggaacactgcaaacacaatggctccggccgctggcacctggtccagattgcacatgacttccacctgcagctttcccttgtccagcagatagcgctcacaggccaggtctcctgaccgggctgccagtaccgatgcatccgtatccagcgtttcgtgtccgttggcagccgcgttccgcacctcgtagatgtatctcagtgcctccatggaccaccctggaaaatgctccccgccctcctggtcaaaatttgaaatagcgtccatatccggccaccgcctgctccaaccggtataaagggccacaaaagccccatccggaatatccccgtacgcggcctcaaactccctgatgtcctcaacggtcacagcatattccacatcttctttcaccttttcagagatatcaatgaccaccaggggaaagaccatgtccttgacgccgtactgctccgacaatgcctcccccttgataaaatgtcccggaaaatcaatatgcgtgccgaactgccccggaaatttgaaggtctgaatcagacattccagttcatttccccagtcatatacggtttttgaaagttccacagccccctccggaattcctccccagtacgggctgtcgttgttgagcgggtgggacagctcgacccagcggcacctcttaagcctctttaaatcttcccataattcatacatattccggttcctcctgtcgtatttttgcttcttttgttaaattctaatgactccattatagcgtgtacgctgggtcattacaagaaaaatacgcccaccttttatatcacctttaatatcatcccggaagcaccgcattcctgtccccggttataccgcaatccttcagagatatctttatattggtaaacggcagcgggatacggtaatggtcccaccgccagttcaggcaaacagccctggaatacccggcccggacttcgatgaaattcttctttcccttttcagccaggtaaaatcccagggttttcggaacccttcttggccccagaggtccgtccatggccgctgccagagtctttccgggacaccctgcctcctcgatcagatttctcagaaaatcccggctcctgcagccgtccggaacccttatggcctttccattacagcgtttgattatattttcaatgtaatccccgcgcccgtctgaggtcactatgaccgctatgtcacgtccctccgacagtctcctgagcagcaggttcatcaagaagctgtcctcatgccagaaaccaatgacagcgcccctgtcaggcatatctttggtccatatatcgggcatctccacttccagccgcaccgtcttctcaagcagccttaaatagccgtaatatagacggcacaagcatgcctttgccatgttcttcataaccggcatcctccttctgtcctgtcataagtccgtactgttctgctgccagagctgcaatccgtccggattcatacaattctgctgtcttacgggcctcctccgacattcctgaccagaccccccgttccaataccagccgggctgcagcggcagcaaaagcctccggggcttcttctgtcatatatccgtttattccctgtctgaccacatccacaacgccggaggccctaacggctgctacgggacagcccgcagccatggcttccagcagcacaattccctgtgtctcagacttggacgcaaatagaaaagcatctgccgcattcagataatgccgcacccgggtattctcaatcttccccgtaaatacaatctggcggctgattccaagcattcgggctaactcctccagatggcgtctctcggtaccgtccccaattaccatcagacggaagtcctgccccagtatgtccctaagacgcgcagtaccctgaaaaagaaaatccaggtttttttccttttccagccgcgctgtggtggcaaaaaggtacggacacccgttcccgtacatattccggatttcagaagaaagcatctcatcgtattggaacgaaacacggtccagacctgtgggcagtaccgatattctggtttttgtaccctgctccagaagatggtccttcatcgtggaggttggggcaaataccaggtcgcactgattggaaaatgcggtaattaaggccggaaccagaatctcctttccatacctggcaatccggcttaccggatattcgccggaagccatagcctcatataacttaaaatggtggagatattcctcataccgggtgtggtaggtgtaggctaccggtatattgtatttctttcccagatacagggccgtctgccctaccagcacaggatgatggacatgaatcacatcaaaatttccctccctgaaaaatgcttcgatttttctatcaaaacagtttcccaggaccatccctctgtccgcctttcggtaaaaaaccttaaaacgcaccacatccttctcctgctccgctgacagcttcccttccggttcaggagcaaataccgtaaccctatggcccagtgaccttaatccttccgacagccgttcaatggaaatcggcactcctcctataaatggtttgtaattgttggtaaacattgcaatattcatggggcctccttctatgataacaactgaaacacctggtcgcccatcacatatccggctccaatcaggaaaaaattccagacaaaaatgccaagggctgaacttatggtatatttaacaaaattcatccggatgacaccggcaggaatagagataatggtacgaatcatgggaatcagcttgctgatgaatattccggctgctcctctggtcctgagcagttcgaagttcctttggataaccggttcatgtttgggaaaacgtttcagataacggtccagaaataagtcccctcccatccgtccgattccatataaaatccagcttcccagaagtccggccgccaggccaagggccattaccatgaaaaaactgatctgtcctctggctgcccatatgcctgcaagcggcataataatcccggccgggaatcccggaaggttcatatattccagcagtatgattacaaatataaaaacagctccatatctcagaaagtattgtgtcagcatctgaacatccatatgtgattcctcctaatggaccatatcataaatcaggaatctaaacttgccctccaaaaaaagcataaggatttctaaagaagttataagtaatttcctataccccataaaattatggggataacttctccatacattttcgtgttagaatatttttaacaaaacacagcctgatttcgcaaaaaaatcatgcactatatac

SEQ ID NO: 3254 - DNA, 68603 bp, Unknown
  gut microbiota DNA sequence
tgtatcttaacgatgtattttaccataatatggtctgtatacctgattatgggataaatgacggatttttttgtataaatggcatattatgtccctattccgtcactctctgcacaaaaccagacagattctaatgccgattttatcagaaagattccagttcatgtggaatcccggccactcttaaccaaaatgtaacctttttcccggaccgctcccggaatatatggtatactgttattgagtacagctcgaataacaggcatctgacgggaggaagggaccatgccgtatcttttgtttgtggacgatgattccaatgtgttaaatataaaccgtaattactttgaatccaggggcttttctgtatccgtggcccagacagcggaccaggccctggaccatgtgaaaaagtatccggtagactgcgtggtgctggatattatgatgccgggctttgatgggttcctgctctgccgccgctttaaaacccagatgacagcacctgtgattttcctcaccagcctgacagaaaaagaatatttatatcagggcttttccctgggcggagatgattttctcaccaagccctgggaccttaaggagctggagatacggatccggaccagaatcagccagtgttccaaccgttcccttaagggtgaacggctggaattcccgcctttaaccattgacgccggcacccgccaggcgtccatagggaatgtctgtgttccgctgaccgcctatgagttcgacatattactgctgctggcccgttctccgggccatgtcttttccccggactccatttaccgtgaaatctggaaactgcctgatttggacaacacccagaccgtcaaggtgcatgtggcccgtatgcggcataaaatggaagctgcctgcccgggacacagcttcattggaaccgtgtggaagcaggggtaccgtttcctgccggaaaacagctgagagtaatcgtgagaggcggtgaaaagccatgacgcagtacaggaattcaaaatggctcaatttaacggcagcggcagccctgcttctggctgtccttattctgttccagttcctgtatcagaaagataacaaatacacaaacgggcctccctatggaagtcagggtgtctttgcattctccgcccgtgacctgacaggcagcaggcccttgtttctcattgacggatgggaattctatccggaccagctgctgacacctgataccgttggttctgttccggaccaatccatgtccttcatattcatcggacagtattccaacttttccttcctctcctccggccattcgccctttggcagggccacctaccgcctgctgctgcgatatgacggagaaccaaggcttctgaccctggaagtgccggagctgtttacggattatcaactttggataaacggacagccagtggaacagggcagcccctttgcaaccttttacatggacggcaccgccgaaattttgttaaacacagacaaccgcagccactattacagcggtctgacctatccccctgcccttggcacccctgaggctgtccacaggatgttatttctgcgccatatgttctacggcatactgtgtatctttcccctggccctgtgcctttacgcggccgctgcctggagaatacgggacagggacaggcgcctgctgcatttcggcttattatgcctgttcttttccatccactgcgcttatccgttcattcaccagctgggcctgtccggaaggctctggtatgccgtggaggatgtctcctggatggctatgctgtatgaggtcatggtactttcctccgtggaagccggtttcagcggaaaactgtggtacaggagattcctccgcccggctgcggctgcggcctgtgccgtatgcggcctgtccgtcctcttcctcatacctgcctccccccgcctggtgaatctttacggcgccttcctggacggatacaagcttcttatctggctctatctgctggaatgtgcggtatacggcctgtggatgaaccgggacagcgcgggcctggtgctggccggatgtttaaccatgggggccgccatggtgtccaatcttctggacaataaccagttcgagcctgtttatacgggatggcagacggaatacagcggctttatcctggtcatcgttttctggattctcacggtccggcacataagccgggtcctgaagcagaaccaggccctcaccgagcacctggaggaccaggtacagaagcgcaccagggagctccatgcggtgctggatgaacgcaaggcatttttctcggacctggcccacaacctgaaggcgcccgtggtggccattcacggatttacggatttgattctcaggggaaatttgtatctggatgatgatttgaaggaatatctggataaaatcagcagtgaaaatgaagaactatgcagacgcatgtacgtgctgggagacttaaatgcttttgataagattacggagccaagggaattaatagaaataaacggcttgctgtcccaggtcagtcacgataatgaacctgaggcctgcatatccggtatagaactgcgggtggaaaaactggaagaccaggcatttatcctggcgcagaagagaaagctgctgcttctttttgagaacctgatttacaatgccatatcattcacgccggaggacggcgttatcaccatttccccctgcctggatcaggacggcgtgacgatacgggtaagcgatacaggtatggggattgagcctgagcatcttccccatatctttgaacgtttttattcaggacggcccgatgcctcagaaagcagcggattggggctctacattgcccgtatcatagtggaagaactgggcgggagcattcacgcggaatccgtgaaaggacagggaagcgtgttcacggtacggattcccctggcggggacagtcccttccctatagatcctttcctacagatccttccttatagtcccttccctatgaaatgataagccggatgtttttgctttatatttcccgcagaagctctcccagcctgcggatcccctcatcaatcatgctgcagtccgcgtttgtaaagttaaggcgcatggtgttggtatcagtcatattgatgtaaaacggatcaccgggaacaaacgcaacctttttctccagggctttgggaaacagcgataaggcgctgaccccttccggcagtgtcacccataagaacatgcctccgcggggacgggtgtacctgactgtctccggaaaataccggtccatcgcctctgtcatagcctgtgcctgctccttatacagctgcctgatttggtcgatatgggcgtcatagtcgttgtgcatcagatagtcccatatcaggtattgggagaagatatttgtatgtaaatcactggcttcttttgccaccgaaatatgtttcagaagttccgtgtcagcgcaaatcataaagccggttcgcatgcccggggtcactgtctttgaaaatgtccccagcagaatgctgcccggcagctggcctgccccgatataaggaatacggccgccctcgtcaaagcgcagttccccataagggtcgtcctccaccaaaacgatttcccgctccctcagaacctcgcggatacacgctctgttttcagcacaatagctgagtcctgtggggttctggaagtccggaatggcatatataaatttgacatcatgtttcagagcatcttttaactgttctatatccatcccttcctctgtcagctcaaccggataaaataccggctgatattgggaaaatgcctgtatggccccaagataactgggcttctccacaatcactccgtcccctgtgtttaacaggaccttggatataaggtccagggcctgctgggaccctgtggtaatcaggatattttcaatgccaagtttcaggccgaatctgcggttgtagcggtccgctatatactggcgcagctccgggagtccggccgtgatggaatattggaacaggctgctcccataatcccttacaatgcgctccatggataccagaagttcctcctggggaaatgataccgggtttggcagtcctcctgcaaatgagatgatttgcgggtcagccgcggtttttagaatacttcggatgaatgacggtggtgtggatttaatacgctcagataataaatgttccatactgctgctcctttgtccattttctttacagtggtttttataatggtatcattataaacttgcaaaaggactcgaacaacagtagaattgtatgcaagacaattttgcaaatacccatacaaacaaaccacagagatcatacagaggaaacagattatgtctatcaattcatttgacaattatcccatgagctggaaaccggatttaagcagaacatcaggcccaaaatatctggcgctggtaagcctgatggaagaagatattaagaacggaacactgaaagcaggaacaaagctgccgccccagagagaattggcggattacctgaatgtaaacctaagcaccatatccagggcctttaaattgtgcggccagaagggccttctgtctgcctccgtaggaaacggtacctacgtctgtgcggatgtctctgcggagaccatacttctgtgcggacgtgagaatccgcggatgattgaaatgggcgcactggtcccccaggtgtccgggaaccgactggtcaaaatctacacagagcggctgttaaagcggcctgacgccctgaacctcttttcctacgatgacccggagggaacaggacggcagcgtgaagccggcgtggcctggcttcaaaaatcaggcttttctaccgatagggaccatgttctgctggcagcaggcggccagaacgcactgacagcggcactgggcgcattgctggaacgcggggataagctgggaacagaccccctgacttatccgggtgttaaaaccgcggccaagcttctgggaatccatctgatacctattcagaatcatgattatgagatgacagaggaagggatccggtatgccgtacaaaatgaaaagataaaaggcatctatgtaattccggattaccacaatcccacctcgcatatcatgtccctggagacaaggaaaaggattgcagaactggccagagagaaacatatcctggtaattgaggacggaatcaacaacctgctgacggaaaatcccctgcctcccattgcttcttttgccccggaacaggtcatctatctgtcaagcctgtccaaaaccattgccgccgggttgagaactgcttttgtccatgtgccggaccagtatcaccgctgcctggccaccaccctttattccatgaatatttccatctccccgctgcttgcagctgtatccgcgggactgattgcagatgggactgcagatgaaattataaggggacggaaggaggaactgcgcaggcgcaatcatataatcagccaatccttaaaaggctttgcactggactgcccgcctaccagccccatgagatacctgcgcctgccggattattttaccggcaaaagctttgaaatctgcgcaaaacaggccggggtgcaggtctatggggctgaacggttttcagttggcaataaaccggcggaaaaggcagtccgcatttccgtcataaccccgccgtccatgggggatttggaggaagggattagacggttgagggggattctggggtgagccgtatcagtcttttcctagcgccatcatatactctgatctgagaacattggcctgtcaagcttgggattcactatggggtaatcctcccgatagtgagcccccctgctttcctgtcttctcaatgcggcctcccccataagacgtgaagctgtaatcagacaatacagccggaaggcttccatattaattgcatcctgcctgggagactctgcaagctgccgtccaattcgctccacagtgccaagtacctgcataagaccggcttcatttctgctgattaaaagatgatgctggtttaccgactgcagttcatggattaaaccttgtgtgtccgcctttctgtgtagtatttcccacaatctgtcatccgggtacatggcagtactttctctttgcggacggtggatacctgcccactttgctgcatttgtccccgctattttcccaaacacctggcaggtcaccatcatattcccgcccaggcggtccgctccatgaggaccgcctgccacttctccagccgcatacagtcccggcagcgatgtgctgccttctgcatcaatgcatacccccccgttaatagcatgggcaaatacattaatctccaccttctgcgttaacagatccacccccttgtccttcatatggttgcgagccaccggccacatgtgatggagtccgcagtcatccggtacatgacagatataatcatctttcatatgtcttaaatcagcaatgatacctccatggcgtcctcctctaccggctctgatttccttttgaattgctatttctaaatattttgaatcatcactggatgaaaacgggaagtgttttctatgttcatccatcacatattccggttgcatagaatctggtatgtacttttcaaggaaactctctccctccgaattagtcagtagaggatgggctgcccagatatatccgttaaatatattcataagagggtgtgaaaatccgattccgctctgcatgaattccatattaaccaatctggcacctgattcgtatgccagcatatatccgtctccgctgacatcccccggattcaggtttttttcaaaagcctgggatgcgcctccggatgccagaatgactgctcctgcagagatatagattagcttcccccgcgaatccaccccccatgctccgcagcatattccattcttcttcgccagctctatgatagtaactcctgtcagggactgaatatctggacgtctgcgtatctgccggatcaatgcctgtacaattggttctccatggccccgtatgacatgtgtacggggaatgcttgcaaaacaacttttaaatgtataatatccgtccccttccctgtcaaattcgaccccccatgattcaagttcatcaattgtctcaggtgctccttcagccaggattgcagccagcttttcatccgccattccctgtccggcagccattatatcctggtaatgacattccacatctcccggcacatggggatcccctgcgttatatccggccatctctgccacaggatatgtagtggccccgcctaatccaagcggcattttagcagctatgattacatcagctcctgcgtcgcaggctgctaaggctgcccttaaggccgcccctcctcctcctataaccagtacatctgtcaccaatctgtccattttcagttcctctctgcctatatgattatctgaactgcggggaacgtttgccaaggaacgcatctaccccttctttacagtcctctgttttgaatatgctccggctaaattccaggtttttatagaaacatttatctgaggataccatgccgatttcccgtacccccttctttatcagcttgatagcttcaaacggtttatgagcgattctttcagccaggtcaagcgcagcactgactgtcttgccggccggagccagtcggttgaccagtccgagacgcagacagtcctctgcatcaatgaattctcctaaaaacatcatctccatggctttggaagcaccaactaatttaggcagtctgaaaattcctccgcttcccggaaaaacccccagattaatctctggctgtgcaattcctccgctttcggaaagaattctcaggtcgcaggccattgccatctcgtagccgccgccgcatacatttccttccatggcagcgataaccggcttatctagaaattcaattgcattgaatacttcattctccttctgcagcttttttccaattacatcatcccaaaccagaggaaattcctttacatcagaacctacgcaaaaggctttttctccagagccagtaagcaccaccacccgtacttcatcatcctgttccaatcggaacagcgtttcctttaactcgcggctaagttccagggtcaccaaattaagcggcggattatttaaagtaattagcgctaccttatctgctggtttctctactaaaatcaggttgttttcatactccatatcaattcttcctttcatgatttctaacaatcagtccctttctctctaactggtttaattcccgctgggtatacccggctttttctaatatctcgtctgtgtgctggccaaaagccgggggcagattacggactgccggacgtacgccgtcgtaataattggcatgccctaatccccgcagagtcctgccctcactttcccccagctctataaacggccgattataaagaatctggtcatccttcattacctgctcatactcatttaccggagcaaaccacatatcctccatgcgttcaaatatctccacccactgcgctgttgtctttttctgcatttcctgatttatcatctggtcaaattccacgcgtctctccatggcatcctgttccgtaaagttctctataacaccaggagtaaataagctgcacagccggtcatgatgtgtcaaggataccgttatgcatccgtccgccgtaggatatatcccatatggggactgatgtatcctggtggacaagccggtatctgcccggtcaataaatctccctccatttaaataataaccaattgtttcaatctgcaaatccagggaagcagacagcagactggtctcaaccttatgcccttgtcctgttatgttcctgtggcgggctgctgcaataattcccaaagctataagtactgccgcatgctgttcaatgagggctgcccctgccggaacaggcggttttgaacctggaccgttcaaagaggccagtccgcttttcgcctccatcagcagttcatcatccggattctggcagcatccgctgccatccgctgtacagatgcaccatataagctgtttgtgagacctgagcaattcatcatattggatgccccacccctccagcagtccaggaggagaattatccagtacaatatcatagtcctgcagcaggcggtgtaatatatcaatgccttccggtgactgcggattgaaggaaatactcttctgattccggcctgtcatctgaaaaaacagaccgttttccccatccagaacacttccaggccggatacggcctgtcatatcccattccacccgcacaacctcggctcccagatcagccagtatctgactggctgaaccgccataaagcccatggacaaagctgagtatcttcataccctccaacatcatagaatcctcccgattaagtctgcttcatcacagcagcagcgtacttaatgcagggacaaatacaatcaggaaaaacaccgctgtatatcccagaaaaaagggaagctcacctttggctatatcacccatttttaattttgagacagaggctgccgcaaacagatttactgccacaggaggagtcatacatccaataacattcgctatacacataatcattccaaaatgaatgacgccaattcccagggtctgtgctataggccagagaaccggtaccagaagcacacaggtagctatcccctccaggaatgtgccgaacacaagcaataccagggcaacaatcagacagaacatccatggagccagattcatggccacaattgcatccaccagctgtcctgatatccccgagaatgtaaacagccatgaaaatgctgtggaggttgcaatgatgaataaaatcatggcactgctctttcctgaggccagaagtatacggtaaatatcccggggatgcagttcccggtaaacaaaaacacttacaataaaagaatagataactgcaacggccgctgactcagtgggcgtcataagcccggaatatatacctcccaaaataacaaacggaagaaaaagggcaggcagtgcatggataaaatgttttgcaagctggctgacgcttgtcctctccgtatttttaggccacttctccttattggaatagtagatgcagattaccaccagtacaatggaaatcataagtcctgctacaattccccccttaaacatatcccctaccgaactgttggtaatggtacagtaaaccaccataataatggaaggaggaataatgggacccagccccccggacactgtcagtaatcctgcacaccgttcttttggatagcccagacgcaccatatcaggataaagcattccgccgattgccagcaccgtggccggcgccgaacctgacagagcggcaaaaaaagcgcaggccagtaccattgcgtaccccattccccctcgtatattacctataatactgttgcagaaatccaccagacggcgggatattccaccttctgtcataagatttcccgccagtacaaaaaggggaatcgccataatggatactgaatccagggcagtaaacattcgctggggcaccacagccataggaacgtcaaagcacagcagagacgccatggtcgccgctcccaaagaaaccgaaataggcacaccgattatcagtaacacaatcatggttccgaacaaaattattgcagtcatgacgcatcctcctttccttggtcttccgccgctttttccataaccaggcaaaccagcgctgctgcctgtattacggtaatgattccaaagctgagggtcaatgcaaagtaaggtatggccatgggcagatgtaaaccaggtgatacctgcccggaagacagctgtgttttaagaatggtaaaggatgaaaaaaagcagactccggaaaaaatcgccaccacggcctttgaaataatccgcactacccttcctgtcattccgtgtattttatccgtaatagccgtgatggaaatttgtgtattgtcccttaatcctgcctctgttgccagcagtgccatataaaccatgcaatagcgtgctaattcctccagccatgaaacacctgcatggattatatttcggttaactacctgggcaaaggacgccagcaccataacagtaaatgtggccaccagaataaaatcctctatcttctgtaaattggcaaacagccttttcatccttatccctcctatttttcagcttcaatcgcttccacccaggccggatccattcggtctgcaaactgttccattgccggttctaccaactttcgcatatcatcaataggtatctcataaaattccacgcccagctctgtcagtttctttactgccgcctcatttgcctccaccagataatccctctgtctctgtgctcctgcttttacaccttccacaaagtcttccctcaagtcatccggtatctgattccatgccttgtccgacataaacacgcccatataaccaaaaacatgattggtccatgttacgtttttggttatctcatagtagcgattggcaatcagattggcgatggcgttctctgccgcgtcaatggtgccctgctgtaaaccggtaaaaacatctccggatgccattggtgtggcaattgcccccatggcattaaacgccgcaatatgtaaatcattctccatggtgcgtattttaagatttttcatatcttccagggatgtgaccggacgggtggagaagatattgcggaaacctacatccatccaacccactgtatgtattttctgttcttctgttttttcagcaatcagtgttccgactgttccatcaatgacacgatgggcttcatctgctgtctcaaatagaaatggctggtcaagcaccgccatttcaggaatgaaagaggtgagtactgcgttggaggccgtaaacatgtcaatggtacccatttgcgcaccctcgtacatgtctctttcattacccagctgcccgcctgcaaatacctgtatggttattcttccgccggtagccttattcacttcttccgcaatggccagggctcccttatggaaattgcttccatccgggtccaccattcccagtttaaacgtaatggcgtctttctcaggctttgcctccgggaccgaatctgcttctgttttcacatctgaaactcctgctgaagtggtttccgcattcttaccctgcccgcaggctgccagcattccggctgttaatactgttgtcaacaatactgcaatcttcttcataatcaaattctccttctgctttatcctgttttatttgtcctgctttttttcgggtgacacagcctttccctgcttcatcatctcctgaatctgtgaatctgaatatcctgcctcctttagcagctctatcgtgttctcaccaagctccggcggcagccgtcttaaaggcactggttgcccatcatagcggttggcatgtccgagaactttcacctcgcctgctaccggatgattcatggtcataaaacactggttataaacaacctgctcatcctttacaacgtcctcatattcattaaccggcgcataccatattcctaactcctcaaatattaactcccactcatttgtagttctctttaacaattcccggcataccaccttgtcaaattcaatgcggttatccatctgatcctttgccgaaaaaccttccagcgcgcctggtgtaaatgcctgttccaaattctcaaaggaggtaagggagagtgtaatgtatttatctgctgtcttatagattccatagggtgactgatgaatcctggtcgataaaccggtatctgctctcggtgtaagcgtcccaccattcagataatatccaataggttcaatctgaagatccagcgctgaccccagcaggcttgcctcaatgcggtgtcccttcccggtcttatcacggtcatacacggcagcggtaatgcccagggctgccaatatagccccgtgctgatccaccagcgctgtccctgtaggcatgggaggatgatctcccggtcctgccaatgccgccagtccgctcattccctgtatgagaagatcctgccccggctttctcaccttgggtccactggaaccataacccgtacaggagcaatagatgactccagggtttaattttttcaattcttcatatcccaaacccagtttatccataactccaggccggaagttttccaaaatcacatcataccccttatcacggaccagcctgtagatggtctcccgtccctcgtcagactttaaatccaaagcaacccctctttgattgcggttcgccatgaggtagaaaacgctgaccccatttttgtacgtattgcaaccggaccagcccctctcataagcacccctgcaagactctacctttaccacatcggctcccaaatccgccaatgcctgtgctgctgacggcccctgcagataatgggtaaaactaagaacctttactccttctaacattctgaacattcccctccttttaatatttttacagattataaacgtttataatttctttcttaaaaaaatccgaagaataaacactatgcttcgaatcaaacatttaaaattataaacgtttataattttatgtttttaaaataacacacatagattgtgttgtcaatagttctttgtcagattttttatttttataatatttggttatctgtttttgtctaagtttcacaaacaggtatcccctcttatatcgcatactgactgccgaacaacaagctctcctcttagacgggcaggaggagcagggctgttgccagctatacattcaaggagataatccacacctcccttagccatcacatcctccggctgacgaaaactggtgagaggcggcatcataagtgaggccattgaaatatcatcatagccggtaaccgaaaaatctccggggatcgaaagtccgcaatcactagccgcactatatgcgccaaaacacagcatatcattggctgctattaaagcagtaggtctttccctgccttcaagcaccttccgtatcctcatataggaatcctgtatgtcctttatatcaaaaataaactgcttggcgcattgttccaacccatgttctctcaatgcctccatggtaccctcaaacctctcctgataaatctgattctcaaagcccaggtaagcagcgcagatatttttatggccctttccgattacatatttcgtcactgtatatgctccataaaaattatcactgggaatacaatttgcaattcctttaaagcttctattcaggaatacatacggaatgccggcattatcaaacccacgaaaatgctctatatgccttgaacagggcaatataatcacaccatccacattccgctttttaagggtatcaaccagacgcttctccttatttaaatcttcattggaattacagagcaaaatcatatatccctttttttctgcatattcctcaatgctcttagctacctttggataatatgggttggtaatatccggtacaattaaccccaatgtgtctgtacttcctatcttaaggcttctggccgaataatttggcttataatccagctccctgaccgcggacaataccttttccatggtcttcggtgtgatattttctttatttgcaagggcacgggacaccgtacagatagataccccagccagttttgcaacatccttaatcgttgccatcttccatcccccaaattgtaaacgtttataattaaacactaccatttgtttcttaaactgtcaagaatttccctgctgtgggggggatattttatattgaactattttattgttcaaaaaggccgtccagaaattgccaaaatctcaaaccggcattttcaggacagcctgttataaaattatatgtatcacgcctctacacggccccaaacttctcctgagcatccagcacatactgcacatagaaggcagctccgttcaccagagcatcctcatccagatcaaagcgttcattatgaagggaatagcagcaatcctttgactcgttgcggcatcctacaaaagcgtaaacccctggaaatttttccagaaagtaggaaaaatcctcaccgcccggcgtgcctgcatattttaccagtcccttgtcgcccaggattttcctgacggactccgccgcaatcccgctgcagtactcgtcattgatcgttgccgggatatcagaataatagtcaaactcatattcagccctgtaagcttcacaggtgctctttatgatacgctcaatcatacccggcagttccttctggagcttgggattgaaggtgcgcaccgtaccgctgagctcagccgtctcggcaaaaacattggccatggtaccggaatggaaggtacagatactgaccaccaccgtatccatggggctggtctcccggctggcaatactctgaagggcatccactacctttgcccccacataaatgggatccaccgcgtactggggcatggcgccgtgtccgcttttcccgataatcttaatattcatgaaggaagccgatgtatagcggggaccgggatccacggagatggtgccgctctccaggtacgggaatatgtgcatgcccgccaccgtatccagctttcccacctttccggactccagcacctttaccgcgccgttggtcaattcctccgccggctggaagataagttttaccgtgcacttaagctcatcctgatgttctgccagaaccctggccgctgtcagaagcatgctgatatgtgcgtcatgtccgcaggcgtgcatgacgccctggttctgggaacagtagggaagattcttaacctcccggatgggaagcgcgtcgatatcacagcgcaggccaatcaccggctggtcctcttttcctttcagggtggcaatagtgccggttcccgccacctcctcataaggaatccccatcccggcaagttcatcccggatccgtcctgctgtctccacctccttccagctcagctccggatgcttatggaattcccgccgcatactgacggcataatcatgatatttcccaacttcttctattacgttcacagtcaaaatcctttcttactaaatttcttcttacaggattgcccttttttatatacctttttatatccccttttatatacccttttatatgcccttttatatgccttatttatacctttttattttacctgcttcacaggtacgccggttaaaacggaccataaccaatctgaacagccacaaacaaaaagattaactgcagaatcaggaaaagtccatgtaaaggcaggataaacttataccagctctttaacggtaccttgccaagcgacaggtagataagcagcgttccgttggtaaaccagaaggtattggatataccgtcgccaaactggaacgccagtacggctgtctgccttgtaatatgcagcatatcagccaatggaaccataattggcatgaccgcggtggcctgtcctgagcctgatggaatcagggcattgacaaagaaatttacaatgaacatgcccaccgtgctcacataagcggaggcgctgcgcatcagattggaaagcccgtgtaccagagggtccaccagaccgccgtttgtcatggtccactggaccgctctggccacaccaatgatcagggcgccgctgaaggctcctcttgcgccgtcaagtaccatattaatgccatcgtccagattcacccggttgattgcagcagacacaataccgccaatcatgaaggtggctgccatttccgtatatgaccagctcagattcaggataccgtaaatcgttacaaggatggagatggacagggaaataactgaaacctttttgggaaggtcaaacttaaggcccggatcaaccggaatgcgcagggaggacgtgtccacatccttcacaaggctcttggacggatctgccttcaccttttttgcataccgcataacccataccaagctaagtatccacacgcagaccagtgccgcaatcctcagctcccatccggagaacatgggcagctcggcaatggtatgggaaattcctactgtgtacacattaaaaggcgcaaccgcaaagctgatcagacaggcaaatccggatatggccattccgaccagtgagtcatacccaagggagagggccagggatacgataatgggtacaaagggaatgatgtgctcactccatcccaggatacctccgaaaatgaaaaacacaatcattacaattgctatgattacctggctgctcatcctctcggaagcctttaaaacactgttgattgcagcgcctaccgtattggtccttttgtaaatctccacaataccgccaatcagcatgacacagaacatcatattggccgaggctgtcaggccttccggaatggaccggaatatgttaaaaaacgatacgggcgtgcgctccgtggcatgatagctgtctgccaggacccgtgtgaccccgtccacggtttcacggtcataggctcccggtatcacaaaataagatacgattgcgcaggcaagtaccatcagtacaagcggcacaaacggattcaaaggcttgtttgctttttgcttatctttcgtcattgttttcccctttccctggcaggaatttaaaaatagcgtatgatattctccaccagttccaacattttctttacgtcctcaattacaacatactctcttgcactgtgtgaatgatagatattaaagccaatgggcacggtcctgattcccagctggtttgtgcaggtggcgtccaggactccaaatgacctggccggtatcatggaaagcccggacctgctgtagatggaagccaatcgttccagcatatctgtattttcactgaaatctgtttccggaacatcctcctcttccctgatattgcatttgcaccccatgcgctcagccgtctcctccgccttacggcggatcctatcccggatctcctgcttgatatcattgccaaagcagcggatttccacatcaaaccgggcgtatttgggcactgcattggatggcgagagggataccagatcaaatacattgatgctcaggttatcgttcagcctgccaacaggtatctggtgaatgatttccactgctgtcagcagggcattgacccccggctcctcattgcggataacatgggcggcgcgcccaatcagttccacattcatataaagcctggcaggtgtgcgtgtcaatacctcccctgtcacgtagtggtcgatgacaattgcctcctcgctctctatcctggaatagtccgcatattttgctccgtggagccccagctcctggcacacggtaaacaaaagctctatggggcggtttatttctccctcctgcataagccgctccacagcctccatgaccaccgcgatggccagcttgccgtcagcccccagtacgctgctgcctttactcctgatgcacccgccttccacacagacctccacttgattgctgggcgcagccgtatccagatggaatacgaacagaaaaggggttttaccggacctgcccggaattctggccaggatattccagccgtcggtcaccacctcattgcccagctcctggcgctcaaacggaatccccattccggcaagctcctgctccatatattcacaaaatgccttttcattatgggattcgcttgcgcactccgcataacgtataaaccgcgaaactgtcctgtctacgtttctccctccttccatctcttaccctgcaggctgtattttccccacaggctgcattttccccacaggctgcttgttacaagtgataccattttatcatttaggtatgtgaaaaactattgtttaaaccatgtaagttttattccgttttttgtttaaatgcacaaatttccatgtatatattgcgtattttacaggatttattataataaatgaaaaagagggcaatgaataacggccccggacggcctgcaaggaggtaacctgtgattgataataagattatgtatgaaattatagaaaaactgcacgaaagcttttctgcttccatcagtatctgcgatgtaagcgggcgcgtcattgtgtccacggattcttcctgcatgggcgagatgaatctgcttgccatagaggcccttaatataaattccaaggtaaccgtgtccatggacagcaagattcaaaaggcaggcgcggccatgcctctgcgttttcagaaaagccggatgggcgccgtggttctccagggcgcaggttcctccagctcccagctggctgaactgctgagcaagaccattgaactattgtatgaagaacttatcctttccaagaaaaaacaaaaccggacccaggagcgggaccagtttctctatgaatggctgcacctgcagtccgattatacggaaaattttataaagcgaggggagcatctgggtattgatatcacaggaaaccacaccataatcctgatggagcgcaaacaggacgacctctttacgtccacctccatcattcagaaccttttagacgatcgtgatatcctgcttcccctctcccaggaccagaacctgattatcctgaaggagaatgagcattttgaaaaaaaatataaccgtgtaattgccgccggacataactgccataccggcatctgttccggcagcgcccaccttcacacagcgtatcaggctgcccttgaaagccttaagctgggtaaaatactgtttccagacgagcatctccactgctttgagaagatgaagctggcaattgcgctgtctaaaacccccattcccggactggaggactccttttcccttcttgtcgcaaagggcagaaacgcccagctggccgatacggccataacctatatacggctgaacggcgatattcagaaaatctgcgacaaactccatatccaccgcaacagcatcccctaccgcatccgccgcatccatgaaatctgcggccgtaacctgatggattactatgacatgctctgtctttatgcgtcgttcatacggtatgccgggaaggaagcggatatacagtagcgggaagggcagaggcaggtactggtcaggcactgggcaggcactatggcaagtgctatggcaaatgctatggcagctcctccagcatgtcttttacgcattcaataaattttttcatggcaggtgacgcctccttccatgacggaactccgattccaagagagacaaactggggagggtcaaagggcagggtgaccacatctccggaccagctgagggtaatgagcctgttgttcaggctcatgcccagtccggcctccaccatacagtaggtggtatatgcatctgctgtagaaaagcgtatgtccggcgtcagatgtctggacccaagaaggcggtcgatttccgtatcctggttaggcatggttatgataaacggttcgttttccagggcgcacagcggaaatgatgcctcccctgccccggggtgattcttcggaagccaggccagcagctcgtcctggcgaatgggaatccagtcgcagattgtcccggcggcaggctcagcaaaaaagcagcagtcaacggacatctcgttcagccaccgtgtcatctcacggtttccaccctccttcatgttaatcctgacattgggatacaactgccggaaccgcttcaatatgggcggcagccacatggctgaaacgctgtagtagcttccaatggtcagggcgccgcttaaaatgccgcggatatccgcccctatctccagggcatggttatgggcacggacaatctcccggaaagccggaatcatcgccttaccgttttccgtgggagacacgcctttttttgtccttataaaaagcgggaacccgacctcctcctccagggcgttaatcatccgtgtgattccggactgtgtatatcccaggaaaacaccggctgcagtcagacttccatggtcaatggccgccagaaaggcttcgcatttcgtaacatccatatctttctccatccatgattatttgtcatggttaatatgataaatcaggttttgtgtcatacatgaaatcattgtacaatagtgccaatgacatgtcaaacacaataaaaacatattacgttcggtgtgggaaaggatgactctttgagagagttctctcccggaaagtgccattatcttcacacaccggagataagaaaagaggataacgaaatggaactttgtatgcacagcaggccttcttttgcttccgattatatggaaggcgcccatccggctattctggcccgccttatggagacaaacatgcttaagacccagggatatggaagcgaccccttttcccaatcagcccgtgaaaaaatccgcgcagcctgcggctgtccggatgccgaaatacattttctcgtaggaggcacacagaccaacgccactgtcatacgcggactccttcactcctatgaaggtgtaattgcagccgggtccggacacatcagcgtccatgaggccggcgcaattgagctgggaggacataaggtgctgactctgccccatgtgtcaggaaaactcagggcagcggatatcgaaggtctgattgcggattacagaaaagacgcaaacagcggacatatggtcatgcccggcatggtttacatctcacacccaacggaatacgggacgctgtattcgctcagtgaactccgggagatcagcagcgtatgccgcaaaaacggccttccgctgttcctggacggcgcgcggctggcctatgccctctcctgcccctgtaatgaagtatccctcaaggatatagccaggctctgcgatgtgttctatatcggcggaaccaaatgcggggccttgtttggagaagcggttgtgataacgcagcagaacctgatcccccatttcttcaccgtcattaagcagaacggcgcccttctcgccaaaggcagaatgctgggcatacagtttgacaccctttttgaagatgacctttatatgaaaatcggtgcttccgctatagcggccgccgaccaaatcagggataccctgacaaaatgcggataccgcctgttcctcgattcacccacaaatcaggtatttattgtaatggaaaatgaagccgcggcccaactggcccggaaggcagagattaccttatgggaaaaatatgatgacactcacaccatggtgcggttcgtaacggattgggcaacccagcaaagggatgtggacatgctggttgagatactggaacaggaatgtaatcccacgctggcctgtgtttcatagagggcgccgcaccacaggcaggtctaagttttctttgagaataaaaacgagctcccagggcgggaatattcggaagattcccgccctctcctccttgccttttcattggagaatttcacatttttgtcatctgccccctatcaattcatttctcattccattgaccggctcaattaattgctccataatgatttctcagcattcctgaacatgttcccctctcagataccatgctgtcttagcgctttcctccagttcctccaagccgaaaccataaataccgttttaattgcaaataccagaatcttgtcctataattgtcatataatacggggtaaaaaccagaaagtaatctgtctttgtgtttataatagagtttctatggggttatcgcatctggatcaggcggtaaaggtttcaagcttttgaacactgtgcgtcattcacaccgattgcccaaccatatattaaacttttagtattattaggagagacgaaaatgggcttgatatacgatggcttgatgtatgaaagaatatatgaaatattaaaggaccggattgaatccggagtgttacccgctggcacaaaacttccgtcacgggataatttatgcagggaatttggaacatcggctaaaaccatccgccgcgtgttatccatgctgaaggaaaatggattgattgagacacaccaaagaaagcgtcccgttgtaagtttccatcagcaaaccaggcgtccaatgataaatcttgcattgaagagagtagatacctcaattaccgatgaggttctaaaaacaggagttttattggggtatccattgattgaaaatggaattgctctctgcaaacaagaagactttataattccccggaaaatcgtggaaaatatggatattaataactccgcagagttctggcggttagccaaacagtttcagaggttttttatcagacgaaatgaaaatgatttaagcctgcgtgtaatggatagtctggggcttgcggagttaagacctctgcaagacaatttagaaatcaggaccaggttttatgaacaaatgcaggagctgatgagggttattgaaaacagaggggatactgatagtgtccatttcgatgacctgtccggaatgtacgggctcacatatggaagcgaacctgccttcgatgttcctgtggactccgcggctgtacttggcagaaagcagctggaaaagctcttactaagagaagaagtaagatattcagctgtttatatggatcttttgggtcttatcaccatgggacgttaccagccaggagacaagctcccaactcataatgaattgcagaaactttataatgtgagtgtggatactactcttaaagcaatacagattttgcaggagtggggtgttgtaaaagcagtccgtagtaaagggatcttcgtaatgatggatatacaggccctaaagaaaatcgaaatgcctccccacttaatcgcatgtcatgtccgccgttatctggatactttggatttgctggccttgacgattgagggtgtttccgcctatgctgccgaacatatctcacagaaagaaattgaggaggcaatgagtgaaattaagcgctgctggaatgaagaccaccgatatatgcttaccccttcattccttctgaatcttatagttaagcataccggggatggttcactcaatgctatctatatacttttacggcaaaatctggggataggcagaagtattcctgccttgcgcgaaacagaaaaaactgctgaagactatgaactgtatgagcaatgtgtcactgcactgaatcagctttacgcaggaaggcaggaagatttctcaaacgggaccgctaaagcatttcggtatatctacgattatgtaactgaaaaatgtaagaacttaggctactatgattctgcgatggctgtctatgatggtagcgcgttgtggaaataacagccatcccacgcgatttttaaactggaactgtccatggcggaagcagctcccttttcatctgaagcagctgccgccattatatcctatctttatcatctatatagtcaattacgtaaatttccggctctgtaaattcatactccattactcgtaataatccctgtaatattctgcactgctgtgcggaagatatgatggaaccttttattgatgataattgtttctggaacggaactgtcatcctccaatagcaagtaaaatattgcatctcaaagactaaaaaaacgaaggtattgttgatatttaaagactgcggtgatataattattgaatatatggttaaggtaccaagattcttatgtcagctaaaagtacccggcagtatagtattcttttccttaccttcatctgaagcgtaaggtatatttttgtttacctgaaaactggctgcatggacatggttattagcatttttttacggtaagaaacctcatatatctgtttgagtatgcatttacaacctgtggagcaaagtgaatcagcggactgacaatattcaattaaaatgatagtaagaataaatgatacgattgtaaagggggatatcaatgcaatggataagatgaaccatggtgctgtaaaatgccagctaaaatattgtgttggaataggggcttctgccggaggtgtggaggctttacaggagcttttccggaatatgccgctggatacaggtgcctctttcatcgttgtacagcacttgtctcctgattccgtgagtatgatggataaaattctacagaaatcagttaaaatgccggtacgtctggcagaagagaacatggagctccggcctaatgaggtctatttaaacattcctggcatgatactggaggtagagagcggacacctccatctcagtccggtgcatgaccgtgtacagcgctatgcgcccatcaatcaaatgcttaattcccttgcttcggataaaaacatacacaccattgccgtgattctctcaggcagcggatcggacggtaccattggtatcggctctgtcaaggaaaacggcggtactattattgtacagaaacccctggaggcacagtacgcttcgatgccgcagagcgccattgccacgggcctggtagatctgacagaaaatgtatccaaaatcggactggcaatacgggactatttaaaaaatcccaataaccaataccttcactatgatgacggggttgagaatcaggaactggcaggatattacaatcaaatcattgatgccatatcaaagtattctgatattgatttttccgcctataaatccaatacaatttaccgacggattgaacgccgcattgcaatcaataaatatacctgtattgaagattacatggaccatctgcttgcatcagaggaggaaaaggggcttttgtgcagtgatcttctgattggagtgacttctttctttcgggatgaagccgcttttaaaagtctaggcgagcatgtactggccccgctgcttcgggaaaaaaaatcaatccgtatatggagtattgcctgttccactggtgaggaagcgtattccattgcaattttactctgcgaatatatggagcggctgaattacaatgcggatgttaaaatttttgcctccgatacagacccggatgccattgctgcggctcaaagaggcttctataccgaaggcagcctggccagcattaatgaactcatgatagaaaaatattttgataagaaagaggacggctacatcatcaaggacatgatccgtaagatgattgtttttgccaaacacaatatatttagagatgcccctttttccaaacttgatttaattgtatgcaggaatatgttcatctacgtaaaaccagaagttcagcagcgtaccattggaaattttcaccatcttctcaacgacgatgggtgcctgttcctgggcaacagcgaatcactgggcgatttggaaggagcgtttgatgtcctggacaggaaatggaaaatattccgcaaaaataaagagttccatacagaaaataatggtttttatctatgggataacctgtctcaccctcagaaggcaatgcaagaacctgctggaaatctgcgcccaaaagtccggcctacaaatatcttcgaacggcttttttttgattttgcaggaccgtcagtcctggtggacggttacggaaaaattgtacaaattattaaaagcggaggccagtatcttcgcttgcaggacggacagtttgataattccatcagttcgtgttttgcccccagcctgacgattcttctgaaccatattatggagcaaatgaaggaaagcagctgttcatgtgttgaaaaaaatgtgacaggagtggcggactatccggatgaaagcctgaatattaaggtcaattattttaacctggataatgacgaatattttttgttccagataggaattggccggacagccatgccggactcagccgataaaagcctggatatcagcgaattaacaaacagcaggattgcccagcttgaatatgagctgggggaaagcaactggagactgtctctggccatggaggagtcagaatcccgcaacgaggagttacaggcaacaaatgaggaactgatggcatccaatgaagagctgcaaagcaccaatgaagagatgcagtcaatcaatgaagaactctacacaatcaacgcggagcaccagagtaaaattacagagctgactacggcatactcagactttgacaatctgttggtaaatgcagaggttggcgcactttatgtggaccgggatatgaaaatccgtaagattacccccatcatgctgcaaaacaccaatctcctgaactcagatttagggcgcccggtgtatcatatcaatttcattgattcctatgagagctttaattcagatattaaaaaagtggctgaaacagggacaattatagaacgggaagtgacggatgcccgcaactccatatggttagtccgaatccgcccttattatgaaaagccggagcaggtcggcggactgctggtgactatgtttgacatcaccaggcgcctggaggcagcgaagtttgagttaaagcgcctgacggacagtgtgccgggcggtgtagtgcggatgcattatgacggagaactgatcattgattatgccaatgacagcttttatgccatgaccggctgcagtcctgaggatgtaaggtatagatttcacaaccgtctcagcaaaatgatactttctgaagactggacacagatggaacagcagattgagtcggcggcagctggaaatggtattttaaaatacgagtaccgcggaggcagagatgctctgtcagccaggtggtattccatccaagccacagtgtttcaggtaaacggcctgactgaactccagggcatcatcatggatatctccaaattgaaagactatgagcagcgtctgcaaagagaacgggattattataacaccctctatcagaacatgctctgcgggattgcgcagtatgcatacgacgaagatgcaatggactttattggtatcaatcctgaatcgctccgcatactgggctattcatccctggaagaatttaagggccagggcgggcctacgatgctggacataacatataaagaggatagggaaagaattgtgggaatgctgcaaaccctaaaaaaggagggtgactgcgtcagctttgaccaccgcatcgtccgtagtgatggggaaatccgctgggtaaccggtgcctccaagcttattacatccccagaaggaaagctgctgatacaaagtacttttattgacacaactgaggaaaaaaggacgcttgaacagcttaaggaggaaagagaccgttatgatctgctttacgaaacctcatacaatatggccgtgtgcggcgtcatccaggcagatgtcaaacataacaaaataattgctgtcaacaaagaggccttgcagcttctcggtacagacgcggcaggccttgaaacgcagttatttagccgggaagccgaaaaaggtgttccggatttaagcagtatcggtgaaatgatgcaagccgcagcggaaaatgaacacaagcgcttttcgcatattctcaattttaaagacagatatatgtccattgaaggcgctgtggattacatcatggaagacaaaagcgtcagggtggttcagtttacatttttagacaatacggaacgggagcttctgcgtcaggcagagacgaagctggagattgccacgaaatccagcaaagccaaatcctattttctctccaaaatgagccatgaaatccgtacacccctcaatggaatagtgggtatgattgacagtgcgatgctctaccgccatgataaagaaaaactgctggacagcctgaacaaactgaaacgctcctctctccatctgcagcagctggtcagtgaagtgctggacctgtccaaaattgaaagcgggaaaatggacgttaatatgggaccggtgaatctgcagcttttgctgtccgatgtcattgaagaatttggtacgatggctaaggaaagaggaatcggcctaacccagactggaaaactgcatcataaatatgtgaatacggataaggtaaagctccatgaaatactggcaaatctgattggaaatgcccttaaattcaccgacagttcaggggtggttctgctgaatatagaggaaactgtaattgcagaacgggaatccctgtatacgttccaagtacgggataatgggaaaggaatcagcaaagaagatcaggaacggattttcgaggcctttgaccagggttctcatgaccatttatacgggaattcagggagcggcctggggctgaccatctgtaagagcctggtggcgatgctgggaggctcgctgaaagtcgatagtatagaaaatgcagggtcggaattctcatttactctcacaatggatctgttggacgaagaaaaagagacggatactccggtaaaatcctgctcctgttatcaggggcatcgtgttatggtagcggaggataatcttataaatggggaaatcgcagaaacctttctgcgctcctttggatttgaagtggatttggtgaagaacggccaggaggcatttgatacctttgccgactcaccggagggaacctacagtatcattttaatggatattcagatgcctgtcatgaacgggtatgatgctgcccgtcagattcggtcttgtgaaaatagagacgcaaaatctatccctattctggcaatgagcgcgaatgcatttcaggaagacgtggcgtgttcactggacgccggtatgaatgaacatctgtccaagccaattgatatggagacattattcagtgtcattggcaagtatataaagtaaagcttaatgccgcagtgcgcatgcacttctctgctgtctctcaatcatgtacaatgggagtattccttaaaacaagcggaacatttggaatatggtataggcttgcttatattgatagaggaggagtgcgcatgaaaatcaaacagggaaaaggcagatacatcgcgcttgctctcggaaacattgctatcgttgcttttatattgattctttcaataagctatgtacaggacgtacagcgtgacaaggccgcaacagcaaaagaatcttttaccgcagcaatggaatccacagcccagctatcctatggttatatgagcagtctgcaaaatgagtgtgacagctgggcctcctatttggaaaatcatgaatattcgatggatgaagccattgaatatctgaaggaagttaatataaacgattatgtctctgtacatatattgtattatgatacattgtccgggttatccgcaggcttagaacagagtgtgaacaaagttgactattctcagctaacagatgcattttcctacatcctccctaaaatggtaaacggcacaaggggggaaggaaccatttacatatcatcggcatatatcaatcccatggacggggtcaatagtgtcagtttctgcagccttctgactatcagggacaaacatggcggccgtgcaaaggccatactcgtgaaaacaattcctgtggagattctgcatgcccaatggattttcccaggagcataccgtgaagcagaggtttctctgctggatatcaacggacagtatatcattcaatccgactccatgggaggtgatacattctggaccttcatcaaacaacacaacgacctgtcttacgttgacataggtgaataccagagttcctttcagaaaaaggaccactatctggttgagttgatggatcaggatggaaaaccggcctattacgtcagcgcacagatagaaaacacgccaaactgtacatttgtgggctatatccaatccgagaaactgtctgccatgggctatgactatgactggcagatgtctttatatatagttatgggatttatcttcctcctgctgcttgacggaagctatgtcctgcatataaacaaacggcttagaaggagtatcgaggaaacccaaaatgccaatatggcaaagacaaaattcctttcttccatgtcgcatgatatccggactcccatgaatgccattatcgggatgacagaaatagctaagaaacagattcataatcctgcacaggtacagtactgtctggacaagataaccttgtccggaaaacatcttcttactctggtcaacgatgtattggatatttcacaggttgaatcaggaaaaatggcattacacccggttgtgttctcccttcctgaatgctgcgcaaaccttattaatataataaaatcgcaaatccaggaaaaggaactgcaatttgacgtgcatgtgcgcaatttaaaatatgaatatctatatgcagatgagctccggatgaaccagatattcattaacctccttacaaatgccgtaaaatacacaaatccaggcggtaaaattatcgtggaatttgaagaggccctgcagccaggtgacaagggtaacgtggttttaacttataccgtgcaggacaccggtatcggtatgtccagcgattttatgagggatatgtaccagaccttcacccgtgcagtagattcccgtattgataaagtacatggctcaggcctggggcttgcgattaccaagcagatggttgagctcatgaatggcaccattaattgtgagagtgagcctggaaaaggtaccagattcatagtcgccctgccgcttccagccactgaaattacagatgatttaatgcttccgcctcttcatctattactggcggacaacgataaaacatcccttgatgcagcagaaaatatgctggtatccatgggagtggcggtcgatacggcagacaatggacatacggcgatcgaaatggcagaggcaaagcacaatgctggtgaagattaccccattatgattgtgagccttaaaatgccggatatgaatggaattgaaattgccggaacgattcgcgctaaggttggcgaggactctccaatcattcttatcagtgcgtatgattgggttgagatggaagatgctgccaaggcagccggaataaatggtttcattaataagcccatgtttaaatcaaccatctatgaaaagataaacgagtacctgcacttcactgaaaagaatgaaaaaacggctgaaagcagcgctgatgaattacagggattacatctcctggtcgcagaggataatgatctgaattgggaaattatccaggagctgctgaaatatagaggcatcacagcagtcagagcagttaatggacaggtttgtattgacattttaaagcatgcagaaccaggtacttttgatgcagttctgatggatattcagatgcccgtcatgaatggctatgaagcttctgcagctatacgtgcatttcccgacatgtatatacggaatattcctattattgccatgaccgcagatgccttcgctgaagatatccgagcctgcctggatactggaatgaatggccatatagccaaaccggttgacatgaaaaagctgtttaaggagctgagaaacgcaggacttaccaatgggaatgaaaggaaacgctgatgattatgaaaagggcattgaccattctgtcagtatcaattctggccgcggcctggctctgcggatgcggaaaaatcaggaaaacagaaagcagggacgcagacgtcttataccatgcctgctattcagaaccatacgtgacgttagacccaagtgcagagcagtcgaatggtatcaggatactgtataatgtatatgaaaccctgacgcattacgatgataagaccggagaagtcatacctaaacttgctgttgagtggtcatccaatgccgatgccactgaatgggttttcaaactgcgcaacgatgtccaatttcatgatggagaaaaaatgaatgcggaggccgtcaagaaatccattgaccggaccattgcccttaataaaggcgctgcttatatctgggacagtgtggattccatcgaggtgaccggggaatatgaagtgacctttcatctccgctacggtgcctcaatccccctcattgcgtcagcaggctatgccgcttatattatgagcccgaatgcggctgataaggataccgaatggtttaatgcaggaaatgacggaggaagcggaccttataccattgctacggtttcagcaagagcggttaccctctcctcctatgaaggctatcgcggcggctgggaggataatcagtataagaacgtctatatccaggagatttccgactcaggtacacggcgcagacttcttgaggccggcgaggcccatcttacttctgaattatcagcagaggatcttgcagcatttagcgagaacgatggagtcaccatcctgcccgctgattcgttcaccaatgtaatcctgatgctgaacacaaaaagctccccctgttctaatgcagattttcgaaaagcgctggcatatgctttcccatatgaagaagcggttcatgatattttacagggaaatgcggctcaatcctgcggtatgataccgaaaggcctttggggccatcaagataatttaacgcagtatcactgcgacctgaaaaaatcagcggagtaccttgaaaaatcaggattaacggatgctactgttacggttaccttcatagtaaatgatgccgtatatcgtgagattcttcaactgtataaagaaaaccttgcccaaataggtgttaccctgaaacttctcaacatggactgggatgcccagttagctcttgcaaagagtcccaatccggatgactgccaggatatattactaatgaaatggtggccggattacgcggatccggctggctggttctctccgctgctgatgagcagcggggattcagtgggctacaacttctgttatctggatgatgatatatttggtgaaaagaatcgcgacgccgtcaggctgacagcgaccaataaaaacgaggcggaaaaactttatattgagatgcaggaggaaattctggaccaatgttatatgatttttgcttataacacgcttcaatactatgctgtaaataatgcaatccacggtgtatacgaaaacccggcttatcagacatgtgtcagctattatgatattacaaaagactgaaaatgattggcacttatgcatatcagggtctcatggatttttaccagtaggcggatatagcgctttatcattcaaagtacactcgtttttatcgttaattcccgtattttgaaatttcctctatctgtatggaatcgtattctgccgccacttgtgcggcactcttccctctgcagagctgctggcttaagtcccgcacattttcccacacattgaaattcaggctgaaatcctgattaggaatctgtctgccttctgctatacaggcaataaatgaatttgtctgaggtatatcaggcgctgtggcattttttgaagaggatattcttccctggcttttggccagggaatcaagtgtttcagcctgccccagtgcttctacaatggcaatagccgagtctaaatgttttgactttggattgattgccattctctgatcagcccccacaacacagatagagccatttttaagcacaggtaaaggtgtcattgcgatttcaaacggatagccttctaacgctttgccgctgtagattgcgcaaataaaagcgcagtttccattggcaaaaaacgacttttcctcctctttttttggaagcgtgtcaagtgcccgctccggattcatatatcctttatcaatcatcatctgaagaaagtcaaagcctttttccatatattcactgattgccaccgtaccatttgacaatgcttccagcttttgattacaatcgtcactctggtaaacatcataaaggccggcgcacataaccggaactgtcaaggcaaaatccttgtttgctccatagggaagaattccattttctttcagtgtttcgcatacatcgagaaattcatccagattctccggcagcttcaaaccatactgtttcagcatatcaacattccatataaagccgaaaccagtataagataatggaatcgaaaatacctttccgttataggtactctgcgacagcgcatcatgggacaggttaccggtgaactccagagaggacatatcatatatgtaacctttctcatcaaactccaggacatcttctgcatgtatcgtgtataagtcatccgcatttcctgaagccaggcgcttcaaaagaagctcccggtatgataatccctccgctgcataataatccgcagagtcgctgtaaaccgctatattcgtatttccgtcttgattcagcactgctttgcagcgctcctctattgcctttgaaacctcaatattctctgtaaaggcggtaaccggtgtttcccggatgttatcgtctacatacagctccggaaccgactgctctgtattgcagccagtccccaaaatggcagctatcataagagtccccaataatcccctttttgtcctaatcttcttcattctgtctcccccagtcttaatttataaacttccggaccatactatatagcttatccagctccacaggttttcctatatgagcatccatacctgcatccttgcacctgcgtatatcttccttaaatacatccgctgtcatggcgatgattggaactatggaggcatccggccggcccgaattacggatttttttcgtagcctgcagcccatccatttccggcatatgtacatccatcagtatgatctggtaatatccctgactgctcttgagataggtgtctaaggcttctttgccattatggacacaatccacttcagccccgctgctgttcaaaatctcaaacatgatttccagattcagttcattgtcatccgccaccagaatcctgacaccttccagttttctgacgccttccagattttctgtttcctgaatctgctgttcttcgtattcctggtatccgccctggatgtattgcttcatctgttccaaaatgtcagctttaaaaatcggctttgtcagaaaaccgttaatccctgcctgaatcgcttcctcttttacattttcccaatcatacgcggacaacagaagaatcggcattccgctgcccagccgcgctctaatccgtctggcagtttccaccccatccatctccggcatcttccagtccacgatgacgatacagtaatcatcttccattacatgggcctgccatgctttttccactgcctccatcccattcataacccaatccgcgcggatacccgtctcctgcaggattaagctgatgctttcacacgcatcctgatcgtcatccacaatcagaacagaatagccggccagatccggtaattcctgcatctgcagttttggcagtttaagtggaagttccactgtaaaccgtgagcccatgtctttctcactttcaacatatatatcaccctccatcatgtccactatgctctttgtaatagcaagtcctaacccggtacccgttgcctggctcatcctgctgtcctccgcccgctcaaatggcgcgaatacgcgctccagaaattcaggagtcatgccgattccattgtcctcaaccacaaagcgcagccgtatggtgtctgcatcaacattcgtctctgtaatctgcatactgattgtgccgcccgcctgtgtatatttcatggcatttgacagaagattgagcagtattttctgcaggtggagcccatcgctgataaccgtgtcatgttccaaaatctgcgatttcagttcaaatgactgcttttttttatccatatccggtctgatgaatgaaatcaggttcgccatcatactgggtaaatgcacattttcttccttaaggctgattttcccgctctcgatcctggacatatcaagcacctcattaatcagctgcagcagatgaccggaagccgctgtaattttattcagacaggactctactttttccatattgtccaggctgttcagcgcgacattggtcattcctatgataccattcattggagttctgatatcatgcgacatggaagaaaaaaatgcggtcctggcctggttgctgttctgcgcctgcttgagggcatctgccagatgctcacgcatattatgttctttggttgtctcctgaaacacggcaagatactggccgtaatccgccggaatcatatggactgcaaaccagcgcttcacttcattggggccatcccccaccatggcttccctggtcacctgtttattcaatgttccgtccaggaaactgtttcccgcaggatcatccggcgccattccgctggcactaaataccagcttaggcctttcctgtacctgctttgcagtaattccaagaagcaccggcaggttgtcagacacaagctccaccttctgtgtagacggagtgtagagcagaaacacaaaatctatattggcggaaagatttcggaacagcttttccctgtactccctctgccttgcctcctccctcatagactgtcttccagttacaagattagcaatcgcaaccgcaccaatcagaagaaaagtaaacatagtataaagcataatgatgataggtgttgactcccgctgaaggactgcccgtggaatcatggtaatcagatagctcccttccggctcgtctaatggaagaaagccgagaagggatttctggttctcgtttattacgacaagggtaccgcttattccttcctgaatcacctcacaaagcgtattctgtacagccctgctgttcccctgcattgccagatagctgtaaatatccggctgttctgctgtacctctggattcgataatgtaatttccgttcttatccaccacataggcatacccctccccgttattaaaggtaaataaggttggaagattataatcattaataacccggtccgcataaattgcccctatctgtttttcatcctttctgacagggaactggtatgtaatctgaagccgtccgcttgcaccataataaggagccgacatcccgtcctttccactggaaagggccagatcgtcaaagggcagatcagttacatggactaaattcccatcactatctacaccttctccatccatggttatatatgtaaagtgaaaaaaatcagtggattttacatatcccagcaaagtctctccaactgcactctcctgctccgatgcgagcatatcggccagggtaaacaaaagctccctgtcgagactaattttattattcagtccctcgctgataaccttgctggaagtaagaagattctggtttgcgctgaggttcattctgccggtaatctgcacaagaaaaaatacagagattgataaagcagtcacacaaatcccagccggaactgccaacattgcaattgatttttttttcggctttgttttcatttttatctcccttaaatatctaaatactgctttataagcccaaaaagatatcgcaacactttgctaaataatgtgtttgcgataatcaatacgaagcagttccgacacagaggtatcgtttatatagttatcaaatagattgccttttaatcttggtacctcaaccatatattcaaaataattatatcaccacaaactatatgaatcaatcatttgattgtattttttccagtatttcataaaatactgaactgctgcttattccgattaccttataaaaatgtttgccacaacaagcttaacaaatttaaaaatgcccataattcccctctaaaaggaacatgagcatttaaaaactgcttatttgattgtttgatattcaccagatgggttcttactgcgtcccgatatcccctttcattatagcaaccctgctctcatgtctgacctaagaaacaatggtaaacccgtccttcccccgctgctttgtatcataaagggcgcggtcagcctgctggtataaatcctcaaacgttgccccgtccctggggtatagggcaataccgatgctggccgtgacactgcatcttatgtctccccttccaattaccgtatggagggcggaggagagaatctttactttttcttctacacattccgtatccgatacctgaataaacgccgcgaattcatcgccgccaatcctgccaaggatatccccttccctgaaatgactcttaaggatatctgaaaaactgcagatgcagaaatctccaaaagaatggccgtacctgtcatttaccatcttgaattcatcaatatcaaaaataaaaaacgcatacattttgtccggactctcagacagctgtttatcaatcagacgctcggttgcctttttggaaagaagctttgtcatttcatcaatagcagcctgccactcccgtttcttttccgcatctatgtttctccggtaagagaacatgtggacggaactgtcttcttccgaataaaacaggaaggtttctacacgaatccaatgataatcctcaccgttctgcgaaatcataaagtcatactgaagatggttatttccggcgttatactcccggatggcattttccggggtaaacatggaaacatagccttcccggaactcctctttaatttgttcccgggcaatgacacacaatccctggtcaaagggaagccctccggctcccagactcttaaagtattcctctgtctgtttccccacatagctgttctttgtcagattcaattcgtaaatactgtcgtaaagctgttccgtggcctttttaaaaagagcctgccgctcctcaaccagctccgtcacctggctgctgtacttccggattacagcagtaatgacaatcagaacagtgagaattaccacagtcagtataaaaccagtctgataaagctggcggttcatggcctccacaatgggtccggtattctgttccacaagcagataccaggagagctccggaatataccgctccacaataaagcttctctttccttcctttggacctgtatcagtccagaattccatactgttatccgactcccggaaatcaagtacctgttcccgtatatgttcctggccatatactccaaaccagtccttcttttcatatccattataggtggtggatatctctataaaaccatcctggttaatcaggctggcctgattgccatagctgtcttcatattcctgcagcagctcttccagataatctatctgaattcccactcccacgatgccaatcaccgccccgtccggcgcagtaaccttgcaattcacaaagacagttatcctgttatccgctccctctacctggtcattatccacgttaagggaatactccaaatcattgccaagaagttcataataccattcgttttccggatcccctttttccattacacggtcaaggccattaaaattatagtagcggccggaatttgcggatatcaggaacacggaatcaaagccatatttcttctggtatgtctccagatacgtttttgtagtctccgcaaaatccaaagcatccatacggctgttttctgcaagaagatggtccaccaaaaggctgtcatgagacattgtcagcgaaatgttcaccggctttgtaagcattgccttcagctggtaataaattccctccgctgtcagggaggatacttgttctatgttctctaatgatgcacggtaattggcgcggtagctgaaaaacgctgtaaggataaatcctaccaccagtatactgctgactaacaggttcgtctgaaacaacttattgtttttcattcgatacctcctctattctctgtgcgaaacaactcttactatctattttaagacggattcagcctctcctggcgcgctgccacggctttactgttaacgtctacgggtctgcctgatacagaacattatacacccgcgtctaccctatttccagtttcttttatttcacttatatgctgactgaacagactctttcttttccgttccccgcttctcctttaaatttttgtaataaattacaaaataatattatttatctctcgtatattgaaataaaatgcatagtttgatacaattgagctattgatatcattgcaaacccgctgtatggttagcacaatgaatccggaaaggcagcaatagctgttgtaggcaccccatatgaagcggttttttagaggcggactgatctccctgtttattttacttttcctgttcggcagtattaccattcaaacggtaatccaaacccagacaaacggaaggctcatcaactatgtaggaattgtccgcggtgccagccagcggctcataaagttagaactttccggccagcccgatgacgatatgattgcctatctggacagcattcttctggaattacagggcggagaggccacatatggtcttccttcacctgacgatccggcctatcagagggatttggcaaagctggagctgatgtggagtcaggtcaaggacgaaatctctgcctaccgcagcgggtccgctgacagttccagactgctttccctcagcgaggacttttttgaacaggccaatcataccgtgttttccgccgatgcctactcagcccggcagatgcgttttcttctgaccggctgtctggtcatgatgggagtcatgtcactcacctggatatttatattgtgggccaactctaaaaatctattgaagcttgaagtccagaatgaacagctgaatgatctggcatcccgcgacactcttaccggggtttacctgtttagcgctttcaaggaaaaagcccagcagcttctggacaccaggccggaaaagtttgctgttgtctatactgatttctctgacttcaagtatattaatgatgtgttcggctatgattacggcgaccttctgctgtcccaatacggaaaactcctgctaaaggggctgcatgaatatgaattatgcggccgtgtatcagcagataactttgtactgcttctccattacaacgaaaaaagcgagatagcggcccgccaggctgacgcggattatgaaattctccgcttcatgcatacggcccatgacggccagatgctccccacaaactgcggtatctgctgcatagaggatgtcatagagtcactgaccatcgacggtcttctggaccgggccaattttgccagaaaaacagttaaaacaggaaacaagcagaattatgtttattatgatgagagtatccgcagccacctcagagaagaaaaagacatagaaaacagaatgctgactgcccttgaaaacagagagttcacggtctattaccagccaaaggtcaaccttgcaacaggaaaaatcggctgtgcagaggctttggtccgctggcagtcccaggccggcgccatcattcctccggaccgcttcatccctgtattcgagagaaaatatatgattgaccgccttgaccagtatgtatacgaggaggtctgccgttggctccggagtctgcttgactcgggtagaaccccccttcccgtgtcggtcaatgtatcccggcttcaattctatgatcagcactttgttgaccgttatgtgagtatacgcgaccagtatgccataccgcctgagcttcttgaagtggaatttacggaatccattgcatttgacaacactgccctgctgctgcagacagtagcccggcttaaaaaggcaggcttctcctgctcaattgatgattttggaaaaggttattcttctctggggctgctgaaaaatctgcctattgatgtactgaaaattgacagcctgttctttgatgaaggaccggaccagaacaaggatatggcactggttgagggtattattgatatggtgaaaaaatttgacatccgcacagtggcagaaggaatcgagtccatggaccaggtcgaatatctgaagcagattggctgtgactatgtacagggctatgttttctaccgccccatgccccagtctgactatgaaacactgattatacagggatgctgagcaaataagctacatttttatatatgcgctgccaccatgaaacagagaggataagatgatgttttggaaaaaccgtcatcttatcctctctgcgtattacagtgcctgcggccctgtccggctctccccgcccggcccggtgaaaagacggctccctgtattcccctttctgtacttcccaggcggcatttcatacagcttcctgaacatcctgttaaaatgctccacattctcaaatcccacccggctgcttatctccgctatgctgatatttgtatttttcaaaaggatggcagctttctgaaatcggatttcctgtacaatctgtgtaaatgatttaccggtgtattcctttatgattttggaacaatagggctgggaaaaatgaaactgcgcagcggtttgctttaaggtgacactctggtagttgtcctcaatatagcttaagattcttatgctctcctctgtggccctgcgcataacggaaggcagctgaatacgatcttcgtagctttgaagtattttggcaaacagtatcatcagctgattgctgagtatcttttcatagtaccggctctttcccaggtattccagaaacatggaaagaacatattccttaagcacctggtcacccctggccggaataatcagatagggattatggactcctgaatacagggactggttaaaaaaggttgctatcatgtttgtgtcccttagcatattaaaaaatatatcctcaaaggtactccgccttaccagtatgttcaccagcaggctgtcgtcaaatacgctcacgctgtgtatggtatccggcgccaaaaggcaaaagtccccttcctccatctcaatcctgtctttccccacatcctggctgcagtgtccctttaccacataggccagctcgaaaaatatatggcggtgccggaaagggggtgtgaaacggttgtgcttgctaatcacaatatggttcttatcctccgcgtcaaaataggcttcatccttcatgtcagaaggcatccagccccctgatacctccggcacgatcaaacggcgctgtatgacttcattaaaatccagactttccaagaaatcctccagcatccatttatcctgcttcacattataatactgctgataaaaccgctcatcctcgttaaattccatcagctggttctctaattctccggtagtcatggtttttccctcccatctctgttatgattgtaacagacaggttataaaacatcaatttatttgattataaaactcaatcgttttttattgccttatcccttacaataacagcatcaaatacaaggaggggttattgaatgaaacaagattcaaccatgaggtacgtgaagcagcagatatggaaacaaagaattggctatggggtttctgactttgcatgcaatctgatttggcagatgatttccctgtatctcttatatttttacacggatgtcatgtccctgagcgcgaagtccatcgcttttatgtttgttgtcacgcgatttatagacggagggacggatttactgattggctattgcattgaccatacccgtacacggtgggggaagtccaggccttattttctcttcggagccataccatttgcattgtttgccgtcctagccttcagtgtacccgacatttcccagtcaggcaagcttatctatgcctatgcgacttacatcggtctgtcttttacctacactgttgtgaacattcctatggcttccatcctgccaagcctgacaaccgatacccaggaacggacagccctgtccaccacgcgcaagttcttcgcctttctgggctccacagtggtcagctccacggccttaaagctggtggattccctgggcaaaggcagcgaagctctgggctttcgtatcgtaatgataatctttggtttcattggatgcctgctattcttctttacctttgccactgtaaaagaacgggtaaatacggccgctgagagcgtttccctgaaagaaagccttatgtccctgggaaaaaacaagccctggcttatctttgccctcaacattattttcatgtggaccggcttttttctccagaccagtgcaattgtttactactatacagctgtcataggaagcaaggagctgtcagttaccattgccaccatcatgtccattgtgcccatggcagccaatttcctggtgcccgcactggccggacgcatgggaaaacgcaacctgtatgtgggcagtgctgccatacagctggccgggctggttgtcatcctctttgcaggtataaaccatggggctatactggccggagcagtggtaaccgctctgggatacggcatgaaggaaagcatctatttttccatgcaggcagacccggtggactacggtgaatggaagaccggcgtcaacacagccggttcactgtccgccatcaacggcttcctgggaaaggtggcccaggcggccgccggcggtatcagcggagtccttctggcatggggtgcttaccagggcggtgcttcggcacagagttccaatgcagtactggcaatcaaagccatgtacctgtatattcccatgcttcttcttatatgctccatcgtcactatgctgttttacaatctggataagatttatctccaaattaaggctgtactggattcccgaaacgaataaggagatataacaatggcgcagattacaaatcatattgaaaactttaaaatgaatataaatgaggatttcgtaagaaaagcccaggaactggagccagctcttcactacaaaacagtccggcccgcgcagctcgtctcattccagccttctgatgccccagacaagcccaatggctgggacctcccggtccataacagggcagaccgggtctttgactggattccctgctgtatgcagcccgtggaagcactggataccatgcctctgtcaaagggcagttccgtgtgcctggatttcggcacccaccatgtgggttatatatccttccgcctgacgcctgcaggcagtccgcctgacgctccggcccatatacggattaagctgggggaaatgccctgtgaaattatggaggacaccgcatcctaccagggctccatcagcagcagctggatccaggaggaataccttcatattgatgagctgccggccagaatctctctgcccaggcggtacgctttccgctacctggaactgaaggtcatggacacctcccccaaataccaggtgctgctaagtgatgtatcctgtgataccgtcacttccggcgacatgtcccaggtagagcccctgaatgaaaatgtgccggaagacctgaaacgaatcgacgccatagcccttaagacaatggaggactgcatgcagtctgtgtttgaggatggccccaaacgcgaccggcgcctatggattggagacttaaggctccaggctctgaccaattacgaaacatttaagaactatgatctggtaaagcggtgcctgtacctgtttgccggacttacccaaaacgaacatcatgtaggcgcctgcctgttcctgcggccggccccgatggtagatgatacttccctgtttgactatggcctgttctttatttcctgtctccatgactattatcaggccaccggagaccgggaaaccctgatgcagctgtggcctgctgcttaccaccaggctgagcttgcgctaaaacgtctggatggcagaggcgtggtaaaagacagcggcgactggtggtgcttcctggattggaatgacagtctgaacaaacaggccggcgcacagggcgtcctgatttacaccctgaggcaggccctttctttagcccggcttatgtgcagtgagacatcaggggcagaatccgtcaaacagttggagagctggatagaaaccgctgtccgcggagccctggaatatctgtgggataaggaactgcggttcttcataagcggacagaaccgccaggtgtcctgggcctctcagatatggctggtcctggcgggtgtgctggaccaggagtcaaaccgcagactgctggaacatcttgtaaaggaggacccgcctgtgggaatggttaccccctacatgtaccatcattttatagaagccctgatacaaaacggcatgaaggacactgcactccactacatccgcttttattggggacagatggcggacctgggcgcggactgtttctgggaactctttaatcccagggacaggtatgcctccccctatggctccagaatcattaacagctattgccatgcatggagctgcacaccctcctattttatacggaaatatttcaactgaatcagggcgggtttcatctgactggtatatgccatccgttgcaggacccgcgcactccgcatatgacagaaattcattgtttttataatataattgaattagaatgatataaaacaagacagaaactttgaaggaatatcataaaaggagcgaatatggagattcaactgaagaaaaacagtacaacaccgctgtacaaacagatccggaacacaatccgcagtcagatactctccggccagctctccgacggctttaagctgccctcggagcgccagctggtggaaaagctgggtgtccaccgcaatactgttaaaaaggcgtatgagatgctcattcatgagggattagtctatgcctccgtcaaggcacccaggggatattttgtgagaaacagcccttccgaggtaaaacccgacggcaaaccggatacaaggaaagcattttcttctctggacaagaattttaattaccattttctagggacgcaaaatacgttccagcgtctgtataattcctcatacctctccgatagcatttcctttgccggcgttctggtaaataaagaaacacttccattgccttatctgcatgagattatggatgaaattacttccggtgatgacttagagccattctggttctgcgatccccagggaacggagcgtatgagagcatgcctggcatccctgctctttgggaggaagatttacgtacagccccagaatatccaaatcataaccgagacttacgaggccctgagcaatatcgccttcatgtatctgaaggaaggtgattttgcaattgtggaggaaccggtcatgcctgccattgtcaacatccttctgcatacaggagcccatgtgctctttgttcccgtggaaaaagacggtatccagatcgaaatactggaaaacctggttgaacgctatcgccccaagttaatctattccatgccaaacttccacaacccctctgcagccgtaatgagcctggaaaaaaggaaacggcttcttcagtgcgccctatcacacaacatccccatagtggaagatgactccctgttcgactttaactacagcggcattacacttccaagcctgtactccatggatcgcaccaactcggtcatttatatagattcctttaatctgtcctttttccccggcgcccgggtgggctatatcgtggctcctgataatgtgatcaagacctaccggcgtattgtgaataaggatcagatgtttctcaacagcttaagccagtatatgtgggcccgtttttttgaaaagggatactatgaaaagcacagacagtttctgattgacttttacagaaaaaaacgcgatctgatgtgcagcgccctctcctgtattcccggtttgtctttctctgtcccggacggcggtcttgttatctggatccgcctgcctgaatatacaaatgaccggcagattgccgcggcggcagagcggacaggactgcttctcatgccgggaaataccttttttgccgagggcagccatggagagtcttatatccgggtctcctattcctctgtcacggacgaagaaatcgcagaggggtgccggcgcatggcagaggtcctgaattcctgccggatctaacaaaatagtgtaccaatattcatattggtacacatatcaaaatcattatggtactttactcctgaccgtcttagtaataaaatacaaaatcataggacgcgcgtatccgtaaatgcagcatattttacttttatcggaaatcaggaggaaaaccgaatggaagaattatacaagaaaacgctggaccggctgaaggccgagcttaagaaacaactgccggagatagaggcaaatggtgactggctctggcatcacccggaggcaggatttaaagaaacagaaacccagaaatactgtctggaggttctgaaaaaccatggctttgaggcctgtacctggccggatgtaacaggttttacctgtacctatgacaccggaaggcccggcccctgtgtgatgatcatgggagagatggattcacttatctgctattcccatccggactgcaatcctgaaacaggtgcagcccatgcctgcggccattccatccaggtggccacagccatgggggcgttcatcactctcacagagagcggcgtattagagaatttcggcggaaaggtcatgttagccggtgttcctgcggaggaatgcctggagatagagtggagaacccgggaaatccaaaaggggcggctccattacctttgcggcaaagcggaactgctgtaccggggcgcatttgacggcgtggacattgtcatctccatgcacgccggtctgggaaatgacggcacaatcaccatccttggctcccacaacggcttcatctccaaaaatgtcacattccagggacgatccgcccacgcggcagcggatccggaaaacgggatcaacgccctgtacatggcaaacacggctctgactgctctcaattccttaagagaaacctttaaggacagcgatactgtgcgtgttcatccaatcatcaccaaaggcggtacggttgtaaatgccattcctgaggaagtatgcgtagaatgtctgtgccgtgccggaaagacggaaacggttctggatgtttcaaagaaatttgaccaggccatgggggcaggcgcttacgccttcggcgggaaggccctggttcgcacacagcctggttacctgccctaccgccccctgccggagcttgaccaggcagcggttcagacagcagacgatatcctgggcaaaggccgcgtaaacaaaggcggacataactgcggttctacggatcttggcgacttaaacgaggtcattcccggaattcaggtatttgtcaactatatgtatggggaccatcacggggcggattacaggattgcggaccggaaaatatatgaaaccgcatctttatttctggctgccatggcctgccgcctgctggatgacgggggcgccctggccaaaaaagtgaaggcggcccataagcccctgttcgccagcgccgaagactactgtgcttatgtaaagtcccttgaaaccgagcaaattttaccataatggacaaacgaggtgaacatatggaaactgcatccttaaaaaagaatctgccgcttttaatcacgctgacattgtccggttcctttatctgctctcttccctggttccgttcatactattataatccctttatggaaaccttcggcatgaccaatacccagatgggcctgtgcggtacggccctcggcgtaggcggaatcgccgcatacctgttcggcggaattatctgcgactacatatccatcaaaaaactgattcccgcagccatgatatcaacaggtgccctgggacttgtgatgctgaccattccttctcccatcattatggtaatcattcacggtctgtttgccatcacctgcctgatgctctttttcccggctcagacaaaggcggtgcgtaatctggcatctgtcaatgagcagggaaaggccttcggtatctttgaaggaggacgcggtatctcaaacgccgtatatctggcaatcgctgctttgattttcggccagatgacgattataaaaagcgaatcctttggcgtacgcggaatcattctgttctattctgttatgaccattctcctgggtgtgattgatattgtcctgctgaagggaattgacgatggcaaaaaaggtgacaccaatgatactgtaaacttaaaaatgcttacaaagcccctcaaaatgcctgcagtctggctgatgattggcatcatcttcgcgacattaaccatcagcaccggttactactatatttcaccttatgtaaccgaggtgttcggtgtcagcgcgcttcttggcgctgttctgtcctcttcctcacagtacatacgtcccattgcctccttcggggcaggcgtgctgggcgacagaatcaacaattccaaggtcatgctcattggacagattggactcgctattgctctggttattatcctggccgttccgtcctccatgggagtccttcccattctggtggcctgcctgatgattttcttctgcatgtatatgtgcgtaaccatgcattttgccattatggatgaggaatatttcccgcctgaatgcgtgggaaccgctatcggcctgatatgtgccattggctatctgccggaggccacatcaccctttgtagctggtgtgattctggatcattttccaggtgccgccggataccgcctgttctttgtctacctttttgccgttactgttttcggactggtactgactgttatctggctgcgcagaacaaaagccagacgggcggagattctggaaaagctgaaaaaataggccggacggcccagagaaggggggcaataactatgcgaaagaaactgtctgatatgacaaaacaatactcttcattttttctatgtgttatcctgtgctgcctggccgcagaattcattggtcccattaagctctccttagggaggtttaccgttacctttctgccgctgttatacgccatgcttcttatgctggtcctgtatctggcaaaaccggtccggggagtggggaaagcttatgttccggctgcttccaggatgctgtccatgggggttgtgttcgccatggcaaagctgggcatttccagcggcgcttccataaaggagatgatttccgccagtccaatcctgattttacagaacatcggaaacattggaaccgtgctttttgcccttcccattgccctgatattaggcatgaaacgggaagccgtgggcatgtgctatgcgctcagccgcgagccgaatgttgctctgattgccgatatgtacggcagtgaatccgatgaatttaagggcgttatggtctgctacatcgtgggaaccgtattcggcagcatttttatgagtgttatccctccgctttttgtcacccttggaatcttccgccctgaagccgccgccatggctgtgggggcagaaagttcctccatgatggcggcaggactggcaggtgtgatagaagcatcccctgccagcaatcccgacacgctgacagcctttgcaaccatcagcaatgttatctcatctgcaatcacagtctaccttgggatctttataaccatcccactgagcaacctgatttataaggtcatgaaaagaaaaggggtaccgtcatgagcgaaaaagtatcttttaaaagtctctgcgtggaatgggtaatttcactgactgtaatggtggttctgaccatggcctgtaatatcgtggggtatgggggacggtttctggaatccattcccggaatgctgattctgtgcgtaatcagcttccttggactgacggcaaaacacttcatccccagcagcctgccggctgtaacctatatcggaattatcggaatgctggccgccgtccctgcttctcccgtatccgctcccattctctactggaccggtaaaattgatttaatggcttccatcacccccattctggcctttgccggcgtgctgttaggcaaggactggaaagcattcctgtccattggctggaagggcgttctggtgtcgctgctagtgatcttcgggactttctttacatcagggctgatagcgcagttcatgggagccgggacagtctgacgcacacgggccgccggagtatgcccctaagcccgctgaaataaacagatgaccgccagctgaatcaaaaagaaaaccaacaggatcatactgtatctgtcaactgcaaagggcataaggctgataccgttttcctcggtacgcccctgctccttcaaacaggccatatggccgcggattgtataacgccgggcctgttctcctgccggctctccaaacaggcagctgaatacataccctgccagaaaggtcatcaccgtgccaaaggcagaattccacatccaggtaaatccggccaatgttccaaacagcaatgtgataatgaaaccaactacagcaccgcataccgttcctttgtcattggcctttttcgtgagcatggctaaaagaaatataccgcaggtagggccgcttatataggatatatagctgccgataaccgccaaaatagattttgaagtaccggaaaaggccagcatggtgatgatatataccaggattccccagacggccgataccatcatggaggtctttaaggaggcctccttttctttttctatatatctctcatatatatccttggtgaataccgtggacatggaattcagcagggaatccacactggacatggctgcagcaaacaaacttgccagcagcagccccaccagtcctgcgggcagaccgccgatgaaacggatcatcacatcattggcattttcaaaggcagccccgccaaactgtataaataacagcgctcccagaaaaatgaacaggaaatagaggacattcatcatgataccgctcaccacaaacgaacgctttaattcccgtatggatttggccgtaaacatcctttgaacctgggcctggtcaaaggaaaaataccgtgaccacataaacagtccccctaccaatgccgcccaaaatccgttctcattggtcagggagaactgccagctggcgtcaaacgccctcagcttccctgcctgtgcagccatgcggacggtttcaaaaaatccgatatcactctttgagaacaggaaaaccattccgcctatcaggccgccccatattaccaatatctggatagcatccgtccagataacagccttgattccgccggccattgtgtaaaccaccgcaatcaccacaatgaccggtattatgatgtttatactgacacccataaaacgctgcaggaccagggaagggacaaaaaccatggagctgacctgaatcagggagttgaggatgaagcccagcactgccgccatccgtgttttaggacccagccggagttcaatgtactcatatacggatgtcagtttcagatcgtacagcatgggcacaaatatagtagtgctgatgaataatgccaatggcactgtcatgttctgcatgaacggaagcagtccgctgtgatacccccatcctgggcctcccacaaagctgttgcagctaatcatggtggcggcaatggacagtccgattggcagccatggcaatgaacgctttgcaacaaaataatcttcctgggttttgttggtcttgcccatgataaatcctaacacaagcattcccataagataaatgaaaatgattgcagcatctatgattgtaaatgtcattgtcatgcctgcctttctattaaaatttttgtttggtccggttccgtattacggctgagccggcttacaatcagtcgtggttcagaatctgacgtgtcctctcaaaaatatccagtccctgctgtttcagccagtacgggaggtcgattaaaacccagttttcagaaagcttgtctcccctgcggcagtaaacatccaccacctgcatatctcctcttcctcctccgggtaagcccaaaaatcctccgatgggtgtattggtcaggttgggccagccgaagaagcatgcaaagttgccttccgcaaaccggcatacatgcccgttaaaggttttgtcctttaaatgattgcggaacggaagctggtgctgttcctggtagcgcggaatggtataggaagctccgattccccccggaccataccaaatcatatccgatgcccaggccttttccaaaacctcagggggacagcccatggccccgctcttattcagctcgtccaggtcgtctaccattttattcaccagtgcaagtgtttttatcccttcctcttcaggagcgtcttccaacagaattccatcatgatacctggggccggggtagataaaataatttccagtggaaggcggaagtggattttcgccggcctggatcatgagtccgattaaatccacgaacataccgctcttgcatatcttgccattctctacacagctgaattccgcataacggaggctggccattttcctggtatggcgaatccccagaaaatcctggtcgaatagacccatcagatgtcccatgctcataacccattcctcaccgctgatttcatttgtaccagcgataaagatgtcctgtctcctctgcatatggcggagagccttttttaaaggtatccagaatgactccgccacagcctccctgccgttttgctcacggaacgggtatacccccttccaattatagtcctcggtcatatattcccggaaaacctggagcacctgttccggttcagccttttccagtgcgtcaaaatatgacaatgctaccttttttgcttcctgatattgtcccatcttacaacctcctgtgtgttattcattatctgctgctttttcgtttttctgataagtttccggcaggaacatccatatgaccgcgcctgccacaaatactgccatggataccatgaagatcccctgcatccccgcagccgcggatcccaggcctgcaattgcaggaatggcaaaggtggatatgattcttcccccgttaaatgagattccggaggacagggcgctgaatttctgcgggaacaactccgtataataggcgccccaggcaccggaaaagccgaccgcaaaccccaaaaataccgataccagcttgagctgggtaatattcccggcccccagcctcataaagaggaatacaaacacagcgctgagcgccatgccaatcagaggttttttccgcccgaacctgtctgaaatgaatccccatatgttgtaaccgattaattgccctattccctgaaggctgtaaatgcctcctgcaactgccgcgctcagccccagggagtttctaagatatgtagtggcattgttggaaaatgccgagtaggccgtaaagttagcgccggagagcaggatgacccccagtccaatccacagatactttcccttatacatatttaaatagctgattttctcattctgctgtttggatacttcatttaactgcctggtattctggtaatcgttgggtacaaacaggaaaatcatgactgcccccaccgccggaggtatgatggctgtatacatcagcacctgccagttggagtcccccataaatgagtagagctgacccccgaaaatcatggccagggaaaagagactggtcagaaccgcagccagcttgccgcggtatttctgcggaaacagttccgtcaccagaggcatggcgcagccgaatactcctcccagggtaccgcctgtaatcagcctggacaccagccatacctgatagctgccgggtgtcatcatgggcaggaatgtggtcagcgcaatcagtgacgccaccacaatcaatgtatacttttttcctatctttgcattcagtatgccgaatacaatggttccgggaatggttccgaaggacataaccgcaaatatggtttccgactgctgtaacgtaaaaccgaaccctcctgaagctgcctctgcaatcatggtgggctttacaaaggttcccaccataaaattgtaacaataaaaaaagtatacaatgacaatggacaagaatgcaagactcctgcggccagccgacagattctttcccaatattatctcgttttctgcttcagacgtatttagtgcgattgcagacatttatctctctccctccgtcatgttatcttctgtttttgcatagctgtcctctgtttccatataaatctgtttcagtacatccaggccgtcaaatgtaacccattcttcctgaatctgatttcccgcaatacggtaatgattaattcctaatatatccaccggcttcatggacggcgccccaaacatgccgcggccttcatgcagtccgcgcagcctccatctgacagccacatcccattcatcatccccggcccgcctgttgcaggtaacacggtccacgctgtgatgcgcattggggaaggatgccaggagactgatgaccattccctgaatctcctcatatcccaccaggtcttttccgcatatatagtggaccactgcatccggcgcataataggccttaacctggttaatcatcttatagttaaacacctggctgtgcatttccagcatcatttctccgacgctgtcatcagcggccttatatttctcagggaaaaactgcccctgcatggattcgcccagtccaaacctggactgcagagcaggagtcttcccctttgcccctctggccatattcctggcaacctcatggacatccaatcccagctgctttaccagccacagattgtcccttaccagccattcctcgtaaatacggttgttctcaatggcgcagtcaatgacagtgcggaagttaacctttttccctgtggcctttccaaaatcactgtccccaagattagtggccgtggacaggaccctgtgggaggaaagatatccctttgtatcatgctttgaccagataacctgttcccctatcagacggcggtccggaaatgaatgcagggtcatcagcgtatttgcaaccacatccttgattcccaccagattagaggaagcacaatgcatggtcacatcgttatggtacgtgtcataaatgaccccgattcccttttcttcccatattctgtgggttatcttaagcacatagtccacaatgtcgcggtattcctcatcaaaccccggcagctgctgctttgagccagccagttccagatagtcattgtaatccgcgtgtctgaccgggttcacctcctccgtctcaccgtagtaaattttaccgctgccttttggcttttccttcattttcgttcccttctcctctccttttttcatatctgtcttacccggaatcaccgggtccggaatacctgttttttcatatgtacccggttccttttcctgcataatcataacgtcctccttcttttttcaaacgtttgaaattttggattaaaacaaagccttttacaaggctaagtgtgaacacatagaaaccataaaacatcctattttacaggaccggcctgtgccgcgtcccgtacggatccccgtgtgattaaacgcggataaattttccgcggattcagatcttcccttccctcaatgcggcagacaagggaattaaccgcattggtaatcacttcttccctgggatctgcaatggtgtccagcggaatgtccagataatgaatcagttcaatatcattatatcccacgattgacaggtcctccggaacatccatcccatagtacttctttaactgctgtacaatggacaaggccggaaggtcctgctgggaaaagatacccgtaaatttgcgtatatattcaatattctgtcttacaaactccttctgggattcaaaatccatgcgggctgtcaataccgccggctctgcgccgtattccgccatggcttccatgtatccggccgtgcggtcatcatacatcttcagttccgggtcattggaacggatggtcaggattttcctgtgtccatgctccagaaggtgctttgtggcccagtatccccctttcctgttgtcatcccaaaagaaatgatccggtatatctgcggaaaaggaaggtttaaaatatacatatacatatggaatgccggcatcactcaggaatttatactcggcctctgtcagggttttggaaaaaataacaaggccgtccaccatcttcccattgaccattctgagtatattactctgggaatgtatgtttttgttgggctgtatcaaaaaatcatatccgcagttttcaactgctctggtagagtaggtctcaatctcattgaaaaaccagcggtaatcaggcgcattaaagttatctgaaaatacaatgccgatacggtttgtttttttggtcaccagactgcgggcattggcattaaaggtaaatcccaggcgctccgcctcttctatgacacgtttttttgttttctccgcgaccctggggtcgttattcaaggacaaagagacagtggaatagctgacatttaaatttttagcaatatctttgatggtcatacaggtctctctccttctggatttcttactgaaagtataatttaaaacgtttgaaatatcaatagacagttctaccttaactatattttgtactttttccacaaactgtattgtgtgttttatacaatctatcctgttttttatttttcttttccacagacacgctatgtttcccgaaaaggatacacttcacagatacttctgcacctcctcacaggccgccacatgtacaaggcagtcccggtacctgtgccggagattgtggataccggatccttccttctttgcaaggggtgccgctgcattatatcctgacaaactcagttcggcaatatacgttttttagtgaaaacgcttggtcagcagcatattccgatacctatatatcaatccggtatatacgggtgggccttccctttgtccctgtggatttcatccctgtctgtaccgcatatcctgccgtagtcagcctctctatgatatggtttgtatggcggatctttacattgagacgctcggcaagctcggccgccgtaatttcgttattcccgcggatcccaaggatggtcttgattttgcggaccgtccccggagcaagcattgccttcccggcaatttccatcaaatcctcgtcaaggggcacctgtttaagcggctctgtctcgggcatgagcggacccacaagagaatcctccaccacagcataaaccgctttgcggtaaacgccctcgcggagcgcctcaagggcactgctttttgccgtggacagctccggcgcaaccccataagcaacataggtacaaaagcgcagccgcttctgcaggtagtgactcaacccgcaatgcctgaaattaccggtcatacggctgacggttttcaggttcgtaaaaaggaacaggccgtttgtggtcttctgtatctggaaatcagcaagggtctccttcttatagtccagaaccgcctgctggagcagaagctcttcctcctcgtctgcttccaccagccctttcacggattccctggccaccaccaccgcggccgccatataatctgcgcttttttgggcagtaatctgcctgaggagcccgtgaaccgtgcggagcagctgcttctctgacggatacaggaaggtatggggaatgccgcaggccgccagctttggctggactgaggaattcctggatatcacatacgttatctcccctgcctcccagcgtctcttaatctgggcaaaaagcctgtcccccagtccctcaatctccttaagggagatatttttccaataatccatggttttctgtcttgctgcatccatatccttaatatcaagcaaggccctgcagttgtgcttctcattcacctgcagatagatatccaccaccaccttagtgaggtcaaggcttctgtccctgtccaaaaggtccagaagcgcatggtatatctcttcaagctcagtatcgaacgcagccaccggcttgtcatcctccgggaaataacgctgtatggctgtctgcaccacaagtccgctcaaaagaaatccgtcatacttgtccctgagcttggggtaaagctcagggagcatggagagatgcccgtaatcatagagatcaagctttactcccgctgcctggcctgtggactcaagcttgtctgagagatatggaatcaggccaggggctgccaaaatcgcaagtttcatcatgtttaatcaccacgcagttcctttcaaatgattctgtccatttttttatagcatacggccaggcaaatagcaagcaaaaaagccaggtacatgaatcccctgactcttctttgacgaaacaggacttgccgttcaccctgatatggctggattcacctctctttccaacagccgcagggccagcctggtctgcatttcaacccccagcttgagacaggtttcatccatatcaaagtcctggctgtgaaggggcgccgtgatctttttccttctgctggcgcagcccagatgataaaagacacccttggccttgtccaggaaaaatgaaaagtcctccacccccatgctgggacacttcttccagtggatatgttcctctccaatgatgtcagaagctgtttccaccagcacatccaccacctgatccgtgttgataagggcggcatatcccggggtcaccgtgacttcgccgtttcctcccattgcctggcaggtgcactttaccatgcgggtcatggtgtcaatgatattctgcctcaccatccggtctgtggttctaagggtgccggtcatctccacttcccctgcaacaatgttgccggcagtcccgccgcatatggtccctattgtgagcaccccattgtccagcggggaaatacagcggctcaccagaacctgcaggctgtttatgacagcagcagccatgacaatggcatccactcctgtatccggataagccccatgacagctttttccacgaagttttatgtgtatatggtcagaagaggcatttaaatcaccgtagcggatttcaatttcgcctgactcatgggttggcatcacatgcaggcctatgacataatccacatgaggttcttccatacagccagcctccaccatgggaagtgcgcctcctgtagtctcctctgcgggctggaaaaagaacttcacacacccggaccactctgccttacattccctcaggatgcgggccgcacccagagctatggacacatgggcatcatggccgcaggcatgcataaagccgggattcatggagccgtacgggcaggccggattctccgtcagcggcagggcatccatgtcagcccgcagggccaccgtgtttcccctgcccggtctgctgccctgaatcatggcttcaatccccgtgcctgctacaggatattcgtaggaaatcccccatccgtccagcagttcgcggatacgggcactggtccatttttcttcaaacccaggttcaggatggcggtggaaatccctgcggatctccaccagctccgggtatatttcttctatacgctgttttatatccatacaatcaacctttcaaaggacatccaccatcaatttccggccatctcataaagagtctcttctgcctgccggatacagtccgataccgttcctgccgctgcattttccagcagccaatccattgccgccttagtataagcagccgcgccccggtaaagataggcatcattaaactgtaccttgggattatgacatccccacttgcgtccctggcggctgtccccaaggaatatccagccaaagccggaaggaaccttttcggcgatataggaaaaatcctcggcacttgtgcttttgctgtaagctcccccccatgcagtgcgcatatcccaggcctcgtccccaaacatctccttcatggaacagagaaaggacttgtgcacgttgctgtccaccacaaggggcggacaggcagtgccgaaggtaacctctgccgtcacacctttggccttccccacatattccaccagggttacaaggtcctttctcagccgttctccaacctgcttgctgaatgtacgtatggtcccctgcataatagctgtttccggtatgatattggcgctgtcccctgcactcattttccccaccgtcatggtacagctgtcaaagggcgaccggtgctccgccacgatttcatggattccctggtagattgcgcacatggctccaaggggattatgtgtccagtcaggggctgcaccatgaccgcccaccccctttatatggatttcaaaccgtccggaggaggcgtacaccgcgcccggcccaaagacacccacggtcccttcctttacagggctgcctgcaatatcatgaaacatgagcgcggcatccacatgaggattttcaaggattcctgcctctatcatggccttagccccttcaagtgtctcctcccccggctggaacaggatttttaccgtcccttcaatctcatcttcatggcgtttcaaaagctttgcagcgcctaacagcatagcggtatggttatcatgtccgcatgtgtgcatgcgtccctttatccgcgaagcatacggcacaccggattcctcctctatgggaagggcgtccatatccgcgcggatgagaaataccttgcccggctttttacctcctgccagcacggcaacacccgattccccatactcaaggggctggtagccgaaatccgagagggtcttcatcacataggcttttgtacccggaagggaaagccccagctccggattcgcatgcagatatcttctgtatgccacaagctcgtcgtttaattggcatgcttcctcaagataattgtagttcattttagtctctcccatatcattttaaggtttatattcactcagtgccggcgccttgccagtcagacggttgcctccttcatggaaaccggaagctttgcccgtttgcggtttgcaatcactatgcttataaaaatcatcggaatggcaatcagcgcagctgtggacaccaccatccacgcgccggaatacccgccggtcttatcgaaaacataggcggaaaacatatttccgataggtgttccgaatgccgtgatgctctggattgtgccaaggtaacggccgtagtccttatctccgaataccgtagaaacaatgagtggcgtgacaatcgttcccacagaaccgccgatacaaaagaacatgaggtacagataaataaagtttgtactgtatatggataaaaacagcatgagcaaacagcagaaataggatgtcatgcccagtaaaagacctttcttcacaccaatcttatcacaaagtgagcccagcacgatctttcctatggtaagggaaccaatggcgattccggaaatgctggctgcctttactgcattaccattaaaaaggtctgtaagatatggggtgcggtggttggttacggacgcattgcaaatttgaatcagcatgattcccatcacaaccgtgaagaatacaatgctcttgattccctccttgtagggtacgccggtcagcacggttttcccggcgcttgcaccggagcctgtactttccttttctcccagccgttccgtatatcccttttcctggggacgctccacaaccgtgaaatagataaggggcagcataaccacaagcagcatgactccttcaaatatgtacgtctttctccagccgtaattctcacagagataactcagcaacggcgacatgagcatgcttcccactccggagcctgccagggcaagactgatggcaatgccctttttcttaggcccgaaccaccggttgataaggattggtactgacatgatggtggccgcgcaccatgtagcgctggagtaaacagacagaacataatactggcggatatccgtaaacatcagcggaatgaaaaatgtggatgcgactccggctgtggaaatcagcatgatgcgctttaggccgaatctctggatcagacgtccgctcatataacagctgatcaatgaaccaatacaggtaaagattgactttgatgaccagagtgaccggctgaagccttgctcctgcgtgattgaaattgtaaagacggatccggtggatgtggtggaataaaccagcgcatagataatcgcactgaccatgaccatgtaccaaccatagtaacgtttttctttaacagcgtccatgtgaatagttccccctattttttaattttggtgtatttttagcatgtgccttaatattaggttaccatcacaccatattaatgtcaaacgatttttgtgccttatatacacatttgtgatatttatataaataaagtgatttattttgtggattctgtccatggaaaaagtatatcacagcagagttttggcttatattcaagatacttacagacgggattaaaataattgcggtaaagcaggggaataaacgggacaattaaaggcggaacacttaaccaaatgttccgccttccaatcacttatttatctatcttctgattgactgcatacagcacaatcctcatggtcacttccttctcctcatcaataaccagagtgaggtaatccccttctttttttaccacccttccaactacccctccgatggtgatgaccatatcccctgcagcaatggaatcatgcatctcttgcatcttcctgtgctttttcttattaggtatatatacaaaaacatacattgccattatgacaatgacaccatatgcaagaaacaataaccctggtgacatatcttaaaagtcctttctgagccgtatttattacattttgaaaaacttttcgactatacgcacaaatatggcagatccaatccagaatacgtcctcgtccacattaaaaagcggattgtggtgcggtacatccgtgtgtttctccgggttggatgagcttaagaacatgaatgctcccggcgctttctccagataatatgcaaaatcctctccgcccatatttggcgcatccagatggtcaatgaccatatcatctcccaccacgtccctggcacagtccgccgccagtttggccataccggcatcattgataacaggaggcgcaccccagatcatttcgtactcagcttcccctctgaaggctttcgcagttgcctctgcaatctcgccaatcctcttagccagctcctggcgtacatcttcctccagagcccggatagtaccttcaatcaggacctccgacgggataacattataggcgaaacctgctttcacatggccgatagtgagtacggaaggcttaactgccgggatctcacgggcaatgatctcctggagattgatgatgatatgggctgcaatgttcaccgggtccacgcctttttccggagtggagccgtggcagccgattccttttacttttatcacaaatttatcaaaggaggccatacagcagcccggtacggaaatcacggttcctgccttgatgtccttggaaataatcgttccgatatgggttccgaacacagcatcaacgccatccatagcgccctctgcacaaagcctctgagctcctctggagccttcttcatcggtctggaagagcagccttaccgtgcctgggatctgatctttatgttcacttaaaattttagccgcccccagcagcatggtcatatgcgtatcatgtccgcaggcatgcatacatccttcatgtctggatatgtagtccacctcattggcttcctgtatcggaagggcatccatatctgcacggagcacaatggtctttccctctttttctcccttaatggtagcaatgaggccgctgtccgtcttattctccacaaaaggaatccccagttccttaagcttttcttccacatacgccctggtcttgggcagttctccgcccagctcaggaatctgatgaagctccctgcgcattctgaccagctcttcctgtaattctttacatttctcccacatgataatatattactcctttcctgaaattagattgccgcaacccatgattatttgacaagtccctttttatagaatactcttgcgattaacaaggtaccaaatacagtgcacacaatgactgctgctgccggaagcccggtggtcattttcagaattacgggaattgccaatgcaaatactgccacctttggatatttaaccgcaaaattcccgaaggtcgctccaaaaattgcggaactggcatatttcgtaagacctaccactatgaactcaggaagcacagataaaaccgctccgcctacaataactgcagaagtggtgcctatcaggtttgtaatgatagaaccgcagattgccatggtggaaaccacctctgcctggattgtacctggtgtggaatgtgtaacatccagggccagcgcagcgcagggaaccctcatattgccgatatttcctgacaggaagctaaggtaggttccggtcataccaagagcggcatagtaggaaaccggctccacaaaataaaatgctccaaaggaagcagcaaccatgccccatgcagtaaggaccgtgctgattggcggccagcaatcataagtggtgcaaagccagattaccggaatgaatgaggtcagggcagccaggatgttcgtaggtgagccaataacaatactgctttttttccattgtttcatgatttcattatcactcatttatcttccctcctggtctatttgagtaactgatcatatcccaatgcgaatatcatgccaatgatcatggcgatacccagggaatattccatcaatttaggatattttttacatacggttttcacaagcaggaccattgaaacagcacctgtcaaaactgccagtgtatttcccatcccttttaagatttcacctgcgttcagataaccaaaaataccaagggagcacgcaccgctaagcacaaccagccatttcatatctccaccggataccttattgcgcagcgtctctaaagacggagtggcaacaccggtgaagagaagccagcctgcaccgtttaaggccatggtaaaccatgaaaccgcaagacagatcagagtatactgctctgtgcccagagtaactccacatgcttctgcaccaatattggctgctgaaagctctgtggcagcagcgccgatgatggaaagacggagccatgccatggggcctccgatggaagccataagtccaaccattacgataaacacacccaaagcaggacctatagcggatatcagtcccacgcggaaagcttccttgggaatcttcggatccagacctgccgccctggtagtcttgctgcactgcctcatgtaaagcactgtctgtatagcagatatgacaaccgtaacgccgcataagagccacagaataggtgaattggaaacctgttggacttgctcaatattactcatttcgcaacctccttgcataatgatggtatagtcaattggactacacgattaacgagttactataaatcttataaacatacacaccccccgtcagctgttaatttacatcagccagtgatgtattaaattttgtttgaatttaacagatttagaatcatatctgtatattcagcaggatcatagctatttccgactctttcatttgcgaaaatttcaccaacaactacttataatcgcggaaacaaactgccttttttctgttaatcccagctttttttctgcaaatt

SEQ ID NO: 3255 - DNA, 17018 bp, Unknown
  gut microbiota DNA sequence
tttatatatgcatattatccaaccaaacgtattttctgcggatataaaaaatagccgcggcagtatacctgccgcagcaatctcttaattccaactatcagcttaaatcattcctgcttcccgttttccgtaccagttctatttcctgtaaccgcatttcgggcagacaccattttcatctaaagcaatgccgcataacgggcagcgctccattgtcctctggggcttaaattcctcagacgcagcgtttacaccgcttgtgaaggttattttaacgatgtttaatttgtcttttaacagatcatagacaattttaatcatgccctccactgtcatggtttcttttgttacaaccagacggcattccggatacgctgttgcaagatctgttttgaaagcaggacctttcataatattgttgggagcaccgtccttgataccctgagcttcatataccccaagaagagcaggaagcaacggatcatcctcccgtaaaatcgtggcatggtcaaagttctttaaaacctcccacgctgttttctggatctcgttgcaggggaataccatattgacgcctgcattcaccgtgtcctccacctctaatgttaatatgcctgtgtgtccgtgcagatactgtgcttcacctttaaaaccataaaacctgtgtgcgtactgtaaatccaacgttgtgatacttctcatgtaaaacctccttctcttttgtgtttataggggcgttctatgctcccctaattggatacatccggtaaattgctgcatcgaatcaggctgatcatatacctcttataaataataatagttcttattatcattatagtcacagcatcattaaaagtcaaggaaaataaatatattttttaattgccgcagtttgcccggcctttagaggaccaaaaccgagatccaaaaaatggtgcagaatcagatgttaagctggcttataacaccgattctgcaccatttttatatcatatgtccggactactcctctgccgccaattccctcactgcctgaatcccggcatcgatctcttcctccgtgttaaagtaagaaaagctgaaccgcaccatgccctgttccacggtcttaaaggattcatgcatcagaggcgcgcagtgggcgccggggcgggtggagattccataggtgacagccagttcatcgctgacctctgaggaatcgtaatccccaatattcagggccacaatggcagccctttcatcagaggtgaaatcaccgtacacccggactcccggtatctgtaccacaccgtcataaaaccggcgcatcagttctgcctctctgcggtgaatggtttccaccccagtctcctttataaagccaagggcggcatggaggcctgctattccatggccgttcagcgtccccgcctccagggccgtgggcatgtccccgggatgttccttcagataggtatgaacaccgcttccccctgccttaaggggtcttatgcgtataccgtctcccacgcagattccgcctgttccctgggggcccagaagccccttatggccggtaaaacacagcacgtctatatgcatcctcttcatgtcaatgggaaggactcccgctgtctgggaggcgtctgccaccagccggattccgtgtctgtggcagagttcgccaacacgctccaaatccatccggttgccggtcaggttggaggcatgggtacacacaactgcctttgtctcaggccgtatgctttcctccagctggtcataacacagaacacccttttcatcgcagggcagaatcgtcaggctgacgccccggttttccatcagataaagaggccgaagcacggaattgtgctccagtaccgtggtaatcacatggtccccttttgaaaacaggccctggatggccgtgttcaggctttcagtggaattactggtaaatgcaacctgcagcggatttcccaggttaaacaactccgaaattctctccctggtttcataaatcatcctggacgcatccagggaagcctcatgggcccctctgccggaattgccgaaattcctcatggcgtccgacactgcatcaatgacacagtccggcttcctcatggtagtagctgcattgtcaaaataaatcataatagcgcctccctttcccatctaatcaatcgggaaatttcaatcacaatccggtgtccgcccaacattcatacataagacagggcacctgttggcatacacctaaaaatcagtacatgagccggaccatttcttcatgttccatgcccttttccttcatgaactcagacatctcctgttccatgtcaggttcgcagcaccaggcaaggccgcagcccgcggatatttccctgggaaccggtatcatccttcctgtcttttggttttccttacaaagcttctccatggcaatggcttctgccgtggtatgaaatgtaatgattaattttggttctttttttctcatcccataaatcctttcgtatctaaaatatgctgcagcagactgtcaccaggcggtcaaacagcctgatttccttccactgcagcatccggtttcagaagccctggttcagacacgctgtgaatccgggacatctgtattattcaatcacaatctcaaattcagacccctttttggttactgtggccgtcttaccctggctctttgcatatttctcaacattcatcctggtatgaggttcactgaccagcaccttcaccggctctcccttgtgcttcttaagggctgctgccgtcagcatcacaggctcaggacaggataaacctcttgcatctacttcatacatatctcttacctcctatttcccttcctgctgctttggcataaatccgataataaacagaataacaatgcatccaatgaccgcggctttaccggccatggccagaccgcccggagctgcgggcgtatccgcggtagctgcagctgctgccgatgctgccagcccgaagttgtggcagaaagcagctcccactaaaagtccaaggaatgtcacagcggaatcagaggaaccctgaccggctaaaaccagctggcgaagcgggcatccgcctgccaggacagccgcgaaaccaacggcgtaaagtcccagaatattccagatatgttgtgaatgtgcaaccggctgtcctgcaaaggaaagcttgaatccgcctgtagccagattaaacaccagcatgactgcaaacagtccgccgatcacagtaatcaaatcaaaattcctcattaaaatgacgtcacggatactgcccgcgaaacaggtcctgcatttctgcgctatggcgccaaacagcagggccacagccagggcaagaagcgcaggggcatgcatgctgcccggacccttttcactgaatgcaaacaatgtggtgatcaggctcagtacaaacagcaccaccaggacaaccggaagcactgccccgtttatctttccggtttcgtgagcccgtcccagtgaaaatccatgctttaaagcgatagttccggtaaatacaccggctgcaaatccgagaaatcccacatatgcatttaaatcaccggctgccatgcggattaccatgcgcagcggacatcccagaaatgccagggagccaatcatcatgataacacccaggataaagcgcagcatgggagacgaccctgccgtggaacggtattccctggtagccagggcaatcaggaaggaaccgcagacaaaacccacgatttccggcctgaaatactgcaccaccgccgcggtgtgaagcttcatggcaccggcggaatccctgataaagcaggccacgcagattgccatgttctttggattgccaaagtaagcgagaatacatgccagtattcccagtgccactccggataagagcagcgtctttttagagcttgtcagattcataatcatatccccttttcttttggtaaaactaccttcatcttaccaaagtgaaaggggcaaatccaattcaaaaaaacatagcatgtttttttactatagacattttctatacaaaattccatgcaggataagcctgcataaatccttacataaaaccttacaaaaaccttgcatgtacccttacataaaccgcccgatatcctgctgccagtttctgtccctgtaatcaatcacaagatcccggaaggcttccgctatcggggagaggcgtatattcttgctgtataccatgtaaaaggtccgtttcttgtccaggccgtctatcttcagatactttatccggtgggtctcttccttttccccggcagccatcctggacaggatggaaattcccaggcctccggccacagcctgtttgatggtctcggtgctgttcatgcgggcaatcacgtccacatttttaaagaccgggacaccgtggatttccgccttttccatctcctgttttgtacctgagccttcctcccgaaggataaaggtctcatgttcaaaatcacggaagctcaccgtgctccccatcttccacctggcatacctctccgtatcaggcacaatgagcaccagctcatccataaacacaggctcatacaccagactgttatgcatcttatagcctgtgagtccaatctcgcccttctggctcatgacattttcaatcacagtcttactgtccgactgatccacataaaaacggattttggggcatttggcatgaaactcccctatgagccggggcagatagtactgccccggaatgctggatgcatataaatccaaaacaccgtccatcgcctcgcactgggcctgtaccgtagccagagcctgggaccgggtatgaagcatatcaatggcataggggtaaaacagctccccctgctttgtcagggttatctcccttcctgtgcggttcacaagggttgtccccatctcattctccagattattgatgtgggcactgattgtgggctgggtcagaaaggtggcatctgctgcctttgaaaaacttttgtactttaccgcatttacaaatgcttctaattgtctgaattccatagccgcctaccttgacttctggacaaggatacgtacatcgtcctgtttctttgttatcttctgctggtcgcagtactccaggaataaaacagcatacttcctggacgttcccagcagatccctgtaatctcccagggaaatgttcgggtgggaatcaaagtatcccttaagaagtcccatggccttgtcccagttgtccttgtgaatcaaggcgcctggatttatctttatcaatgtaccctttttcacaagatcatttacaatctgtttggccatcttcttgtccttgaacttaccgatcacatcgtccgtggccggtatctcatatcctgccttcagatatgtgtcctctatgtcttttaacatccccttaagctcatgggaatattcagcattaaatccggctgccgctatggcgcttgccatggtgaccgtaatgctgcgcttaatcatctcattcaggaggacatctgctttcttggactcccggattttgaaattatccaatatacggctcttaaattcttccttctccatgccgtcggaaataggattctccttgtggaactgattcaggagttcggtgccatactgcgtgatttcattccagtaatccttgtggataaagcttccgtcgctgaggcggacagccttcttccccttgaccaggacctccagctgttcctctgtttcctgattggtccagttgagcttggcggccagtatcttaggaaccgggaagtaccggctctcctccttaagctccagctccaggacctctaaatcagtgcccagctcctttatatgaaggctgtcaatgacttcctcatgattcctcttatgctttaacgcctcagcctccagcacgatgcctccgccaaaggtaatggtgggagaataaaaacggataataaaccggtcattcctcctcacagccacaggctcgtcaaaccggaactgcacgtaagcctcctcaccggcagacagcacatccttatcaaggagaactgccttgcatatggcctgggctgaaccataattgatgtggaccctgtctccgtttctcagttccctgtccgtggaggaaaataactgcaccttggcgtctatgaactggcttttcaaaagggaatcctgggcagccagaacatctcccctgttaatctcgtccttcttgatattaaccaggttgagggctgttctctggccggcataggccatgtccaccttgtggccgtgggtctgtatctcccttattttgacggttttctcagtgggatagagctccacctcctggcctacctggcagcagccctccaaaagggttcctgtgacaaccgtgccgaatccttccattgtaaatacacggtctataggcagacggaacagctccttctcctggcgtctggcgcctgccgcccttaccttatccactatcatctgtttcagcacatcaatattttttccggtataggcagatacctggatgcggtcggccttttccataaacgtacctttaaccagattgtccacatcatcattaacaagctcagcccagtcctcatccaccagatcggccttggtaaacaccacaatgccctgcttgatatgaagcatcttaagaatctcaaaatgctcaaccgtctgaggcataacaccctcatccagggcaaccaccagaagcaccaggtcgatgccgccaatacctgccagcatgttcttcacaaacttctcatgacccggtacatctatgattccaatatggattccggcgtcattgggcaggttggcaaatcccagctcaatggttattccccttttctgctcttccttcagcctgtccgtatccgtccctgtaagggcctttatgagacatgtcttgccgtggtccacatgaccggctgttcccactattacattttgcatatcatcacccctcaacctgtctgctgtccattgcggtaaacgctgctacaatatattcaaactcatcttccctgatggtcctcacatccagataaacctggttgtgggtaatccttataataattggaatttcctctttgcggagaaggcgctcaatcttctccggcgccaatgtcctgccctgaacggccaccgcatatccgtccaacagcaccgtgggggcggaaccgccgcctacctgatccttgcacgcctccacctccacggtgaagtgatgggttgttctgcggatctccccggccagcctctccgccttgtccttaagctctgcggccggtgtggttatcatgttcagcaccggtatggtctttcgggcctggcggatatccgaatattcaaagaaggtggcctccatggccgccagcgtcatcttgtccacccggaacgcccttgccaggggatgggccttcattttatcaatgtactctttctttcctgcgatgataccgccctgaggcccgcctaacagcttgtccccgctgaacagaatcacgtctatgccggtctttaaggcgtccagaaccgtgggctcgtccaccccgcagtctgtcaggtcagccatgagaccgcttcccatatcgtagataaccggaagatttaatttcttacccagctccaccatctcaggaagttccacctcctgggtgaagcccagtatcctgtagttgctggtatggaccttcatcagtgcgccggtctcaccttcatggtaggcattcagataatccgagggctttgtcttgtttgttgttcccacatccatcagcctggcaccgctctgttccatgatttccggcacccggaaggaacctccgatttccaccagctcccccctggagacaataacttccttgtcctttgccagggcggagaggcagagcatggtggccgccgcgttgttattgaccaccatggcggcttccgctcccgtaatcttggtgaggattttttccacatggtcatggcgtgaccctctggatccgcgcttcacatcgtattccagattggtataatttctggccacgtccatgatgctctcgcaggccttgtccgacagatttgcccttcccaggttggtgtgcagcaccacaccggttgcattgataacccgccgcaggctctttttcttcttgcctgtaatgcgggccacaatttccgtcatcagcgtttccttggtccccacctgactccgcctgccttccaggatgtcctttctcagctcatcaatgacttccctgaccgagtccacaatcactgctctgggcgtactttccgtaaaaaaaaagagccgctcatcctgcagcacctcgtcaattttcggaatctttcggagtaactctcttctatcttccatcatatattacctccactacagatatggtttaaacggaggaggtgggaatcgaacccacccagagggctcttaaccccccacaacggttttgaagaccgcgaggcacaccagcaacctatctacctccatatcttttggatagcatttaactttaatatactatcatgtattcagttgtatgtcaatccgaaactttcaaaaaagttatcgcgaaaacttaaatctattctgattttccgccccgcgaaagcgatgtttcgcgggcacggaaaatgtataacttatgaatgaatggctttatcttagctaacgtatccggctgccttcagaatctcgtgtgccttatccttgttggcatcagacatcagtacgatggggcctgtgcatcccatgccgctctcagcatagataccggctttccacagcgccttaacagcgtcctccaggtccattacctcgatacccggaatctgtgaagtaactacttccttaggaggcatcttcacttcctcggctgctgcgcctgcgtccttcttgcctgcggactttaactcgttgatgatatccttaagtccggccttatttgccttctcaaattcttcatcagcaatcttcttccagtcatggcgaatcaggtttgtggcatactccatggctcctgcaattacaggcgcgccggaagcacgtgacacaatcatgataagacggtcatatccctcgcccacgccgggaccgtaaccgaatcctaaggactcgtaattaccgcctgtggtataggaagagaataccttcatcatcaggttgcctgtcagagaatccataaccatgatgtcgggtgttcctcccagcaggtcatttcctctcatgacaataccgccgtcagcccttacggactctgcgaagttaatatcatagccgttctcagccagcttgagaagtgccttctctgtctggcgtgcaccgtcaatgttggcaatgcctacggttgggttctccacaccgtctgcctttgccgcaatgattccatagattgcattcttaaccatgccgctgatacggtctgtgtcggacgtacctgtggtggtggcaatatacataggctttcccttgcctggggtgacaacctttcctactgtggacacaccgatggggaatggatagtgcatggttacagcgccgtcaatctcgccggaatccagcatttcttccatcttcttatgaaggtcttccccctcgatcaggacagccttaagtcccttcatctcggcaatcttcatggcttcttctatattatcctggccatgttcgctgccttctgaggcgaagccgataaccggctttttgccatattgtcctgtttcaagagcatcggccacctcaagaaaagtattagcaatcatagcttttattttcttatcagacataacatatttcctttctctcggtgaaaattattcctcttcgcccatcagaccctcggcaaacgctctcatggcctggccaatcatagcctttaccttgctctcatctacgccgccgttctcctctgaagcagaaccatcgttggcctgaaccacgaatgatacgccgtcgaacagattggtcattcttccaaggaataagcttcccttaccgataatcatggcgcgctttgtctcgccagacaggatttcgtctctcagaagtccaaggtaaggaacgcctgaaggaatatgtccctgggttggagcccagccggtcataccatgctccttaacgaaatctgcaatctcattacgctgtaattcgcccctcttaacaccaagagcagcaatcatcttgtagttagcctcaggaacatcgcctgcgcctgcgggtttggtgatatccggattctgcatctcaggagagtacttgtcgatatcaacaatctttaaaccagcctcatccagaggattggttaccagggaagagataacgttctgaggagcggatcctgttccaacggtgtggcgtcccacgatatcagttctgatctgtgggcttacgccgtcatcagcgcttactaatacggagaatcctgcgatagcgtcctccagaatcggaagtcccttctttacatggtccttgccgttcatacctaatttagcggtacagccgcctgctgtaaccacaacgttcttaaatgttcctgcctttaccagggcagctgcatgaagcattgcatgagctggtcctgcacagaagcctcttacgtctgaaccggttgcgttgacaaatccagcaacctcagcagctgcctttgcaaagttgccgccgcctctctggttcatatcgccgcaggcctcctcgcagcagtcaacaacataatctatgtcagcgggattaactcctgctttttttactaagttaagtaaggataatacgttagaagcctttgttaccaggttctctaacataacgtgtgcggataagttgacatccacgtcatgagctctcttaacagcgccaaccagtacattgttgaagtacagaggctctgcatgctcgtcatttaccagagcagcgatttcttcctgtgttgtctcgctgttcttatcaagaatagctacatgctcgtctgtgaacatgtgatgggcgtccagcttagctttaacgtcagctgcaaatcccttttccagtttaaccagatcaaatacgtcgcagatctgaatcaggccgtagaactcatcctctggcatgatctcgccgtacttgccgtccttgctggctccatccattaatttatcataccatgggaatccaacctcagccattttctgtggcttttcattgccaatatatacctggttcggcatatagttaacggcatcctcaaaacttctcaaatggcttggaagttccttcaaatattctgactcaggattaacaatcatctctgttgtctgtgttgtaccattgtgaataaccatatcaggtgtaaccgccaatgtatagctggcaccctttaaaactgcataaccgttcattccttcacctcaccataatttatgacatctagtactgcgttgcgcaagtctcagtccgcggccgccttcgctccgccgcaaggtacagctatgtatcatactggaacttgcgcaatgcagtactagcatagttgtgcaataaaaacccattgattgcacaaaacccccggagaccccatgaagagcctcccggggaattacatctaatgtaactgttctggactgttacattttaattataaatatttgcaatactgctctctgatggaagacatctccttagcgatgtcatcaacgtccataaccatctccatcatgctgatctgatcgtcataaacgctgctgtcaacctcatctttgatctcgttctcacaaacatggaatacacttagtcccaactggactcctgctagaggacctgcaaaagtaggatcgcctgctgtaacggtttctgcagctaaaccagctgcctcaccctctgctgctccaagaacaactacaatgttctcagcgccgtactgctcagcgaaatctttaactctcttctgattttccagatccatagcaccagcggccgttcagacgaagcactcagttgaagaatatacaacttcagcgcctgcggtctttacgcattcttctatggctggtcccggaataccgtcacggtctccgatgatgatgacttttttgtctttcaaaattgccatatccgttttcctccttattttatttttggtatttgatttggctgccgggtattgccccggcgccataatatagacaaacgtcagtattgacggttgctagtaaaataatgcggttgtctgaggacaaattataagttagcctcaatcatagccttgatgttctcaacagttgcgtcgtccttaacgcactcagcaaccttctcgccgcccttgtagatagcgataacaggaagaccaagaatcttctgtccgattgccagacggcgtgccttggtggtgtttaaagaggtgaatttgatcttatcgccgtaatcaccctccatagcatggatatgtggcataagagcctggcatggtacacatccgtcaccgtagaagtcaaccaatactgtgccttcagctttcaatacttcttcttcaaaattgtccttggttaaatctaccattggtattacctccctttctcaactatgaatcacttatttctgctctgcaagccatctctcaacctgcatggaagcgattgctccgtctgcagcagcagtaacaacctgtcttaagctctttacacggatatcgccaactgcgtacacgccttccacattggtgtgcatgtcttcgtcggtcttgatgtatccgcggtccatctccaacttgccttcgaacagttcgcttcttgggttgtatccgatgaagccgaatacgccgaacaggccgtcgtcttcgtctgcatcaattcttgtaagctcgcctgtcttaacattcttaacagtcatgccggaaaggatgccgtctccgtgaagctcttccacaactgtatcccacataaagaacagcttaggattcttgaacgcgcgctcctggatggattttgccgcacgcagctcatcacggcgatggataacagtaacttttcttgcaaactttgtcaggtacatggcttcctcaacagcagagtcgccgccgccaactacgaatacttccagatcctcgaagaaggaagcatcgcaggttgcacagtaggaaacacccttgcccataaactcgccctcgcccttgcagccgattggccttgggaaagcgccggtagcaatgatcagggtacgtgccttataagttccgttgcttccaaccagtgtctttaccggaccttcgatatcaacgctgacaatggtatcgctgacacgctcagctccaaacttctctacctgcttggtcattctttcaatcagggaaggaccgctctcgccgtctaccatctgtccgggataattctcaatctcgtctgtaatggcaatctggccaccgtcttttcctttttcaatgagcagcgtatcaagacgcgctcttcctgcatagattccagctgcaagtccgccaggacctgcacccagaatgatgacatcataaatcttgtccatcagaatatctccttacacatcaattgaatttcagggttcacaaaatgccgcttcaaataacattttatcactaaacaggcagtttgcaaactcttttttgtgcaattacaccattttcagaacgttgttgaatcataccatggtaactttaggcaccattggaaggaccgggcaatgttctttttacggatttctaaattacggtttactcaaatacagtctgctctgtaaccggagtctccagtgctgtcagagccttggtcagtatatgtctcctgatttccttctcttcttccatggtcaatgcaggattgccaagaggatgaggaatagcgatagcaggaacaatacggttagctcctactgtcagtgaaatcggaactacagttgcaatatgaactacagggattcctgctctttcaatttcttttaccatcgttgcaccgcaacgtgtacaggtacctcaggtagaggtcagaatgaccgcatctaccccgtcattcctcagctcctgtgcgaactctgcagcgaatctcttggagttagctacggatgtaccgtttccaactgtggtatagaaatatctgtgcaggctgccgatttttccttctttttcaaattctcttaaaacgtcaacaggaaggactctgtctgcgtcttcgtttgcatatactggatcatatccgccatgagcagtctcataggtagcttctgtcaggtccatgacaccgtcgatgtcatacttgccgtacttggaagcactggaggactcgatgtggtccgggttgccctttggtacgataccgccggaggtaaccagagcgatttttgcatgagccatatctttaacagccggattcggatctactctgtcgaagtcaggcattgggaactcggttgtgaattccttgccggacagcttcttaatcagcatctctactgctctctgagagcctctcttgtcctcaaagaagttgacacggatgccgtttggcatatagccctcttccttggaagaaccaagcttctcacccttggcaagcttaagtgccagaggagccatggtggcaactgcacttctcatgccggctgcgctgttcttggtctcaaccacatatactttggtcttgtacatgtcagcgcctgggttctctttgtacataccagtcagaaccggaaggtttaactcttccttaactgccagtgcaacagtaccgcaggcaacgccgtaacgtcctgcattgaatgccggtccgcagataactgcgtctggcttctggctgctgatcatatccagaatggtctttttagcagcttcaacgttctcgttgaaataggagtcaccgcagataacggtagctacgatttctgcttcttctccaaatgcctggttgaacgccataccagggcctacaatgccttctcttaattctggctggtaatcagccttttcctcgccgccgatgttagcgaagaactggttaatataatgaacaattcttaactttgacatcttatcctcctatctggcacttaatttattgaagcccatctcatttgttgctcctgtgattacctgaagctcagcaacaatggaaccgtctttctgtaagcttccgtcgaatccgcctgcaatgatatcagcaacctcaggatatccgattactttatccattgccggtaagttgatgaccatgtttgcgtttccgcctgtaacaacagcattagcgcttgcatctgcatctgctaaggactgggaagcaccgtcgcggcctgcgtactcatctgtgatgataacagtcttaacgccttttgcttcaattttcttgcagttcatgataaggtcagtatctgggttaccgaagccctcctgggaaacgatagcgccgtcaacgcctaagaactcgcaaagtttggatgtccagtcagaagaacgcatcttgtcagcaaggtatacgttctcgttggtgatgattacacctacaaagttcagggtctttccgtgctgttcaaataagtctgcgataacaggattgttaaggtgatgataggttgtgttcttatcgcatgcagatacgcagttaccgcttaagatagcgccatccattaattcggttgggtttaagatggttggcagggactgcttcatatctacgccgtatacatatgtatcatgcatcaggccctggctctgaagcataagtacgtaagctactcttggaagctcaggatacttttcaattccctctttaacggaacaggtctcatataccttaacttcatcaggctctacgtccttagccagcttgccgatataatcagcagccttcaggcctgcgaatctgacagccttctcatgagcatgctttgcaagtccgtcaattggctcgcatacaacaaccaggttgtttaactgggagaatggtgtgtacttagctccctcgccgcacatgtcgatgataccttcctggaagccaacaatcttacctgtggtaacaactgcggaaccctttaatacgttggtccttccgcttcccactgtctccaccttggaaataacgcctgggaataagtttccacctccgttgacttttacacgtggctcgatcacgtcctttactggcatgatacggacactctctcctggttttgcaatctccagctcaacggacttcaggttttcatcttccaacaaaagtgccttcaactcttctgcattaacataaatagttccgttttccacttttgattccgatgcaaactgaatgtcgttaatctgaacgcaccccaactcaagtttcatctaatcactcctccttgtatattattttttttacagctccttcaatcaaggataaatccacgtccctgaagtcttccagtatattttccggccaatcaggagtccgtctgtccttcatgaatttctcacaggactgaatactgttctccatcaccatctcaaactggtaaaattcttctttttcaacctcagagtcggaaattatgattgttttgtaaggaatctggttaggcttcaggctccctgccataggatgggtttccaggcgataacctttatgtatatagtttctcaccttgattaacacatcaatgtaggaaccgttttccaggaagtccacttttaatttgtcctgatatctgtccctgcacttcacgttgtttgtcactacgatgtacatgatgtttcaccctttagatctttcttatttattaggcataggattccattccacataatattagagcaattatcgtgccaactttttctaaagcgggattttttttatttttttaccttttaaccaacggaaatacattttttctatcgggtttccgtcctttataggttttctatattgtctattttgtcattcttttaacttctggccattttaaatttcctttttttcatgaactatttttcttgatagtgaaataaatttcagttataatagggggtaggg

SEQ ID NO: 3256 - DNA, 1690 bp, Unknown
  gut microbiota DNA sequence
tgaggtgggctggcaccatgatagtaatggctggtggtatgcatacagcaccacagagtattacaaggagtgctggcagattataaaccatcacaaatattattttaactcagatggatatgctctgaccaactggcatgcaattggcggtaaggattattactttgagccacgggccgggcatccgctggaatgcgccatgtatgtggcgccggagggcgaacagtacataggggagttttaagctgagaacacttataccggaccataagggagctactaaatgaaatcttcaacttcgagctaaaatggaaaccacgcaacggcacatccatagatgtactttctcactatgttgtaaaacactattacgaaaaaatgccgaaggggacactattacagcgtccccttcttcttataacatgcaaaacaattggactaaacattttcctttaatatttgtttcatctccatccagtttccttctaccaaagaccttaaatttgtttttctcataaaatcgtattaatttttcttcttcttcgcattccagataaacaaactttccaccgacttcgttttggattaaatatgctttttcgattgccatttgtaataaatctgtaccggaaataagacaatcatttccattggcaaaatttttccccaattgtcctattaatggcgcagaaaccatgtactggttggttttctcgttaaaaatcccatgttcacggagttttctcgcctctctgctgctaacggatccgcggtcaatacagataacttttgatgcaatggcatagtatccaactaactccatcgcctttttatcatcggtttcccaaaacaccaaattcgtttttgcaaaattgcgtgcagagaacacaatagctttatttcgcaaaaagtcttccacatccttattaagaggacacacgaaagaggagaggattgattttactttttcctctcctatggcctctattagttcatttaatttaatctgtacaaaatgtgttttcgttgcaaattgtggcatgttattttctatcaaagaattctttgattttatctcctgtaagttctgtacacgtccgcgttaactgtacctgcttatacttggaaatttctgcttggcctaatgcttccacaaatgtatgggcaagttgcttatcctgtattttgatatctttcaagaagctctttgttgccatacgtatcacctcctaaatatcgctggcactttatcttatgtaagacagcactgacctgtgcgtatctttacttaataatacgcaactatatgtaactttattataacccattttttctgaaaatcaataagaaagtgaaaaataattcaccatttgtgaaattgcgaaaaactacattttataacatatttgttcaaatattgacagatgtcttgttaatatcaatttatagaataccccgccggtgaggcatttttactttgtccagtcaagggcagcgacgagggcaagtgcatgattacagatgccaggggagcgctccggattgcagaagagtacgacatggtaaatcgacggtacgtgttcgagtggtgacactgatgccagataaggatggggataacagaggagatgggtctagtccataggaccagacccatccatgtacaaaatattcgggggcatagatggtg

SEQ ID NO: 3257 - DNA, 911 bp, Unknown
  gut microbiota DNA sequence
gtcaatgaactgaacgcgacatgtatgaaaaacgatatgttacgaaaaaaacgtatcgtagccgctagcattgcacaaatcaaactcaagtataaccatgccaaacaacgcctgattctgctggactatgatggtacactgacggctctcaaaccacgtcccgaggatgcacaacctacaccggaactcatttctattctacaacaactggctagcgatcccgccaatcatattgttatcaatagcggacgggatcactttacattagaaaaatggcttggcacccttcctatttctatggctgccgaacatggggctttctataaagaaaacggagtctggcataaaaacataaagaagatagaatggggagcaggtattctctctatccttcaaatgtttgtagaccgtactccccgttcccatctggaagtgaaagaaactgccctagcctggcattatcgtgaaagtgacgcatggctcggcacattaagagcccaacaactcgtcaacacgcagatttcgctctgtacccggcagaaactacaaattctgcaaggaaataaagtgatcgaaatcaaatcaccggattgcaataaaggttcggaggtggggcgtctgctagccaacagacgttatgattttgttatagcgatgggagacgacactacagatgaagatatgtttcaggcattaccgatgagcgccatcaccattaaaataggtagcgtatccgaagccgccaactatcacctgtctgcccaatctgacgtacttcctttcttacggtctttactaggcaaacaaaaaactgccacaaaagaaggaagcattaagaatcgcctgactttcgctttcgactttctcaaagatctattaaaaactcaataaaaagcaatcaatatgaataa

SEQ ID NO: 3258 - DNA, 16729 bp, Unknown
  gut microbiota DNA sequence
ccccatctatggatttcacctacgatggaacggaaaaacttaaggtggaattcggcgccaaggaaggctgctccatatccggcatatgggtggatttacgccaatacagaggagatgaactgaaggaggcggtttccaggggatacattgaagtggatcgggaccgtgatcacatagtatctgtcaccggtaagattaatgaatacaagctgaccgttggggcagatggaaacagccggattacagaacctaaacaggaggttaccacttttacctatgattcggacaaatgcctggtggttaagttcaaggctaatacaggctacagagtcagcaaggtgatcgtggatgacgtttccctggagggagcggagcttctgaaggcactggcctctcattctgtttcagtggaccgcaagggcgaccacagcgtatttgtagagaccagtcccatggaatatgcccttaccaccggcgcagacctgcacagccggattacataccctcaggataggatttatacgtacagctatgacccggaggcctccatagaggttacctttgaggcaaaaacaggttacggaatttccggagtatttgtagatgcccgtcctctaaagggacaggaactgcaggatgccattgaagcaggcagtgtaagggttgacagaaaggaatgccactctgtctatgtgacatcggaggccaagcggtataccctgattacggattcggatgaacactccagcatcagccagggcggaagttacggatatgacgcaatccttcccatgctggtaaggttccgcgcggatacaggttacaccatcagcagtatcactgtggacggccagtctcttcagggagcagagtttgaaagggcggcggctttgggatatgtgtccctgtcacgtacccgggaccatgaagtggcggtcaccagccggattcgtcaggatttggaatatacggtaaattacttctttgagaatgaccggggggatttccgcattgacaggcagtatgaacacgcgcagcatgtgacaaatgctgagtatggttcagacattgtgtttgataagacacctgccctggataagaacggacaccattatgccctggaccacattgacggggacggaaagaaagtatcactgattactctggacaacgtggtgaatgtctactatggcattgatgaaaaaggagagacgaatccggaggacagcggcaagcctacaaatcccgacggcataccggaccggtaccaggtaacctttacctacagggccggtgccaacggcgccatgacaggaactgtcatggaggtggctacacggagaaattccgccggagagctgagcctgtacgctcctgtaaggccgactgcggatggagtggaataccttgcggatgacggatttacatttaacaattggaaatccagccaacccggctataaaacgctgataccaaattatgtgtttgatgatacagatgacatagctgcgcataagttctactgcgacactgtatttacagctaatttccttgacaataagaacattcattacgatgtggagttttacatgcagtcccaggggcgttatcaattccggcccacatacacggatgcaagaaatgacgttcctcttcatgggatggccaaagtaacagaacaggatttggcggataaggttgagagtgagtgcacctatgttctggatacaagcagaaggaacatcacagaagccaaggtgaaggaggacggttccactacattaaaactttactttaagcagcagtttaccgtgacatataagccgggcagtcaaggagcttttacagagcagtcaaagagtgattataaatacaatgacaggctggagcgctttatcggtgaaaagacgccaatagatgagacaatgcggtttgcaggctggatgggtatggatggaacggtcctgcaggaaagccagcttcctgatacggttacaaagaatatgatatatacagctgtatttgaggaaaatacagtcaagagcggcttctttgtaagaaaagacaaggctgcaaggccggacggcaatgtgccggatccctcttacaattatgcattgttcggcgaaggcttccttcatgcgaatccggtgatggtaccggcgccggaaggtgaactgaaccagagcagtgaggcggttttagagcgcatagcgcagtggccggagaacgatacatttaccatggacggtaagacctattccatggacgatatcatatggtacaggatccagtatgaggaaggcgacccatatgaatggcatgtggacggagagctgaagcacagcatagcagttgtttttgatttgaagggcggaacattgaatgattctacggacccgctgctgacctacagcctgcagaaatatggggtgattacagacaacctgattccttcactggagggaagcgcattcagcggctggagggttgtggaatcccaggatacgggatttaagaccgatcagttatatcaggcaccggatatcaacaaccatgagtttacgggcagcgttacctttgaagcagtttgggatattaatatgtatactgtaaatgtggagatggcagacaaggaatttcccgcgaatatacttgacagaaagcttctggaacaggtgccctttgggacggatccggaagcagacggcaggctgaatggactgattcctgaatcaatcgacggggcagacggaaaccattatatctataccggaatgctcaggaagtcctatgaacctgttcagggcgtcagggaaaatggaaccataaccgtctactacatgacagataacgatggaccggataaaaagcccgatggaattccggatgcctatgagattcagtttatctttgaatcctccaacgagcagcagggacgtatccggaacaacggtacaggggcatatggaaccgttacggagtggaagagcctggtagagcttgattcagaaggacgcattgttattggagcggacggagaacctgtattttgggaggatggggtgagccctgagggggccgttacggctgaagccaattccggctatgcactttccggatggactgcgcttatggacgatatgaatatttcgtttgctgatttaaatgaaatcaggagcactaagtatgagcatgacgtagtgtttgcagcccagtggtccgcagcaggcggtaacacccctgataccggaggaaacagcagttcgggcagttccggcggaagcagcagctcaggaagcggatcaggcagaaggtatgtatccgcaaatggaggccccggagcagttaccctggaggaaactcaggttccgctggccgaagcacctatgacagatatgacagttattgatgacggtgagataccgttagctcctcttccaaaaactggtaatataatggacaggatgagcctgacgttccttctttctggaatcgtacttaccttatcggtatttgacagaagaaggcatattaagtaaaacatgttattaactataaagtgaagggacacagcagtgcggagagattctgtactgctgtgtttttataaaatttaataatcttttcataatctgacgtggtggaaatagatttggatttgggatataataaccccaccaagtccggtctgcctgggggtgtgggggtcggaacaggagcagacggaaggaggacggacgtccttttaggaacaggtaatatatgctataatatttttaatcattatatgattagatgatattagagaaaacagcagtacattggaggtataataaagatgcaaagcgatatacaatctcagatgtcccaatctcagatgtcccaatctcagatgtcccagtctcagatgtcccagtttcaggtgccccatacccgcaatcccaagcccggtataatgaaagccgcggtctacaaagaaaatggcatcataaccctggaacaccggccggttcctgcgctggcggatccgcaggatgccatcataagggtaacccttaccaccatctgttccagtgatatccatataaagcacggagctgtcccaagggctgtgccgggaaccatactgggacatgagtttgtgggcatagtggagcagaccggggaagcggtaaaaaagtttaaacagggagaccgtgttgccgtaaatgtagaaactttctgcggcgagtgttatttctgcaggcggggttatgtcaacaattgtacccatgaacacgggggatgggcgctggggtgcaggattgacggcggtcaggccgaatatgtcagggtgccgtttgccgacaacggacttacgaagatacccgatgaagtgacagatgaggctgcgctgtttacaggagacatcctttccaccggttactggggggcttccctggcggaaatcaaacccgcggatacggtagctgttattggcgcaggtcctaccgggctgtgtaccctgatgtgcgcaaggctttacggccccggcatggtcatagccattgatacgtcggatgaacggctggagctggctaaggaacagggactggcagatgtcattatcaacccgttaaagcaggatgtggaacaggagataaagaagctgacccttggacgcggcgcggatgccgtattggaagtggcaggaggcagggataccttccggatggcatggaagattgccaggcccaatgcggtggtctgtgtagtggctttatatgaagaaccgcagatgctccccttaccggacatgtacgggaagaatctggtttttaaaacaggaggagtagacgcttccagctgtgaggaaatcatgaaactgataaaggccggaaaactggataccagctgcctgattacccacagaacaaagcttgaacacattatggaagcctatgatgtgtttgagaataagaaggaccatgtgataaagtatgcaattgaggtatcataaggcatatggacgtcctgcataatgataggacatttgcatacatacaggaaagacatataagaaagaaggaatgagtatgggcaggaactgttgtatcaccattgagcgtcagtacggaagcggaggaagggaggtggcccgtatcctgtcggagcgcctggggattccctgctatgggcgggagctgctggcagtgacggcggcagacaatggaatcagcatcgaggaactgaaaaagctggatgaaaagcggacgggaagcctgcttcatgatttggtgctgtatgccttccggttccagaattacaataagatgcaggagccctttgatatcaataaggaggtatctgacaccatccgcagactggcccggaagggaccgtgcatctttatcggaagatgcgctgatttcgccctggacggagaatgcgatgtacttaaactgtttatctacgcttcatccatggagaagcgcaaacgccgtatatgcgaggtggatgacattgcctttgagaaggcggaggaagaaatacagaaaagggacagccagagaagcgactattatcactattttaccggaaaaaactggggggatatggaaaattatgatgcctgtctgaatacctctgtattaggatatgagggctgtgcggacctgattatgaaaatgatggaatgagatggctgaatgtcatcaacgaaagtataaaacaaaatatgacaacaccatgacaacgctgtgacaatgctgtgacaatgccgtgaaaacatggtgacaatgccgtgaatcagccggattcccaaccaggaaaccggctttctcacggcatttttctttcctgctgccagagggatgaaccatcccgtcaaataaacggagaaatattaaaagttgggccgtaattttgtgaaaaaaaaacgggttgattttcatttgcaaaatgcatataatatttgtcaaacacaacagttgttaaatacatatgatagccgcagaaggtatttctttacagtatctgcggcagcccctgcaaggaggtgagtaccatacaggaaatagccaccatgatagaaaagagcaaacgaaggtttctgtgcattaaattcagggcctgcggcctttccttttccgagggaatcgtgcttctggtcataggctacagcagatacagcaatcaggagaccatttccagcctgtccggaattgataaataccagacagccaaggtattggctgccatggaggagcggggatacatcagaagggagattaatcctgagaataaacgagaaaagctggtttgcctgtcggaaaagggaaaagaggcagctaattcactgaaggacatcatggaccagtgggagaaaatcatctttgccggaatcacgccccaggaggaacaggttctggaacagattatgggcaaaatcgtcggaaatgtaagggagtatgagagaaatattggaagggagaaactgtaataacaatgaaactggcaaaatctaagaaaaaaatcataggggcggcggcagccgttattttgtgcgccattgtcctggtgctcatctttggtcatgtgacaggggatgacctgttatttaagaataagaaaaatctggtggtacagtcttatgtgaccatggatgagagcaatattaacgctctgaccgggggacagattaaggatgtcctggtggaggaaggggacctggtgaccaaaggccaggagctggtccgtctggacagtgataccctgatggcccagagagaacaggcccaggcagctctggcccaggcccaggcagcttaccagagcctgttaaacggcgccacagaggaacagatgaaacagctgcagctggcggtccagattgcccaggcaaacctggaaaatgcccaggctgcctacacaagaatggacgcggattatcagaggaccttggcgctggttccagcaggagccgtgtcccagtcctctgtggatgcccagaaggcagccctggcttctgccaaggcagccctggacagctcgcgctccaatctggagatttcccagagcaagctttccgaagcccaaaacggagcaacgccggaacagattgcccaggcccaggccggagtggaccaggccaaggcggccctgaaacagatagacaccaccctggataaatgtgtccttacctcacctgtggacggtctggtgacaacggttaatgtcaagcccggtgatgtggtgtcttccggacttccctccgtggtggttgctgacatttataccccgtatatcacttgtgatgtggatgaaatgaagcttccgcgggtaaaactggaccaggaggtggatatctccctggcagccctgggaaaggatacatataaggggaaagtggtgcgaatcaataaggaagcggattttgccaccaagaaagcgtccaatgaagctgactgggatatcctgacctacggaatcaaggtaacctttgaggacctgactggactgcaggatgaactgcgttccggtatgacagcctatgttgactttggaaagtgatgtgatggtatatgagagaatggatgaaacaggctgggagcctggcatcttctatgaaaaaacggtacataacgatacccatgctgattcttcttctggcacccaccatcctgagtctgcttatgggcgcggagttcgtgcatctgccttttcagaaggtacccacgattattgtgaaccatgatcactctgaaacagtccagagcctgattcagatgatttcggataacaggacatttgacgtcattgcgtgtacggatgaggaggatgacctgaaggaagcattttactataataaggcactggcaggcattgtgattccggagcatttttcagaggatctgttaaatggcagggaagccaaaatcatgatttttaacgacggcgccctgtcaacagttgccagcggcatgaggggtaccatagccgaagccctggggaccattaagagcggatatatgctgaagctggcagagggaaagggcataccgccccaggcagccatgaacctgattgcacctatgggatatgtgacaaaggccatcagcaatccctccaagaatgtggcatacatgatgatggagggcatcctccttaccattgtgcagattggagccggatgcgtgggggcctgcgtgtgcgagaggggaagctttggaaggctgatgaaaaaggccggatttatcaccggtattgcctgtgtctcggccctgggctgtatagtgacccagaccctgtgttttggatttccctacaagagttcgccctgggccggcatactgatgacggttttcacctgcttcggcattaccctttttggaatactccagaacctgggtaccggaggaaactgcgaggaggcagtgcagaaatgcagcatcataagttttaccatgctgttggccggttacacatttccggtcatctccatgccatggccctgtaagtttcttacctggttcatgcccaatacccattatattgtgccgttcagggacatggccctggtggagcgcagctttctgagtgaggcccaccatgttctgtggcttatgggcttctgcgcggtgatggtgcttgcagtggcaaagaaattcagggatgccggggcagagccgggaaaaacgcccgcagatagtcccctgacggaaagcggggtggccggcatatgataagcaggatatggaaggaagaaaaaaacacggtcatcggtctgtttatttccgtgctggccggtatgctcctgattactaccatctggaaaaatgattacacagaggatattccctttggaatcctggatgaggaccggtcctccttgtcccagtccattgtgaagcagtttggcatcaatccctctctggatattgtatattatgcggattcggagcaggatctgaaacaggccatcctggataagaagattgaggccggcgtcatgatacctgaaaatttcagccgggatatgtccctaaaaaaatcaccccaggcagtgatatttgcggactgttccaacatcatcaccggcggcggggcagtgggggcagcatcgtccgtgctgggtaccatgagcgcgggaatgcagcttaagatgctggagggaaacaacttttacccctcggcggcccagaccagtctgggtacattttcttacgtggacaggaccttgtatgaaccacagggcgattacatcaggaaaatgagctatctgctggttcccgccatcaccatgcagacctttctcatctcattttttattccgctcatgatacgaaaaaggaaagctctggcagcggctgccccagaaaagcggggggaggaattaaaagacggaatcatcaggacggccgtggtggcgggcggcgcggtggcggcccagttcgtagtgctgtgtgtggtgggactgtataagaatattcccctgaggggggaaattgggctctatctgttcagcaccatgcttttcatgctggcggccgtggcctttggcgtgatgcttgggtcatttaccaggaggctggcctgctttgcgcagctgtatatgatgtgcagcaacctgattatatttacctcagggcttattttcccgtactatctgatgcccaaatggctcagcattgcatccaggatattttcgcccattgccaatattgccgtggaactaaaggctgtgaacctgaagggaatcggctgggacgctgcctggccccagctggcgggaactgccctgtataccgtgttctggctggcggcaggaggcgccatgtacgcttggagcattaaaaaggagcggaggcttgccggggcggcggagtaagagatgaggcaaggtaatggagtaagagatggagtaggagatggggcaagagatggagtaggggatggagtgagagatggagtaggggatggagtgagagacggaataagagacggagaaaaaggggcggcagtgaaatgtgtggcagtagcatgaataaaacagaaggtatagaacagaaggtatgaaacagagggtatgaaacagagagtatgaaacagagggtatgaaacagaagatataaaacaaaaggtataaagcagaaggaattaaagagaaacagatagaaaaatccacaaaaatcatgtatgatagagagagcggcttcggtattgactgctttctcttttttgtaatggtcttatattccaaggcacagggaggggcggtcaccaatgattggggaatgggggtggtgtcttgcaaagcgctaatacggatatgattgacggcagtatctttcagtctattttctggttttcaatccctcttttgatagggaattttttccagcagttgtacaatacagtggattcctatgtggtaggaaattttgtcaataccaacgccctggcggcggtgggggcttcgaccccggtcatcaatatgctggtggggttcttcatgggcctgtccaccggcgcgggagtggtgatttcccaatacttcggggccagacagggtgaggctatgagccgggcggttcacagcgccatggcccttacggggctgttgagcatagtgtttaccgggctgggactgctgtatacaggacccctcctcagggcaatcggggtgccggaggacgtccttccccattcttctctatatctgatgatttatttctgtggaatcacattttcacttttctacaatatgggctcaggcatactgcgcgcggtgggggactccaggcatcccctgctctatctggcagtggccagtatcgtgaatatcatcctggatttcacctttgtgtgcgggtttcacatgggcattgcaggcgtggccattgccaccatcatggcccaggcagtgagctcattcatggtcatgcacaagctgatgcatacccgtgaggattacaaggtggaaatccgcaagatacggttccacaagaaaatgatccgcaaaatcattgcctttggctttccggctgcctgtcagcagagcatcacctcattttccaacgtggtggtgcagtcctatatcaaccggttcggaacggctgccatggccgggtattccgctaccctgaggattgacggatttctccagctgcccctgcagagctttaatatggctatcaccacttttgtgggacagaacatcggagcacgcaagtataaacgggtgaagaagggaatatttgccgcctgggttatgagttccctgattattctggcaggttcagtgggaatgtatttcggagcgcccctgttaatcagtgtgtttaccaatgatccccaggtaattgggaacggaagcagtatgcttcgcattttctccagagcatatattgtgatgcccgtgatccaggtactaaacggcgccctgcgcggcgcgggactttccaaggtccccatgttctttatgctgggcagcttcgtggttctgagacagatttacctgcttgtggcagtgcccatgactcacagtttgatggtggtcatggcggggtggcccattacctgggtcatctgcgcggcaggtatgttcctgtactatgtcaaagcggactggctgcctaaggaggccgggccggagggggaataatgcttccggttaatgcttccagtcaatgctttcagttaatgcttccagtcaatgcttccagttcattcttccagtcaatgctttcaggaaatcataccaggtaatgctgcatagttatggtccggtaaggccgccgctcagtaaaaaagcggcggcttttcagtatttacgcgcaataaaaggcgaaaaaatcaaaatatgaaacattttttcattaaaatcagataatattgacaaaagtgtttaaaagagtaatataaagtcataggaaggaaccaatatgaaaagtgtacttgtcaggatacaggaatattcagcgcaggccagcggggctgagaagggggtcctcagatttttaagggaaaatccagaggaagccgcaggatacagcataaagcagctggcagataaaacattttcctcagcggcaaccattgtccgcctgtgcaggaagatgggatttgacggttataaggagctgcagaaatccctgttatatgagtcagccctgcgcagggagagtacgcggcccatggagcaggagataaaaaaggacgacagcctggaggaactggtgaacaaggtgacctataagaacatagtgtctcttgacaataccaggaagcttgtggacctggatatcctgaatcaatgtgtggaactgctggacaggagccagaccgtgtatctgttcggaattggttcttccctgctggtggccagggacatgtatctgaagcttctcagggtcaacaaggcatgtgtgatctgcgatgactggcatgcccagctcctgcaggccagaaacatccgaagctgcgacctggctctgatcgtcagctattccggtcttactgaggaaatgataacatgtgccagggaggccaggctgagggaggcgccggtcatcaccatatccaggtttgagcagtcacccctggtccgtctggctgattataacctggcagtggctgcaacggaactgatattcaggagcggggccatgtcatccagaatatcccagctgaacatgatagatattttgtatacggcctatgtgcacaagcggtatgacgagtgtatggagcagttcagaaagacccatatagctaaatccgagggaccggaggaaaaccaaaacgcattgtaaggggaggaaacaccatgatagatttgtcagtgttggtaacagaaagcaggaataaggagaccatggggctggaccagatgacgcccctggaaattgttaccgttatgaaccgggaggacgggaaggcagtggaggcaataggggaggtcctgccccagattgcccaggccattgcctggtgtacggacagtctgaaacaaaagggaaggatcatctatataggagcaggtaccagcggaaggctgggagtgctggatgcggtggaatgtcctcccaccttcggggtgtcgccggacgtggtggtgggcctgatggcgggcggcacccctgcctttgtcagggcagtggagggagcagaggacagtcagaccatgggtgaggaagacctgaaggagattcatctgtccccggcagatatcgtcatcgggctggctgccagcggaaggacgccttatgtgatatacggtctcaggtatgccaaaaagattggatgcagaacagtggccgtgtcctgcaaccgtgattctgagataggaaaggaggcagaccttgccattgaaccggtaccgggacccgaggtccttacgggttccaccaggctgaaggccggaactgtccagaagatggttctgaatatgatatccacaggaagcatggtgggtatcggcaaggtttaccagaacctgatggtggatgttgtgcagacgaatatgaagctgataacgagggcggaaaatattgtcatgacagccacgggatgcaccagggaagaagccagggacagcctggaggaggcggagggaagcgtaaagctggcaatcaccatgattctgctgcagtgcggtgcaaaatccgcaaagacaagattaaatcgagctggggggtatgttcgtaatgcaatacaggacgtataaggaaaccatgctgccgcagatggtgcggctgtggaaagaggaagcagtgcgtatccggtataaggcctatgattcaccggaagaatggaaggcagagcttttggataaaccggattttgaccccgagggatgcattctggcctttacggattccggcagcctggcagggtttgcagcggcaatcagccagaaggaattcctgccgggacaaaaacgggacaatacgccgggctatatattccttctggtggtaaaagaggaatatgaaggcagaggtgtggggagcagccttttggaaaaagcggaagcatttctgaagggccagggaaaacatgaaataagaatcagccacaaatgccctattaaaatgtcctggtacatagaccgggagggccatgagcacaacaaggcgccgggaatcaggacagattccccgggatatatattttttcagagaagggggtatgagctggtccaaaaagaggtttcttattacctggaactggaaaaattttacattccggcagatgtacagaaacacatcatggagctggagtcggagggaatcagagttgcctggtttgacagtgccgggaatttcggatatgaggaaatgtttgagcgtctgaaggaccagtcgttcctgaaaaaattccgggacggaatccgggaacataagaagattctcatagtggaggacagggacggcagggtgatgggcacagccggaaccgtgtatccggaaaaaaacgggcggggtttcttttcggcactggcagtggacccggctgacgggggaaggggaatcggcaatgtactgttcttcagcctgtgtcaggagcttaagaacatgggagcggagtacatgacgatttttgtgacggaaaccaattttgccagaaggatttatgagaaggcaggtttttcagcggtacaggagtgggcgatactaaaaaagacggtatgacaggcaagagataagaaaggggaaggtatcttatgacaaagaaagagctggcacaatcaatctgtaatttggtgggcgaatccaatatcaggaccatagcaaactgctatacccgggtcaggctgactgtaaaggatccgggaaatataaaacgggaggagcttaagaagctggagggcgtactgggggtcattgaggagggcagccatgtccaggtggtgctgggtcccggcactgcggcggcagtggcccagcttatgagcgatatgacccaaattaaaagtgaagaggtggacgaggccgttctcctgaaagaggaaaacagggctaagaacaatgtcccctacaagaacatgctgaaaaagatagctaatattttcattcccattatccccgcattcatagcctgcggactggtggttgctgtctatgaatcatcctatgtatttttcccgggctttcaggatacggatttcggcaagatcatgagcgcgctggcctactcagtctttaccatcctgcccatcatcgtaggctataatacatccaaggaattcggcggaagtcccattatcggtgctgttctggcctccatactgaacagttcatccctggcaggggtacagctgttccatgtgtccattacacccgggcggggcggcgtgatatctgtactgatcattgcctatgtggcagtgctgctggagaaacagcttcaaaaagtcataccggatttcctggacatgttcctgcggccgctgattacggtctgtgtcatgacctttgtgggcctgatggtattccagcccataggcggtttcatatcggagaccataggagcctttgtcagctttatcatctataaggtgcctgtgctggccggtctggcctcagccatctatctgcctctggtaatgacgggaatgcaccatgggctgatagcagtcaacacccagcttatagcggatttcggcgtcacctatctgctgcctgttacctgtatggccggagcgggacaggtgggagctgcgttttacgtatatttaaagacaaagaaccagagactgaaaaagaccattaagaatgcgcttcccgtgggtatgctgggtataggggaacctctgatgtggggctgtaccattccccttggaaagccgtttatagcctcctgtatcggaggaggaatcggaggaagtattatggctgtgatgaaggtggcggccaaggttcctgagctgtcaggaatccccctggcgttcattaccaccagattcccgctgtatttcgtaggtctgttcgcatcctatgcagccggcttcatcgtgtgcaggctgatgggatttacggacccggaggactaaacatcaaaaaataaaaaagattaaaaatgcctaacccacattgccgttgactaacagccttcagggtgtttacaatataattaaacagaagggccggcatgaaaaagggatcccctgctcataccgggtatgaacgaaaaggcaacggaggtgtggttatgcagtcattatcagaggttaaggcaggagctgtctgtacgattaaatggatgttcggcaatccccaggtcatggagtttatgcatcagcatgacatcagggagggaagtaccatcaatgtattccagcacggaagggacagcatgataatcggaatgaacaatatgcgccttgcaatcggaaatgaggttgcggagcggatcaaggtgtgatgcaggcagaaaaaataacagaacagacaagcaaagcagaccgtgaagcagataataaagtaaatagtaaaacagataacaaaacagataataaagcagataaaaaaacagataacaaaacagatggaataagagccggaaaacaggccgctgatatcttgatgagaggtatcggcggcctgaaattttttttggagtttcctcttgaaatttttcctctaaaatgtttctctgccgggagaataattatgcagtcaacttcaaaaaatgtaaggtaagtcccgccaatttattgaatttttatatttatttaataaaa

SEQ ID NO: 3259 - DNA, 8815 bp, Unknown
  gut microbiota DNA sequence
ttttattacaacgaaaagaatgttggaagtgtgcttttcagcacaccccaacattcagtatagaacctttttattgtcaaaaagtacgtaaatacgttattttagggaatttattttaaatagatattatcaaggtgggaattgcagttttcaacagcaatcatttcatgtgcaaagtgttcatatcttttagcggtttctatactttcatgccccattaaaatgctcaaatcgtagacaccagtatttcccgttctgcgatagttatcaatattttggaaatataccccaaggggactaaacggtctttgcaacccttgccagtgacttgtaacgcaccacggtcaaaatccagccccttttttactaatgtgcatattcattctgcctaagcccagaacccagcattaaagcgattatagccttatttctggcagtcagccaagggacagagcattttgcagaatccaataaatattgtatctcagcagaagaaagcacatggacattctttttgggaggtttaggaacctttatctttaccgggtcaaagctaagaccatattcagcatgcacccatctaaggaatatacgggcatttctgacatatgtagaaatagtggccttggaaagtgaacggtgaagcaataccatgataattggtacgtttagcagacttaagggaatcacgcaattggacacaaaaatatgttgcaagctatttatgtgtaactcaaaggtcatatggacattacgaaaatggcactcgttcactgcctttagagcatttgataaaactaaccgagttatatggtgtaagctctgattatatattaggtataacagatgaaaaaaagccgtattccaaacccaagaaaaggaagtattatgttgtaaagatataatcaaatatagtatgataggtttgctgtctaccctataccgcacagcggaaagggggtgtgcaacatgtccgatgtattaaacttcctggttgcggttatggcaagtgtagctggttactacatatgcaaatggttagaccggaaccgtaaagacagctaaccaaaaagaagccccaaagactggtactctttggggctttgtttagtgcaacatgtgtactaaacttcctggtattattatattataccaatcctgccaatatgtcaagtaaccttaaatggcttaaatatactgccttttaattaagttgttccgggttcgaatcccggcacgctcattgatgcccagatagctcagttggtagaacagaggtctgaaaatcctcgtgtcgttggttcgattccgactttggtcatttagcacttatcttattgataggcgcttttttgttttattgtaagatttccttcattgtaaaaatgtcggaagtctgatagtataaataatgttttaagaatttgatatgctattaacaaatcatacaacaaatgataccaggggaaaataaatgagcagacggcgtaaaaaaaaggactcaccaattaagaccgtatttttgattattatggcagccattattatgatagcagccgtatatgtaatcatgtccgtggttgggaaaatccggtcggattataaaaatctggatttcactacagaggaaaaggagatgccttctatcaccatagatacaaaggatgagccaaaggccggatggaatgagacagataaaggttggatgtattatctggatgaaaaggaatatgtgacagaccagtggaaggatatagagggtttcctctattattttgacagtgatggtattatggctaccggagagttgaaacaggaaggtcagacatatacctgccatgatacaaagggatatctgaagaatatccagattgatccggactatgtacctgaaagcactggtgaaaacctggacagtcttgtgaggaccaatgcattctggtgttatctgagggctgaggacacaggactttttaagaccattctgtaccgcaagacagtggagaacaaggtagtggtgctgggagaggagactgccccagaaaagaccacaaggaattctatgcgtgcttacggtgattacgtatatttcctgcctaaggtaaaggaaagccagaaacagggcctttctgaggccgagagggggctttgtgataagctgttcaggatgaggccgggaagtgataccaaagaattgatagctgagaatgtggatggctatatggtactgggtgatattatctattactctcagggcggtaaaatttatcagactacctcgggcacagaggttgctaccggggaggccaggtattcggtggttataaaagatggaaattgttatctggtagatgacatgggaaatcccgcagtggctgaaagcggcagcagcgtcagcataggagaccgggtttacaggattgaggaagatggaaagataaaatatgtaaaacacggccaggtaaccattgacggaaagacctattatctgggcggcagcggaactaaatcttctgtctgcgtaaaaagcgatgggagcgatactgctgttatcagggaaaattatggtgtacagagctattgtattgtggataaccagatctactacagcagttatgtggataaaggtaccggcggagagtggtacagccagatttttaaagctggtttggacggacagaataaacaggcagtgtcagagcgtttccctggtgtcatgcagaatatgtattactatgaagatgagggccagatattcggggaatacaatcctgctatatggaaacaggcgtatggaaccgttgtcatgatagcaagagatggaggaatttatcagatagaggatgcatccgcacgtacaggtaagcatgtggacggaaatgacatgctggaaattataatggccagggacggcaaggtcatctgcctgtggcatgattgccaatgggagagaaacagcggaataaccagtatcctgtggagtaaagccattgagctcaatgcaggagacagacgcctgattgatatggtcccctcaacagaatccacagagagcagtgaagcccaggagacaggtgacataatccagccaattgagactatgccgcctgcttccacagagactgtctcaccggtggagccttctatcaataacgaccctgtcatcagcacggagggacctcatacggatacagctgtgcccacggttccggcgcctgctcccacggttccgccggtgacggaaccatctgttgaggtgaagatagtgccgttgggataaagagggaaaccggtattagcggggttcatcctcatcaaaatctactatcacatagaatccccgggaattttcgcggatgtcttttacaattccgtattcggatttaatgcggtaacgggcggcgaagcagccggacatggctacagccggatcaatgatatagctgtagctgctggttccttcccgctcgattatttttactttatctcctttatttacaagtccctggcgttccattttaaattcaatggttctcattgatacctgcttcctttcctacttcatcacataccatattgatataatcggataaggtactgttctggcagcctacaatgtaatgattgcatcggttgaccggaatcagtatcttatatgctttactgatgcctatggctgtggccatggcaggcgtaatctcccccaaaagggaattagccatgacaattccgatagggccgatgatgatatctgcgtcctgtgcattgacaataaccggattctcaccagtagcgccataggtggcgcctgctttcagcatggcagatgtggcgatgctgtttgttccgatggcatatgtctccaggcctggaaaacgcttttttagctgttcaataactgatttacccatcttcccgccctgtccgtctatgatgacaattttcatggattcaccttcttttcttttgtgctgggtatattttaacagaaatacaggggaaagtaaatgttatccacagatgggcggagtatgagggtggaattgtggataaagatgagcggaacaatcttatatgggaataaaaagccttgcaagccggtcttgacaaatcagagtcaggtgatataatcaagaatagcaataagcagcaaaggcattgagggaaacagtagtcagtgggaagtatacagagagcaggccggttggtggaatggccgcataccaaagattgacgaataccagtcctgagccgcgtcagggatgtccggacatgtgttacagcataaagaaggatgggaaatggcgccgtaccccgcgttaagggataaatgagtgaaaatcaaggtggaaccgtgtgaatgcacccttggacataagaatatgtccaggggtttttattttcccgttttttcacaggattccggcagcggacatattcagaaggaatgtttttcagcagaacagccggaatcatcatatcagaataacaccaaagagatggagcctgaaatggcccatagaagaaaggagattcgtatgaagatcattttaccagacggaagtgtacaggaagctgaggatgaattaagggccatacgccatacggcatcccatgtgctggcacaggcagtgaaaagattgtatccggatgcaaagctggctattggaccggctattgatgacggcttttactatgattttgacagggagggaggcttcacgcctgaggaccttgagaagttagaggcagagatggctaagattgtaaaggaaaatcttccggttaagccttttgtgcttccaagggctgaggctgtcaggttcatggaggaaaaaggcgagccgtataaggtagagcttatcgaagatctgcctgaggaggagaccataagcttttaccagcagggcgaatttgtggacctgtgcgcaggaccccatatcatgtatacaaagggtgtaaaggcatttaagcttacgagtattgcgggcgcgtactggcgaggcagcgagaagaacaagatgcttaccagaatttacggaaccgcgtttgccaataagacagacctggagagctacctgaccatgatggaggaggcaaagaagcgtgaccacaggaaactgggcaaggagctgggtctgttcatgtttgcagaggaaggacctgggttcccattcttccttccaaagggtatgacgttaaagaatactctgattgattactggcgcgagattcactacagggacggctatcaggaggtttccactcctattattctgagccgtaagctgtgggagaattcaggacactgggatcattacaaagacaatatgtacaccacggtcattgacgaggaagactatgctgtcaagcctatgaactgtccgggaggaatgctggtttataagaatcagccccactcttaccgcgacctgcctttaaaggtaggcgagctgggactggttcaccgccatgagaagagcggacagctccacggtctgatgcgcgtgcgctgctttacccaggatgatgcccatatctttatgagggacgaccagattgaggatcagattaagggcgtaacaaagctgattaatgaagtgtatacacagtttggctttgagtattttgtggagctgtccaccaggcccgaggattccatgggttctgacgaggattgggagatggctacaaacggcctgaggaaggcgctggaggacatgggccttgattatattgtaaacgagggcgacggcgcgttctatggtcctaagattgacttccacctgagggattccctgggcaggacatggcagtgcggtaccatccagctggatttccagatgcctcagaggtttgacctggagtacacggctgaggacggttccaagaagcgtccaattatgattcaccgcgtatgcttcggatccattgagcgtttcatcggcatcctgattgagcactttgcaggcaagttcccggtatggctggctccggtacaggttaaagtaattcctgtttctgagaagtctatggattatgcaactggtgtatatgaaaaattaaaggctgccggcatccgcacagagctggatcacaaggacgagaaggtaggctacaagatccgccaggcacagctggagaaggttccctatatgctggttctgggtgagaaggaagcggcagagggagcaatcacggtgagaagccgggataagggcgacctgggtgctgcgggactggatgcgtttattgaagatattaaaaagatgattcagacaaaagagaaataacaaccgcaaaaaggcgtttaagataaggttatatccgtatcttaagcgccttgtgctttatacacagcccatcacaggcaggttttcttatgccatgggaacagttcgctcatatccatccgcagttttgcgcagtacagcaccggatgtatttccggcaagtgtttctatggttaatgctgtaatatcatcgacaacagatttgtcagcttttatacagacatgtattgcattgacaagccagttgtgtgatactttgtttttgccggctgcctgaatctcacggtagatttggtttgcaatgcctctggcaatggtctccttttgcttcacatcatctttccaggttattttaagtttcacatcgtttttttatatcatgagtttaattccgtaccaggcttccatccgtcctcacggtcacaacctgccacggaatgaatttcccgctggcctggagggcgcgtttcgcggcattttcaataccgccgcagcatggaacttccatgcggacaatggtgacatccctgatatcattgagacggatgatttccgtcagcttttcagagtaatccaccatatccagctttggacagccgatgagtgtgatgcggccggctataaagtcattgtggaaattaccataggcaaaggcggtacagtcagctgctatcaaaaggcgggcatccttaaaatagggagcctggacaggagccagcttaatctgcacaggccactgggtcagacggctttccggacatcctttgtgaaggagggcgtcggaaggggacaagttccggctctggtgcatacgggcttttacggctgcctcatcataggcagctgcctccctttcctcaaaggtaatggcccctgtagggcaggtgggcagacagtcgccaagtccatcgcagtaatcgtcctttataagcctggctttgccatctaccattgcaatggcgccttcatgacatgcgtcagcacatgcgccgcatccgttgcacaggtcttcatttatcttaataattcttctgatcattcttttatcctcctcgttatgagtactttagccaatggatgttatgatagaaatatacaatgaagaggacggattgtatgttgttacaacaacatttcatatgtggatttttaccattttttaaagcaggcatgacagcgggaagataatggcgatggccggaaggatatttaagaccttggtccgtttgatgcctgcaatttttaatcccactgccagggtgatgatcccgccgcaggccttaaaattagccagcatggtatcagtgaccagggggagtatgtaggaagctcctccaaacagaaggatgcccacggcaaattgcggaactgcgataaagcctaccagatagcctgcggtggttccgaagataatggccgtaaagaaatccatgacagccttggcatagaggatggaatggtcgccggtcatggctgaattcatggcgccgaataccccggtgccgctgaagcagaacaggataatcatgctgattaatacatccatctgttcgtcatccaggttcacgggaagtttttgctccagcttgtgaagtccctttaacagattatcctccaggttcagaagttctcctatgaccgttcccacgataagggccagtaccacggctgacagactttttaacatgataataaggctgattcccatggtgatggccgacagaccaaagatattgggcagggcttcttttaatttctgtggaaaataattttttaaaactgcccccaggatacctcccaggaatacggcagcgcagttggttatgattccatatggcatagggcatttgtctccttgtttgattttagatgtaatgtttactttgttggtttcccggtatcagcatgattttccattctttgatataattcctggaacatttccataaatttaccaaccttttcagtagggatatcctgaaaggtatattcctccagtctggcaaatgcctccgttacctccctgcccatttcccttccgcggtcagtcagaaagatataaaaagatcgccggttgccgtccgttcttctgcgctcaataagggattttgcctccatgccgttgagtacggaggtgagggtagcggcttctatatggcaggcatttgctatttccttttggtttgccccatcgtgttccatgagataatccaggaccttgggctgtccgggagtcagcccggtatggtacagctccgccatgagctgcttcagatatatggcatggcctgccattaaaagatagtgaaatgtcatgaatatacggaccgcctttcaaaatatttagaatgctaatgattataattcaaactatatactgtgtcaattggattttgcctatgctgccgatatttattactttccccgtactttacaatcttcttaaattttatcatatatcaatattaatttatcgaatatcaataaaaatgtattgaaaaatagtataaatggtgttatat

SEQ ID NO: 3260 - DNA, 1856 bp, Unknown
  gut microbiota DNA sequence
gtcctccccgttccatggatacatacacaaaaaactgccggcgcagttccttttaagatactgcgccggcaggactgttttgctcctttgtctgccggggcttgggccccatttataatgctactccagcagccgtcccacatccagcttcccccacccctgctggttatggggaaggcccaggtccagggcccgttccctgatacgaagcttcacatccttgttgctcatgtccgggtacttctccagcagcagggctattgcgcctgacacaaggggcgtggacatgctggtgcctgactttgaaaaatatttgccgggctcattgcagcagctgatgatgcctgagcccggcgctaccaaatccggcttgcagacacaagccagtgtggggcctcttccggaataatccaccatgcggcttcccatgacgtccacttccttgtgatcgtcggagcagcccacggttataaccttgcggctgatgccgggagttgtgatggtcattcggcccggtccatgatttccggctgccaccactaccaccaggccgtcatcccaggccgcattcaccccccgcaccagaattgagttctctgtcatgtccctgcgggacaaggagcctacggagatattcacaatgcggatattatatctgtccctgttctcccggatccatttaagtccggtcagtacgtctgtggcatagccgtttcccttctggtccagcaccttcaccgatatgagactgcatcccggcgccacccctctgtatttcccgtcggaggagataccgctgcctccaatcattgcagctatatgggtgccatggccattgtcatcatagggcgatgtgcggtggtttacaaaatcagcaaaggctgtcactctatccttaaaatcctcatggaggtaaattccggtgtcaagtactgccacacccactcctctacccgtaatacccatggaatacacttcttcacaattaatgtcttctctcgcctgattcacatcacgattttctccttttttattaggatattctataatgaaggaatctgtgccagggcaccgtgtgacgcggtcaggcaggcaggactgtcaggcagataaaaccgcctgacaggagcaaaaatattttctttaaaaggaaggcggaacctgcttctgccggtccacgtcaatcacaccgtaggtattgattctcagcttcggaatgaccggaaggcttacaaatgccagggtcatgaatgcatctatatcgctgctgattcccagctgccttgtcaaaaccttcagagcctgcagctgctcctccacctcctccacggataaccggctcataactccgccaatgggaagcgcaagctcgcctaacacctgtccttctgccgccacagccaggccgcccctgttctttctcactgcgttggcggccaataccatatccctgtcattggtccccaccacaatcaggttatgggaatcatgggcaacactggtggccacggcccccttcttaagaccgtatccgcccacaaagcccagtcccttgtgcccggtgtgaagatggcgttcaaacacagccgccttcacaatatcctgctccaggctgacgccgggtgccagccccggagtattctgccagggcaccagacgctcctctgtgagaagttcatggggtttaaactgaataacccgctccatggcccccttttgctccagcaccaggtcctccagggtaacctcatccatatggaaggagttaaacacccttggaaatgcagtttccaggccaccggctgttttttccgcagattcggtatcctccctgcttccggaccgcggctcctctc

SEQ ID NO: 3261 - DNA, 1059 bp, Unknown
  gut microbiota DNA sequence
acccggatatccttcaagtcctcaagcactgccaggtccgctctcagcccaggcatgacagcgcccctgtccttcagtccaaaataccgggctgcattaaaggttcccatcttaatggcccgtatggggtccgcgcccagggacactgccctgcggataatataatcaatatgtcccatagaaatcaggtcgccgggatgcttgtcatctgtcaccagcatacacctctcataatagggggcctcaaacaggggcataagtgcctccaggttcctggcagccgtgccctcccgtatcataatccactgtcctcttccaagtttttccagggcctcccctgcatctgaacactcgtggtcagaccacacgccggagcacacgtaggcattcagctcattccctcccaggaaaggcgcatggccgtctataaccttgcctcgcctccctgcctccgtaagcttccccatcagatcctcctggccggcaaccactcctactgaattcatcacctctgccagccccaaaaccctgggattctcatagtatggctttatatcctccggccccagcacagcaccggactcgtccagtccggtggagggcacgcaggagggcatgacaaaaaatgcatccagggatagtccctccgtggcttttaacatataatccacgccctggcaccctgccacgttgccaatctcatggggatccgtaatcacggtggtggtgccatggggaaggactgctttttcaaactccggcggcgacaccatggaactttcaatatgtatatgcccgtcaataaaaccgggacagatatacctgcctgtcatatctacgttgacaagcccatcatattcccctatgccggctatgcagccatcctcaatggctatgtccccaatctctgtgcgctccgtaaatacattgacgattgtccccccttttaacacaagggatgcctttcttcttccggcagcaacgtccatcattttttttaaatcattgtattgtctcacacaaatacctccttctgtctattctttagcccccgatata

SEQ ID NO: 3262 - DNA, 27325 bp, Unknown
  gut microbiota DNA sequence
gtcaaaaatggcaattgtccctgggtttatgctctgcttcgtgttgttattgggcggctgttccaatgtacaggggaaaacaaaaaaaataccgggaagttcagaatcttcccggtacgtttaaatattatattttcattcagacagtttccttatgctttcatgcagcatccccagccccttttccgtcctctccacatacggcgaatcagcaagatactgttccagtatcagaaggttagcctccgttgcctccacccccagttcccttaaggacagaggcatatccagatgtctcatgaactccttcaagttctccatctcccctcccagaccattatagtgaagctggacaaacaatcccactgccactatttccccgtgaagggcctgccttgcctccctggtaaaacaggttctgattccgtagtatatcatatgggccagggccgactggttaaagctccttgtaatgttagagataatgcctgtgaccgcaatattgatgtaggtgacatattccactgcctttgtcaccgtcccccgccttatatcctctatggcctggtgtccataccgctccagcaaatcataggcaaattcagacatcctgtacgctgtatataaatcaaaggcagccgtatccggctccatggcaggcctgccgttaagcatctctatcttctttgccatggcgtccagtattccggccgccgcgtagcggcaggggcacccggagatcacatccaggtccacatataccccgtctgtttcatattcatatctccaattgtccttcatggctccctggggcgtatacatgacgctcatggctgtaaaggcggcgcaggtggcaatggaggtagggatattgataacgcccactcccgcttttccagccactgcctttgacaagtccatgatgacgccgcctccaatgcccaccacttcgtcgcatcccgcgtccagacattttttaccgagagcttccgccgcctcataactgcatacgccgtcataaatctcagcaacaaactccactccggcctctgtaagaccgggaagcaaccggtcctttacagcgtcaaaagccctgggaccggacacaatgtaagccttttttccaaaccgccttatctcctgtccgcagtgttccagtatgcctctgccctggcgataccttcctgcaccgaatttgacagcgctgtccatcccattgtttatcccgtttcccatcacagtatccacttatacccaatcctcataaatataatccggggcacaatacatgatttgcccgtcctttaccgtcatctcgggcttcagcagtttatccgcggtaaaggcagtccccttccagtccttataggtctgtttgaaatccatccaccggaagatggccacatccgccctggccccttccgacaggcatccaatctctccctgcattttcatcagtccggccgggcgctctgtggccatgctgaccacctggctcatggggattcccatacagatataccgggacatcaggtttggcagtgaaaaaatggggcgtctgaacatgcttcccaacaccaggtccgtactgcacatatccgcaataaatccctgttccttggccttaagcatgacgtcaaaatcaccgtgcttccttccctctgccgtgtcaaagataattccccgtttcctggcttccctgacacagtcgtacaatttgccgttttcatcaatgatcgtgttcttcactccctggtatacatgttcaaagatatctccgggacgcagaaccttaagcacctcactggtgggtaccgggatgttggtgcagtgaacctccaccggacagcctgccatgccggctatacggaccgtttcctttaacggctcaatgcccagtccctctgccagttcttcactctggcgtattttaagccccaggatattgtcctgattatcatggtacatacggacaatattttccgggttgaaaaatttcggattgatacactcatgatagctggttgtggtcagccctgcggaacacacctgaaggaagctcttgatggtaaccctgctcctggcaatcactgccgacctgaagattggataattggcaacgccggccgaaaaatctatggcagacgtgactcctgtgggcagataggccacatccggatatatgccgatctccgtgccttcctggaacatatgggcatgggcgtcaatcagtccgggaaacacatatcttcccgcggcgtccaccacatgccttgccggctccccttcctcatatctggtaattctgccgttataaatcgctatgtttcctacctgatcggtccggttggccgggtcaatcacatgtccgttcttaatcaataaatctaacattctaccacctccgggtatcttaccaaagaccaatgagtttccaataaggaaggccaatcaaaaagaaaataacaagggccattgccaccatgatggtgcccactctccagaagtccttctggggcacatagtccgacgcaaaggttataaggccggctccgtttccataatgggtaaggagggctccaaagctggcgaaaaatgcaagcagcagtcccaccaccatagggtttgcctttgtattcactgcaagggagaacagcaccggataaaaggatgccacaaacgcgctgttggagacaaagaaatagcgcaccgccagactgaccagcaccagaatcacggttactgccatgccgttcatctgggaaagatccagcacaacacccagctggtctgccagccatgtataaaatccggctgatgacagggctgaggcaatgccatagaaagcgccgtaccagataaagatactccaggcccctttggcagccattacatcattccagtccagcacatccagaagcagaacaagtgccaggaacacaaagcccaccacctgcatgctcaggttgacaaccggaagcttcggtccgaacatccatcccagaatggcaaggaggaacaggacaaacagtttcttctcagcagacgtaacagctcccagctcctttaaccccttttgcgcaagcggcttgatgtcatccagggatttgagttccggcggatagattttgtaaatcacatagggagccagcagcaaaaacaggcctaccggtacaatggatgccagaaaccaggttccccaggtaagggtaattcccaacatctcggtaatcagggacacggttatggcattagtggccataccggtcaggaacagggctgatgttccctgagagcttgcgtacatgagtacggtcagataggcgcccagctttctgggtgcattcttggcgcttgaaccagtgccctccgcaatattctggaaaataggataaataatgcttgtcctggaagagttggaaccggttgccgggcttaatacaaggtctgtaaataccataatgtagcccagactcagggtattcttgccggacttaagcagcaggttataggcaatacgcctgcccagccccgtctttacaaacgcagtacagacaatggttaccatagcgataaaccatgccatattattcccatatccctttagcaggatggatgtatccatgaacatggctgcaatgcccacgataatcagagtaatgatcggctctgaaaatggtttgattaccagtcccagcagcagccccaggtacagcgccacaatatgccaggtctccacttccaatccggccggcgccggtatgttccagatagcaattgttacggcagctatgaggaatagttttaaaaaccgtttcttttccatatatatcctccatatgttccaatcagccggcagtttctaccggcgtttccttctgttaaaaaacacaaaaccagtcacggcaaacccaatcatcatgacaaaacccactccgaatgtcagtgcgattccattcatgagccacacaggcgtcaggcccacgtatatatccttccatgacatgatggtggaatagacaccatgggtatctcccgcccctgactgggagtccggatcgattgcgcgcaccagggccagcccggtggatgtgttgccggtggcagccccaaaggccatacatgccttttcaaaccattcatccttacagaaacggtaagacaagtaaaaaatcagggggaccgtcaatccgcagatagtaaccgtatatatcaggacaggcgctatataggtagagacaaactccagattcagtgttgccatggctgtaaacaccacgatttccagaaagaatccactgagcatcttaactgtctttatgtccacataccggtccagcttcgtcatcttaagtatcttccacaggatggctcctccaaacacgccgtggagcacacccggtaattttgtaaaaaagggaatgcaggttccaaggaaatggaaaatggtccttcccagaaacagtgctgccagcagccatgatatctgaagcgccagatggttgatgctgatggcggttgtcactgtatggccggaagcagcccgtttttcctggggcagagtcccgccgtaaaaataggaaggctgtttctttggctcctttacatatgtaccccatccttttctgatcccataattgaccatggccattcccacaaccatggcaaatataaggccaaaggtagacagcaccattcccactgccatgttgccgtccacgcccagcttctgaaaagcagacgccgcggcagcggctgttccgtggcctccatggaatgagaaaacgcccatgacgccccatccctggggaagtccggtccatatctttgacagaacccagcccaggcctacacccaggcacatctgcatcccgtaggaggtcatggtaacacaggagtaatccagataggaactgatcttctcccggttgaaattaaccccgaacacaagggacgccatgacaatgtcaatgagcacaccgggcagttcatggaagctttccggcaccgcaatgatacccatggcctgatggcccaggagaagcagaagcagtccgccaatcagggacgagggcaggaacagcttctgtaccggcttaaagatctcccggatgaaaaaaccagccagcataaaaaccgccaatattaacatatcattgcataaagatgacactgtcatgataaatcccccgtttttcttttctgtcttctcctgtaatttcaagctttattatagcatgaaactctgtcctgccatgatttaaaagtcaaacataccggaacttttcttatttggctttttcgtgtctgtataagtcggcgcagtcacataatcaatatcattgattggccaggtaggttccttcccctcatagacctcctgtactcccatggccgcaaaataggacgccctgtgcgctgcctccattgtgtttcctccaatgtgtgggtaaatgattacattgtccagggtcagaagaggattggcaggatccaccggctccttctggatggcatccagtcccgcacctgcaatggttttattcttacatgcctcgtacagatcctgctccacaacacagccgccccttgccgtattaatcaggaaagcggtcggcttcatcatttccagacgctccttgtttaccataccgcgggtaattggggtattcggcacatgcagggaaacgtaatcgctctccttgaaaatccgatccaggtcccttaccacctcaactccctccgggaattcatccgctttcttatatgggtcataggccaggacattcatttccatgccaagcgctcgcacggccagacggcttccgatatttccgcatccgatgatacccactgtcttgccgtttactgtagtctttctggtcttaagctttgccttgtagtaatcctgaacccatattttcctcagttcaatcacattgcggctgcattccagcatcagaagcatggctgtctctgccactgaggtgctgtttgccaccggcgcgtacagggtctgtaccccgttgtcatggcatgcctttacatccagtgcgtcaaatcctgcaccgtggcgtaccaccaccttcaggttggggttggcctcgattacttccctggtgattggcgtaatacgcacaatcattgcatccggccggtgctccttcatatcagccagcacgtcctctgtctcaaagccgcgtcccctaatcagggtatgtcctgcatccactaataactgctcaccttcatccatgatttcctgtggtaataaaatcttccatcccatgttcttatctctccctgtgaattttcttttataatatgtgatttacatttatatacgtaaggttttgggcaccaaatcaatttacgattgattatggcctgtaaacatcgtcaataatttcaaatccctttgcctccagcgccttgtccacccactcacgtttggctgtgccgtttttggaagcttccagcttggcctcatctgctgcctggaatttcctggcttcctccagaatgacctctgcgtccttgcgcggaatgacgatgacaccgtccggatctgccaggatgatgtcgcccgggttcacactgattcctccgcaggctattggtacattgacctcgcccggtccctccttgtaaggaccgcccggggtggttcccgtacagtaaaccgggaaatcccatttgccaatctcgtcgatgtcgcggattggaccgtccagaacaatgcccgccaccttctttgtataccgcagatatgccatcatgacctcgccaatcagggctcttgtactgtcctcctcattggaaaccacaatcacatccccctcattgcacatgctgagggctgcgtgcagggccagattgtcacccgccctgcatttaaccgtgtaggcaggtcccaccatcatctgcgcctttgggctgctgaccaggcggatgcgcgggttcatggcacagctccttcccatgacatccgctgtgttggaggctggtatggacttaaactggttcattacctccatgtccggcatctctctttttagataaatacgtttccctactgacataacattaccttcctttcttaccaaacacttgactccttgcgagttttttgttgtaattttccttaaaaccatttgctttcctgatagttttattgtaatatatagctaatcacaaatcaaacaatgtattttcaagtttttaacaaaataaatttgtggaggttgaaatcatggatacactaagcctgtattacttctcggagcttgccaaggatctgcacatcacccgcactgccaaccgtttatttatatcccagcagacactgagcaaccatatcatgagactggaggaatattacggggtaaagctgctgaaccgtaagccctccctctcccttacatatgccggagagtatgtactgtcatttgcagagactatgaaccgtgaaaacgcaaaccttatggatattctggcagatatacagaagcagaaacggggccttatcctgttcggcgccagcaccctgcgcatgagcgccagcctgcctgatatcctgcctgagttctcatcccggtatcccaatgtggaaatccgtatcaccgacatgaactccaagcggctggaacagttgattctgagcggagacctggacctggccatcgtcatatccgggggcgaacatcccagtatagaggaaaaacccctgatgtccgaccagatttacctttgtgctgccgatacactgcttcggaaatattatggcgacgggacagaggatttaaaacgaaaggcccgaaacatggcggatgtaaaagatttctccaggctgcctttttgtattctcaataaccgcatgggtcagaatatccagaaatgctttgacgaggccggatttgtccccaacatttacaccaccagcgcctatgtgcagatcagcacatccatcggcctaaaaggccttgccgcatgcttcgccacccgcaacagcatattgaaccagaagggtgaaatctctgaggatatcaatgtatttccgctgtactgcaagggagagcccctccttcagcagatatccgtgattcatcacaaggaccgctatctctccacctatacgcagtattttcaggaactgatactaaaatatttccatgaggttgagcagattccgattgaggaactggtaaactcgtcctctatttcactgcagtaaaaacaccaggcgtttccctgctcagtttgaaccgggaaatgcctggcgctttatctgctttatatctgtctcatcaaaacaggcgcatcgtatcttcaaatgtgatggcctgtgtttatcctattacggtcattctattatctttggccgcctcttcaatcaattgttcggatatccaaaatcggctcagatccgctgtatctctcagccatacaatccgtccgtttcggctggcatcacgtcgtacacatgtttgcaggcaaaaacgcagagccgaatcatccgtaagcatgacaacaggcagctttgcgcctgcagtgattgcaactgtttgtcctgcctgtatagttccaaattccggtatttccacctcagacaacagctgctcaaaagcattcttctcattgcttacaccatacccccactactcttcatgttttccccagccctccaattattcaatgttaaaaccagcttctctccatccagctacttgtcatattttaaaaggtccggcacaagaaccggactatatgaaacaattatatctatacaatttttccaggattcagaattccctttggatcgaacacacttttgattcccgacatcagccccatctgttcctcacccagctgatgtttcaggtactctctctttgcaaagccaattccatgctcaccagatacaagccctccatattcttccgactttctgtacatccgttcaaaggcctcctgcttttttttcctccatgtatcttcatccatttggtcccggcagagatacacatggaggttaccatctccggcatggccaaagcttggaatcctcatattcaattctgctgcagtctgatgcgtaaatttaataaaatctgccacatagcttctgggaaccaccacatcgcattcatccatctccgttgtagacgccttaatcgcctccagaaaagcccctcttgcagaccatacactttgttttcgctcatctgtatctaccaaaaacacatcttttgccccattattgagacataaatcagccgccctgctataattatgttccacctcgtctctgccgtttccgtcaaatgtcaacaaaatgtaggcgtcactggaggtatcaggaaacttttttcccaaataatcttctgcgaaaagaatcgtcgttctttccataaattcgatggctacagcctggacctgggactctatgattttaggtacagtctcaattgcatcagaaatagtatgaaatggtatcagcagactgactgttttttgcggaagcggcaaaagttttaaaatggcttttgtgataattcccagtgttccctctgagccgattatcaaattcatcagactgtatccagaactgttttttaccaccttgcctcccagttccagaatatttcctgccgctgtaaccaacgtcagtcctctcacatagtccctggtgaccccatactttaccgcccgcattccgcctgcatttgtgctgatattgccccctatggtggctgacttctctcctggatctggcggatagaacagcccctgtccttccacatattctgccagttccatcaaaagtactcccggttcaaccgtaacggtcaagttctcacgatccagctctaaaatatgattcattcccgtggtttctatcatgataccgccatgagtggctactgctcctcccaccaaaccagtacctgcccctctcactactaccggaatgtcacggccggaagcatacttcatgatatttgctatttcctctgtactaactgcttttatgagaatctcaggcattgaaaatacatcccccaattcatcgtgcccgtagtcctcactgatttcttctccaatcagcactcgttccggcggaaacatggccttaatatcatctatacattcctgattcatccgattcttgtccatatctccccctccttcatccaattggccagctccggtaagatttcgtaccaatcaccgacgagtccataattggcaatatcaaatattggtgcttttttatccttattaatagctatgatgcagtcagatcctttcatccccgcagcaaactgaacggctccggaaatacctatggtaataatcagtttgggttttacggttcttccgctaagccctatctgttgtcttgcatcaaaccatccattctcaatcaatggtctggtactggccatctgagcccctaaccggtcagcaaacacttttataatttctaaatccgccttggttctcacgcctcttcccacagccacgatagtttccgcatctgatatatctgcctgccgtgtcttttcttcatttgaaaggacctgaacagatgcatcaaaaaaaccatcacttatctccatgtctactacagaaccactggggaactggtttcgctctgcctgagaaaacaccttatatctcactgtacagaactgcggccgatgtctgggtgtcactatctgagccataatattgccaccaaatgccggtcttatctgaaccaaatccgaattatccttcatctctaaaaccgtacagtctgctgtcagacctgtcctaaaacgcgcggccacccttggtgccaatgacctgccttcgctggtggctcccaccaatatggacgaaggcttcgcattctcgataaaatcagagaatacatttgcatatgtcataatgttaaaatcgttcagttcctgatgattgtacaggaatacccgttcgatcccataatacagcaattcctcagccttttcttttacacggtttccaataagcagacagtaaacaggggcctgtatcactgatgccagttcttttgcttttcctattaactccagtgataccggatgaattctatctccatccatctgaatatatacagcaatccccttccatttttctttctcgacagcacaatctcccaaatcctcatcaatccactccactactccggccggcccttttttcacacatatgcggcacattctgcatccggatgatatagataatataccgttctcttccgaaatcgctccaaaagggcagagttcttctaattgttttgctatatccttcgtgactctgtcctgattgacttttattttcgccatacgtttctccttcccggtcagtagctacagaaattttttctcttgaagaatatgaatcaaatatcgggctaatttctgtccgttttcttctactatttctttatcttttttcttttctggtggaaaaatccgttctacctgggtgggagaaccatcaagcccataatgtttactgtcctgatcactaagttcctttaacgataccgtcttaagacaatccaatgacatgttcagttttctcttataagaaggcagcctgggtgtgtttgcatccttctccacagtcaaaagacacggcattttcatccgctgagtctgtattctatgttccaggttcattcgtatggtaatttcattttcacctatatcagttatatccatcacatttgcaccatggggaatccccataaattcagcgatttccggtcccacctgggctgtatccccatccgtggtctgttttccgcaaagaatgacatcaaatgtccctgccttttgtattccctgacagagcgtataactggtagcacagacatctgcgcctgcaaagcacctgtcagaaaccaacactcctgattccgctcccatataaacagcctctttcagcacttccatcgcctgcatggggcccatggtaatcacagttactcgtgcattctctttttctgccagttcaaatcccatttccagtgcaaaaaggtcatatggatttaactttgattccactccatcccttttcagcacgccggtaactgaatccacctcaacatcagcagttcccggcacctgcttaatacaaacaagaatttccataggcacacctcagcttttcaaaaaaccgttcacagattcacgtacaggcaccctgggtgaatccattttaggagataccaccacaatttttacttcccccggtccctcagctaccggaacaaaatgtagttttcccgcgtctataatcaattgtgtgccttctggaatacgcacaatctgtatagacgcctcattcaccttaccttctgaatcaaaatttgcaaagggcatcaaagctgtaccttggacaaagtaaaaaaactccttgtctttatgatattcaaactcctggaactgcggttctgccgtctgacaagacaatattcccccgctgatttgggatgactgaaaactggcaataagtggcgaagcagcccactcaaaatagttctctctgtatggctctgtttcctctctcaatactgtcactccctctattttcgtgtcttttatatctgtaaccgctatctccatcctaaactctcccttcttaattcttttcctgtaccatcttcatatccgccagagaatccgccaaatgctcattaatcgtttcctccgctgcacttacatctccgctctgtatggcttcaatgatagcgcagtgagaccggtaggccctttcaatattttcatctaacataaacaccttatttctataatcagccaggcagtctgtaatggttttttcaatgcatatcagcagtgggttcttacttaccgatgtgattttctgatgaaattcctcgtcataaagcgtcataagcacacctctgttctgcctggtgtgaccacccgccaagagttcctttgtcttttctgaaatcacgttaagatgctcaatccactttttatctccctttttcattgccatcctgacagccatcagctcaacagcattgcggacctccatataattttctatattctcgctgttctccctgaaccaatctgcaatttcacttcgctcaacctgcggcttctcctgctttctgaaaaagactccctttcctcttacggactctgttatctttaatgcctgcatcatccgataagcttccctgaccgttgacctgccgattccgcacatattgcagacctcctgctctgtaggcatacggtccccctccttcagctgattttcttcaatatattctttcagccaatcaatcgtctggtccaccacagaaattttctctatcttcattttcataggtctttccccgattctcaaatttgtttactgcctttagaatgtatgtatgaaagcctccgattaacggccccaaaccaaatgtcaacaacactgtcccggcacctatttctccgcccaggcagaacgccatggctgcgcatatcaaatccattaccagtttcacattccccagtcccagtcctttccggtgaaatgccaccaccaggtcatcggtaggtccgggaggaagatctccttccatataagccgctgcgcagaaagccactattatcattcctcccgcaaacagcaggtatggatgtagtgtactaatcccgctattcaaacatatcctctgccacaggtctgtaaaaacacctaatagaaaagaagtaataaatgtggtaaatcgtggtatcctgcgccggattaccgcggtcagcaatataacacacacagaggaaatataaatccctgaagaaaccggctggcccaacagaccggccagggcaaaattccaggcatcataaccacccgcccccagcccggacataattgtcatcaccacacccacaggcatgagtataattcctatcagatacaggaccagattaacacaacagctatgtcttatccggacattcttcttcatatttcacaaacagccctgatagagttcatcagtttttcccggttttcctctgtgtcctctacaaatgccgtactgtgcaaatactcaaatatcttctggatattcttccctgtttccggaataccaagttctttaagagtaaccggcatctccatccgcttcatgaaattccgaaattccggaattttctccggcgttccattgtaatacaattggagtatcaatgaggttccgacgatttccccatgaagataggacaaggagtcattggtaaagaacattctggcacagtaatacatttcatgggcaagcgctgtctgcccaaatgctttggaaaccccactgatgacgctggtcagcgcaaaattaataaacaggaaatcatgaacctcctttgtcagccggtgttcccgaatatcatcatatacctttaaacatgtctccttaagaatatcataagtatattttgataaatagtaggccgtgtataattcaatattaaaatcattaaatggcatagaggcatgaccatgctgtacctcaataaacttcgccatggcatccagtatcccggatgcagcatatctgggaggctgatgaatcatgaccgtctcatcaatgattaccgcggatacttcgtaatcatggtaaaaattaccgcccactgtaccgtatgctgccccctcctcagtatacataacactcatgggtgtatatgccgcgcatgtggctgcctgggtcggaatattcactaccggaagctcagccatatgggcaatgctttttgctaagtccatgatcttcccgcccccgactccaaccactacatcaaagctgttttttttacaatatgcggcataatggtttgccgcctctctggtattgtaaccggggtaaaccacaaattcatgagtgacacaggcatcacacaaactcctcctcagcggctctccggcaatatcgagagccgtaggacctccaatcaccagtgcatgatgaccaaaccttccaatctcacctccggccaatttaagggcatctggttcctgtatatatcttcccgcaccaaatttaaatgccacatctaattttgtacccattttatgtaagcctccttctctaaaccttaagatatttcacagcagcccgttcaatgtaaagtccctctctgaaccttgccataaactgttcaaatcccaaatgcccttctttatccggtacctcagttaacgtccctgtgtcctggaatacatgtccgttcaaatattttgcaaggcccagattatgattatcccttctgaaggatgccaggattgccattccccaggctccgccttctcccgctgtttccatcactgttacaggaacattaagtgcgtctgacatcatcttctggccaacaccctgggttttgaaaaaacctccgtgccccaacatacgcgccaggcagataccttccttttgtaccagaatatccattcccatccgaagtgtggccatagtcgcatacatctgcactctcatgaaatcggacagatgaagctcactgtccggagtcctggcaaagagcggcctccccgcctccattccggtaatatgttctcccgacagatagcaatatgacagcaggcctttacaatctgatttactctccattgccttgcgaaagagccgtccgtatagttcatcggcagttacctcgcatccgaacagttcagctgcctctctgaacatattaacccaggcatttaaatctgacgtgcaattattgcagtgcaccatggctaccggctccccttccggagttgttaccaagtccagttccgggtaaacaccggagagcggatgctccaaaaccatcatggaaaatatggatgtaccggctgatacatttccggttcccggctcaacactgttggtcgccaccattccggtacccgcatctccttccggcggacacatgggaattccggccctgagatctccatccgggtctaaaaaagcagctccttcttctgtcaatgttcccgccggcactccagccgaccgtacctccggaagaatgtccaggaccttccatggatattttttatcagcaatcaactggtcgaagcgctctgccaggtcttttctgtaatccttttgttctgtgtctatggggaacattccggaggcctgcccgattccaattaccttttgtccggtcagcttccagtgaatatatccgtccaatgtggtcagataacgaatctggtcaacgtgtttttctccgtttaaaattgcctgatacagatgcgctatactccatcgctggggaattggaaagtgaaaaatttctgtcagtttttgggaagccgccgctgtcatggtgtttctccaagtcctgaatggtaccagaagtttttgattctggtcaaacgccatatagccatgcatcatggccgaaactcccatggcgcctatagtatgcagtgtaatatcatatttcttattcacatcctcttttaaggaccggaagcaggagataagccccgtctgggcatctgccagacgataggtccatattccctcttcaaaccggttttcccagtcataactgccctgtgcaataggcttattctttccatctaccagcactgccttaattctggtagagccaaattcgattcccagagccgtatttccctgttctatcgcattccttatctgatccctgtccatactgtccatcctatctgtacattgggccatacgcctgacatgctctgtaatcctgggcttccttgtccattccgaatgcattccagcatgccggacggaatattctctcttcttccacattgtgcatacataccggtattctcagcatagagcaaagtgtgattacatctgcgcccacatgaccataacttatagcaccatgattagctccccaatgattcatcacatcataagcactagtaaaaatgccatgtcctgtcactctgggagcgaaccaggtacagggccatgtataatcggtcctcttccaaagctggtccgatatggattccggaagatgcacactccatccttccaccagctgcacaacagggcccactccctttaccagattcagacgtatcatggtcatgggcatctcggcctttgtctcaaaccgtgatgaataaccacctccgcggaaataccccaaatccgcctcgcaccatgttgtagcattcagacagtttttcacatctgtctgcgtcatttcccaccatggtttaatggctggcttcccttcattatcccgtgcttccgcacaggcatccaggcagcatgcgccggaatttatcagatgaataaaaccgccggcctctttggctttaccttccaggcaatagcctgttacacgttttaccgcatcttctgaccaacaagtcctgacatccgcaaacatctgagcacgattggtgagaagcttaagaagcagcatgcttacaccgttgagtgtatcattctccgtagccagaatataaggttctctggggccgttccaatcaaaagatgtatttaaaatcgcctcaggaaaatccgtgttgggatagtggtccgtccattgcctctgtccttgaaaaccagccgcaagagcattgtgccccaatgtttcctcgcggtgttcatctgaaaatgtcgggttgccgttcattaaatccttgataataagagcgcatttcactgtaaattcccagttcttatccttcttttccctgctgtgtctggcaaattccggattcttgtccagcccctctttacagttctctctggtccagtgcagggccctttcatattcgttatgattatagatacccttatcaattctcctgagaatttccacttcatcgactgactccaccctcattcccagatattcctcaaaaaaatcagggtcaatgccggaaccggatatccccatacacatggagccaatctgcaaataggattttccccgcatggatgcagctgcaatggacgctcttgcaaaacggagtagtttttccttcacatcttccgggatctcagggtcatctgcttcctgcacatgtctgccatatatcccgaaagccggaagtcctttcctggcatgggctgccaatacagaagccagatatacggcacccggacgctctgtggcattcagtccccacactcccttaattgtcatagggtccatgtccatagtctcagaaccataacaccagcacggagtgactgaaagagtgatatctactcccagctttttaaacttatgtgcgcaggccgctgcttcggcaacacgtcctatggtaccgtccgccagcactgtctgaaccggctgaccattcgagtaccgcacgttctgctcaaacagttctttgactgctctggccatattcatggtctgctcctccagcgaccctctaacatccagcatgccctgtctcgcatcaataatgggtctgattccaataattggatactcccctatatatctgttcgtatacttcattctctattcctcctttaaattccaagcccatctggtattctgtacggcaaattttccgcctgttacctccaaatcaaaacctgtcatatattccgcctgttcagatgccagaaatacaatggggcctgccaggtcttctgctgcgcccagacgtcccagagacacattctgaaccagttgctccccattctcttttatattggctttgcttatttccgtatcaatcatcccgggcacaacacccaaaacgcggatatgataaggtgccagttcggctgccagtgttctggtaagactggaaactcccgacttagccgccccatatatggctcctccggcgctgggaatctttgccgcgaagctggatatattaataattacgccacgttcctgcttcatcataatgggcgccaccagacgtatgcaatcccataccgccttaaggtctgtattcatgatggtgtcccattcatcttctgtatactctaaaaatggcttatctatggcaataccggcattattaatccacacgtccacagttccgaactttcggcacaccttttccgtaaaccagcgtaccccctctttgtccgccacatccagaacttctccatagaaattgtcataccccagtccgcgcatctcccggcagaagtcatccaccttttcttccgttctcgcaaagacagctacagctgccccttccttcaggaatccccttgcagcctcttttccgattcccccggccccgccggtaatgactactgttttaccctccagacctaatctcatcgctgcctccatcatccgcccaggtatgcctttttgatctccggactatccagaagtaccgaactttttccatgattaaccacatgccctacttccagtacataagttctgttggaaattcccatagccataaaggcattctgctctgcaattacaatcggggtttttttcatctcattgatatgtataatggcccggaacatttcatccacaatgaccggagccagtcccagggaaggttcatcaaacataagaagtttaggattgctcatcatgcctcttcctatggctaacatctgctgttcgccgccgctcatggttcctgctgcctgtttagaccgttcctttagtctgggaaacaggtcgtacacttcagccacatggtctgccatctccccttttgaatactttttgctgaaagcgcccatctccagattctccagcaccgtcatctgaggaaatacctcccgtccctcaggcacatacacaattccatcataaatggatttatggggcttttggttatggattgcccttccgttatattcaatggaaccctgcgcggtgcggttgatacccacaatggttttcatcaatgtggtctttcctgctccgtttgccccaatcagggacacaatctcatcatcacccacctcaaaggaaacgttgaacaatgcctctacttttccgtaatatacgttgatattatttaccttcagcatgtgccaacacctcctccttaatatgcatgataggcttataacggtcaccaagatacgctttgattacctcatcattattctgtatttcatccggagtcccctccgcaattttcgctccgaaatttaacaccgtgatattggtacaaatattcatgaccacatccatgttgtgttcaatcaggaaaatatccacccctgaatcaaaggttttgagtataatatccacaaactccttccgttctgttggattcagtccggcggccggctcatctaaaataagcgtatccggtttcagcatcaaagcccgtccaaactctgtcattttctgttttccgtaaggaaggttttttacatttacatcccggatatcctccaggcctatatattccagcacttcctctgccctttccctaagtaactgctcctcttttccagcttccctgaaatggtaaagaaacttaagaatacctaattttgtcatctgatggcctccaaccatcagattttccatgactgtcatggactggaataactttaaattctggaacgtccggcttatgcccaaacgcgctatctggtacggctgcataagggttgtacatgtattcttataatatatctccccttctgtaggtgcatatgtaccggtaatctgattaaccgtggttgtctttcctgatccgtttggcccaatcagggcgtgtatggttctttttttcatttcaagggacaaatcattcactgcaacaaggccggagaatctttttgtaatgtgatccagctttaaaattgtatcttcactcattatctattctccctcctttttgcacagatgttttatcagaccaaattttccaaacggaccagtatgggtaaacagggagacaatgccattgggcaggaaaatcgcaaacaacagggcgattacactgaataccaaccagtaataactttccatgaaacgcaggaactccggcaaaatcgtgataaccgcaccgccaatcacatttcctcccacggtaccgatacctccaatcatcatcatagcaagatagttagccgataaatcctgaacaaaggtggttgggttgatatatcccatcatatgtgtatacatggctcccccaaaacatcccaatatggtggccagggtaaacgcaagtatcttcatctcagcaatattgataccgctggcctcaaccgcctccacattgtcccgtatcgccttaaataccctcccccatttggaatgaacgattcggtatgccatgatagtgatgactattacaatagctagataaaaataatagattctgaaggatgtatttagctctattccaaaaagattaatccacggtatgttttgtacgcccattgttcccccggtcaaccccacccaattcgtaagaataagccgggttatctcgctgaaaccaatggtagtaagggaaagatatacgccttttaagcgcagactgggatatcccagaccctttccaatcaggatacccattacgatggcaactataaaccccaccacaaccggcatatgaaatttagcgctgcataaggcagcagagtaagctcccagtgccataattccagccgtacccatattcatctgtccggtcagtccggttataaaattcaatccggtaaccaccacaatattgaccagcgtctggcacagtacgatgtgatggtaggtattcttgtcaacaatcggaatgaggaccagcaggaagattccaaaaagaattcctattatctttgtcgatttattcatgtgtacctccatcatttttttctgtgtcccagaagaccggtaggccgtataaggagacatgcgattaaaagtacaaaagctacacagtctttatacagtgtgggaatcacaagtgtgctcagattctccagtattcctattaccacgcctcccaaaatcgctcccggtaaatatccaaaaccgccaaacacgccggccgcaaatccctttagtccaatcatgttagctatggttaaatccacagtaaataaaggaatcaccataatgcctatgactgcacagattgccgcactgagggcaattgttaaatttatatttctggtgacgttaattcccatcaaggtggccgctgtcttgttctgctgtacgcatctcatggcctttcctgttttcgtgaaattaaaaaacaactgtaaaagaatgacaattgctatggagactacaataacagtgatgtttgctaccgtaatcacaatatccccaagctttaccgttccttttaaaaaaccgggaactgtaaaaggggtggcaccccagataattctggccagttcattgagaatccttcccaaaaacaccgtacccataacagcaaagattggggacgtcatattacgaagaggattaaagatcccggtggccaccagaacaccaaatataaacatggtaagaaccgtggccaggactcctgccaccggattagttcccatcctcataaggaattgagctgcaaagatataagcacccagcataatgaatttatcatggctgaaatttaacagaccagtagaattgaaaatcaatgtatactcaattgccaccagcgcataaataaatccaagagcaagaccgcttacaataagctggataataatgctgtaagtcattggcgacctcccatctcttagtttaaaatggatgcaaaccgcattcctgtctgcatccatttttcaacgactgctactctaccgtcacataatctaccatgccaggaatcttctccttaatctgcgcaataacacagccatggaccatatttccttcttcatcacatgagaacactccttccggaagttttatatcctttgtttccgccagagcatccctgacagcctgaggttcggttgacccggctctttctattgcgtctgccagtacataagccgcgctataatatgtagatgcataaagttcaggagcatatccatattttgctttaaaatcctccacgaattgctttacagtgtcgtcatcattcgttgagacaaaatcagttacagcataccatccttccacatactccggctccagcagatttaacacctggtccataacaacacctgcggaagcaattaccgggacatcaaatccgagttcatacagctgcctggcggttaatgccacctcagcatcatctgtccatgaaataatacagtcaacgcctgcactctttagctgcatcatctgtcctgttaaatccttatcgcctgcattatgtccgactgccacatactcgatgccgtctgcttccaatattggaatgataacatctcttccaccggttccaaagtcattattattgtaggaaattccaatcttcttagctccaagcgtatcaattgcatatcttgctgccacctgtccgttgattgtgtccgaaggccttactcggaagaaataagggttatccaattccgctaatttggggctggaaccgccagtcataaatggtatctgggcatttttatacaaatcactggtagctgctgcatttccggaggtatgtggtccaatcacggcacatacgttctcatttaataatctggttactacatttaccgccgttgtctgcgtattttgatcgtcctccgctacatataccagtttcttgcccaaaacgcctccattggcattaatctgctccaaagccaggtcaattccctccttcgttctctgacctgccaacggaaagttgccagtaattgcgcagctgacaccaaacgtaatttccccatccaattctgctgatgtctcagtgttttccttttcagagctgcctgcctccgtcttttcttcctgcgtctgtcctgaatcagtcgatgcagatgcatttgttcctcctgttgttcctccccctgagcatgctgtcaaccccagaatcatgactgccgccaaacttactgcccatcgttttttcatcataccaaaatacccttcctttcatcattcgttggttatccgtttactttaattccaatggaacccatagtgtccatcagaatttttctctcctcctcagtaataggcgccagaggccctctgcacggtccgatcggaatgcctgttaccatctcaatcgccggtctcataatcgaattcggaagaattcttccattctgtccgcatgctttacaaaatctgtaaagcggtacgaacagttcctttgccttatcatgatccccctccgcaaatgcttttaaaattgtacggatttcatgtccaaagatatgggctcctccgcttacaacacccatggctccctggactaccgtgggtagaagcatgatatcatctccgttaaagattacgaattccgaattaatatcttctgttgctaatataaagtccgtaatctgtgtggggttaatgcctgcctcatctttgattccgatgatattctcaatttttgaaagctctcttaccgttggggcatccacgtttacacccacgaaaatcggaatattataaaggaggatattaatatgtacgctattggcaactgccttgtaatggttatagatgccatcctgggtaggcttgttataatagggggcaaccaccatacagagctcaatgcctaaatcctcagcctttctcgtaagagcaatcgtttcctttgtagaggcgcatcctgtaccggctataacaggtttcctgccagccgaagccttaagagctgtttccattaatctgactctttcatcaaatgtaagcagggatgcctctcccgttgttcctgtcacgattaatgaatcacaaaggtcattttgaatcaaatattcgattaagtcttcataggccttgtaattaacctcttcattggtatcatacggcgttaccagggggcataaaatctgtccatacttctgcgtaaactcatttcttgtcatttgatgttctcctttgcacttttaatattggtctaatcttatatgttttgcggttatcatgttgtctgataacatgataactattttttcataatatgtcaatagatttttatattacagtatatttttatgcattatgtatatgataccgacgtttttttagagtaaacagcattttcctaattccatgcattttacaattgacatgttgtctgataacatgatatgctatatttaatataactatttaattagtgccatatacattcatatacgctccgctggccccgctatcctaatgaaaaagccaggtcgatgtcagatatactggaactattgcattttacagaaatataaatatcccccccatttcggtaatagcacttgtaaattctggtaaacgttgataaaatataaaccaaccggcacgggaatgactgagagaatataagcaaagaaggggaaacgaatgaataaacctctgaaaagtattgcaaggatttctgttgtggatcaggcaattcagaatctccaaaattacataacggataataatttgcagccaggtgacaaactgcctacagaaaaagaagtctgtgaaatgatgggaataggccgctccactgcccgagaagcttaccgaatgttaaaagcaatggattatgtaactgcgattcagggaaagggcatttttttaagtgacaagtacagaaaaaatgattccaatgagatggcgcttgaatggtttcgtgaaaatggcagaagtatgattgagttcatggaagtgcggatggccatagaacctatggctgtacgtctggctattccaagggcaacggattccgatattgaggcattagaaaaaacgcattttcttttccaacaggctcttaatgacaaaaacacagtcaaactgctctcctatgatgaacttttccacaatcaaattatggaatttactgataatcagctgatgattcgtattagtcagaatatcactgaatgcttccgcagttaccgctccaaagcctttgctgtggataaaattatgggaaatgcagttacgccgcatgcaaaaattatagatgctttccataaacgcgatacccagcttggttataatctcatgattgagcacctggagatttctctggaggatatactgaaatattcgacaccttaaatatccatttccaacaattgaccgctgtaccccatctttggaggaatacagcggttttattctctcacctttgcacgataatcacatttccggcactacgccagctgcaactccctatcttccctatgatacgcacccggacaactgcagatatcctgctggttcccaacgagatgattagatgcatccgcattaaagtatcgttaatattaatggcgcaaaaagtacgtttttacgtggtttttcggtatatttgtgactttactgtgtctaataggatagtataataaggtagaaaatgacataaaatcaggcgggcccggtcacatgatatactctccctgatttgacagtatttttatttcactgtctcctcaagagggagcatatcaaatctggtacccgcctcgttgcattttagtttgaccgtggacatggacgcccattccatcttccgtcctcaaatcctacgttataaccatcattaaaaccttccctgtaagcccagcgccgttcgttagcacaagggtcccaattgttgccccaattttcgcaccaattgtttccttcaccagcattgcaccaccatggacagcagcagccacaacagcaaccacaactattactacagcatttgcaacgacatctacatctacatctacagcaacacatttatttttcctccttctaatatagtttgtactatattatatgggacggatagacaaggtgttacttctgatatattcctacagtaaaatatttcaatatatttaccaattcatattttattcataattatctgttatattgactatgtatagagacatcagtgttttttcatacaccttttcaaggggctggcatgaaactgccggcccctcttcttcagaacaggcgtatccaatcatttggctcctcccttactctccgtcttccgcctcccctatcctgatggctaaatccaaaacagtagcggctgtctcgtcactgatgaaatgaatatgattcatcataatatcatttataagcaatctcatttcacaaaacatgtcctctgccgccttggcagactgatattgtacataagctccttcaatcataactttata

SEQ ID NO: 3263 - DNA, 10880 bp, Unknown
  gut microbiota DNA sequence
attgtaaatgatatgaatttacatcattcaaaaaaactataagaggaggaaatgtatgaagaagctgggaaaaacactgatccaagtgcagtatggcgcgtcaattgtggctgctctcatgttattgctcatgataggctacgaggtattcgcgcgatacgtactgaaatcatcactgatgggcattgaggaattgatgttatttcctattatatggctttacatgctgggcggcgccaatgcttcctatgagaaaagccatattgagtgtggaatcctgaccctttatatcaagaaggaacgctcaaaactgatttttgatgcaatcaaacgtacattgtgtatcattattcttgcctggatttgttactggggattctatttcttttcctattccctgaaaacctggaagctggctgacattacatacgcccctctgttttttgcgaatatagcgcttaccgtaggatttgtgctgatgtttatttatgcggtaagggatgtatatatggcctaccgggctttgattggtcaaatgaaaaacaaggatgaagcaagggaaggaggtgaaaacctatgacttctctgtcaatcatacttatggatgtaatattgctggtttttcttctgatgctgagcatcccccttccggtctgctttgccggcgcattgctgtttttgagcctctttggcgacgtatccatgaagaccatgctgatttgggtattttcccagtccacgggaaccgtgctcctggccagtcccctattcatcctggcaggaacgtatatgggcggcagcgggatagcaaaacgcttgctggactgtgtagacgcatttgtgggtcacatcaaatccggcctgggcgtggtggctgttcttgtgtgcgctattatgggagccatatcaggaagcggatttacgggcgtggcagctaccggccccatcatgattcctaagatggaagaacagggctaccccaggggatatgcgacagcactggtaactgtatcctctgttctggggcttctgattcctcccagcgttgttatgattatgtttggatgggtgacggaatgctcgattcttgcctgctttttatccactcttggtccggggcttatcattacggcgttattttgtatcatacatgtattctggagccgccagtttgatttgaaagtaacggaaaagaaaccttttggggaatttgcgtcaaacgccggaaaaatgacctttaaggctgtaccggcccttattatgcccctcatcatactgggaggaatttatgggggtgtctttactcccaccgaggcggcagccatggcagccatctattccattcccattggattgtgggtgtataaggcctgcacatttaaggggttcctggcaatgacaaaagaggctaccagtacggttggatccattatggtcatgattgtatgctgcctgatgctgagccgcgtgtttaccgtgtatcgtgtccctgagctggttttagaacttctgatgagcattaccaccaataaatatatactgctgttcatcattgacatctttctgtttattgtaggaatgatagtaaatgacaccacgggcgttttgatatgcgcgcccctgcttatgcctgttatgaatcagctgggaatcagccccattcactttgcctctattatgggtgtgaatcttgccatgggcggagttacgcccccatacgcaagtatcctttatctgggaatgaggataggaagggctgaattccatgagattctgaagcccaccatgacatttttgatactggggtatgtacccattgtatttctcgtcacctattggccggatttggcccttgcgattccgagaatggctggttttgctgtataagaaaatgatttcttaccataaaaaaggagaatactatgaaaaatattaaaagaggactttctatagcgattgttgcggcaatggtattaggcatgacagcatgcggcggttccggcaagacggaaagcgcgggcaaggccgctgagaaaaaatcattttcattgaaactcagccactaccgggcagaggggtcaccggcggatatcaatgccaaggaatttgcggataacgttaaggcggctgacgattccctggaggtggtggtatatcccgctgcgcagctgggagattatacagcagtccaggagctggtaagtgtgggagatgtggagatgcagatggccaccctcagctccactgtggataaatacctgggaatcacaagtgctccctatatatgcgctacctgggatgaagcaaaggcaattttcagccgtgacagtgattttacggaaaccatccggacacatctggaagatcagaacattaaactgctgtcagtttatcctctgtactttggcggcgcaatcctgaataaggaaccaaatcagccggcaaatctggatgtaagggagggatataaggtccgctgccagaccatgaagggtgcggagctggtgacaaacatgctgggctacaatgcaaccccaatggcccttaacgactgctttaccgccttgcagaccggggtcattgacggaatgattggatccggagcagaaggatattacagcagctaccgggatgtggcgacctattatctgccatacaatgatcattttgaggtttggtacctgtatatcaatctggacaaatggaatgagatgacaaccgagcagcaggacgctttgcagatcgcggccaataaactggaagatgacaggtgggaggtagcgcccaaggaaaccgcggagtatgagaagaaactggaagactatggcgtcaagattattgaatttacagatgatgagcttcagaatttctataacaaatgctgggagtctgtatggcctgaactgactgaattatatggggaagatgctgtggagcttgtgaaaaatctgaaggcagaagccaaataacgctgtttacaaggaggaaccagacatgggtcacccattccgttgtattaccaataatccaatgcttatagatcgcggtttcacagacctggagtattacgagacagatgtgttggaactgttcagagtggtttttcagaaggtgaattgcggataccgtcttcttacgcatccgctgacaggaagcatccggccggatatcacaccctataagacggttctgatgtcggggacggcggggaccattgatatggaatcagtgaccctgattgggaaggccattcgctatgctgaggatttgtacaggctgagggatatacctgtttacaaaaaatggggaaaggcagcccgggaagactttcagctcattgatttatccatcattgagcgggcgctggaagtggaggaaatgggcaaataaactgatattggaggaaacataatgaaactgacactgaataaatttcatgtgcaggacatacaatttgcagaagcaagcagcttttgcagcggtgtcttatacataaataaagcagaattggctgagtatctcatggaagataccaatatccgcagtgtggattttgatatagcaaggccaggggagtctgtgagaatcgttcccatcaaggatgtggttcagccccgcttcaagcagagcggctcaggacaggtatttcccggatttgtaggagatgtggaaacggttggaaatggggaaacgaatgtgctggaagattgcgcggttgccacctcaggaaaaattgtggcattccaggaaggtatcattgatatgtccgggccgggagcggaatttaacagtttttcaaagatgaacatactggtaccgctgatatacccggtggaaggcctggacaagcatacccacgaagccacggtccgcatcgcaggtcttaagacggctgcgtatatggctaagacaaccctggggctggaaccggatgagaaggaagtatttgaacatgagagcatcctggaaatgggacagaagtatccgcatctgcccaaggttgtatatgtggacatggtacagtgccagggattgatgcatgatacgtatgtatatggcctcaatgtgaaaggaatcctttccactatgattggtcccctggaggtgctggatggagctattataagcggaaactgcgctgctcccggacataagaatgccaccatccatcatgagaataatcccatcatactggatttgctgcgcaggcatgggaaggagctgtgctttgtgggcgttctgctgagcaatgagagcgccatgctgaaagaaaagaaacgggcggcgtattataccagcagcctgtcccaactgttaggcgtggatggtgtgattgtcagcgaggaaggcggcggtaatcctgaaacagatttgatgttcaactgcagactccatgagaataagggaatcaagaccgttttggttacggatgagtactgcgggcgtgacggagcatcccagggactggcggatgtgaccccggaggcagatgctgtggtaacaaatggaaacggcaatcagtttgtggtactgccaaagatggaacgggtgattggagatatagagactgtccgcatcatcacaggaggaaatgtggacagcatcggtgaggacggaactgtttcggtggagattgcggctatcatgggctcatgctgcgagatgggctatgagcatatgacaacacgtttgcggtagaggagaaaccatatgaagagaattgtacattatctgaatcagttttatggtcagattggcggagaggagtttgccgaccaggaaccaatcctgcgggaaggcattgtgggacctggcacaggtctgcaggctgttctgggggaaaaggctgagattgtggccactattatctgcggggacaactattttgcggatcaccaggaagacgcactggaaacaatactgaccatgacagagggactggcgccggatatgtttatagcgggtccggggttcaatgcggggcgctatggcctggcctgcgcaactatctgcgctgaggttaagaaacgcctttccattccggttctgaccgcattgtacccggagaatccgggggctgaaatgttttgcagtaagatatatattgtggaaacatccatctctgccgcaggtatgcgtcaggcgctgcctgtcatgggaacgctggcggaaaaactgcttgaaggcggggaaatcggatttccggaggaagagggatatattgcccagggattccgtgtgaatgtgcatacaaaaaagaacggagcagagcgggcagtggacatgatgatcaagaagctgcggggggaaccgtatgtcaccgagcttcccatgcctgtatttgaccgtgtaaagcctgcccctgctgtgaaagatatggctcatgccaggattgcgctgattacatccggcggcattgtacctcagggaaatccggaccatatcccgtccgccaatgccggcatatatggcatctacgacatagagaacctggaccgtctgaccagtgaaggcttcatgactgtccatgggggatatgatccggtatatgcaacagaggatccgaaccgtgtcctgcccctggatgtatgcagggagattgagcgggacgggggaatcggggaactctacggacgctactacagtacggttggcaataccactgcggtcagcagcgccaagagatttgctgaggagattgcccaggatatgatacgtaatgaagtgcaggcggcaatcctcacatccaactgagggacctgtactcgttgcggcgcaacgatggctaagacaatagagggttttggaattccggttgtacatatctgttccattgtacccatctccatggcagtaggagcaaacagaatcatacccgcagtgggaattccttatcctgtgggaaatccgggccttccaaaagaggatgagcttcaggtgaggaggcgcattgttaaaaaggcgctggaagcattgtccacggatattgaagagcagacggtatttgaatgagcaggaagcatatgaaccattggctgaagagtgagacgttgagacgctgcctgtttcccctggcatttgtgtgcatcttcattgtgtggagactggcggaacacggtgtacggagtgtatgggtttacctgcttctgacggttggggtcgtatgcctggctctggaccgcgtttttaagccctgggagcatgacaggatgagaaaacggcaggagcgagaccgtggtttagaagacaatagtataaaaaaacaggggttgaatcagtgattcagccggaagcggatgcaggagtggccattgcatccgcttcttttattctgcgccaggctttgttctgccaatattttgttctgcctgaattctgtacccgttattttccctcgttttttcctttatgcagcggaaaaatcaaattttatctttttatcccggcttgttataatgagttcataaaagacaggagggattaaacgtgaacgattttttatggggaggagcaacggcctcctaccaatgcgagggaggctggcaggaaggcggaagagtggaatccatgtgggatgtgtatttgcacgaaaaccatctggaaaacggggacgtggccagcgaccattaccaccgcttcagggaagacatccgcatgatgaaggaagggggacagaacagctaccgcttttcactggcctggcccagaattatcaaaaacagggaaggggaagtgaaccaggagggcgttgatttttacaaccggctcattgatgcctgtctggaatatggaatcacacccatggtaactatttttcactgggacctgccacaatacctggaggaaaagggcggatggctgaaccgtgatacgtgtgtggcctacacccactatgcgaaggtatgctttgaacggtttggggaccgggtaaagctgtgggcaacctttaatgaaccaagatattatactaacagcggttatctgattggcaattatcctccgggacatcaggacatccaggagactgtcacggcatcctactatatgatgctggcctcggccatggctgtggaggcgttcaggacgggcggatatgacggacagattggaattgtgcacagtttttctcctgtctataccacggacacaagcgtggaatcagccatagccaggagatttgccgataatttctataataactggatattggatacggcagccattggggagattccgggagatttgctgggagagcttaaaaagacctgcgacctgtccatgatgactccggaggacttggctgtcatccgccggaacagggtggactatcttgggctgaactactatgccagggtcatggtgaaaccttatgagagcggggagacaaccctgattgtcaataaccagggaaagaaggcaaagggaacctcgcagaccattattaagggctggtttgagcaggtacggccggagagcagccgctatactgagtgggatactgagatatttcctgaggggctgtatgagggaatacaacaggtatggaataaataccatctgcccatctatatcacggaaaatggtatcggactctatgaggacacatcagtgaaccaggtggaggatgatgacaggattgagtttatggacatgcatattgcggcggtgttaaaagccaaagagggaggctgtgatgtgcgggggtactatgcctggtcgccgtttgatttgtattcctggaaaaacggaactgagaagcgctatggtctggttgccattgattatgaaaacggcctggagcggagaccgaaaaaaagctattactggtacaaggatgtaattgaaacggatggaaaacatatcacaggaaaataatgggggagtgttatatgaatatacagagtatgagcgtttcaatggaaaaatatgttatgcctcttgccaacaagctggggaatgagatacacctgcgggcaatccgggacgcctttatgtcccttctgcccatcacctttacaggaggtattgcagctgtactgagctctgctccctccgtggacgcggccggaacaggaatcaccctggcctgggccaggttcgtggagagcaacagcatgattttctcctggattaacgcactgaccttgggggccatgtccctttatatatgcatcggaatcattcatttcctgtgcaagagccggaagatagagtcgtttctgcctattcttttaggtgtctgcggctttctgatgcttattgtggagcccatgtccctgggatgggacggaaaaatggcggagctgtcctatatggacggcaagggattgattccggccatgttcatatctattctgaccgcggatttatattgttacatgagaaaacgggattttggaaaaatttccctgccggatacggtgccagcttccctttccgatgtatttgcctccatcgtgccgggggcggtgctgatggtaatttatatagcattgtacgccataatgaataaggcaggaaccacgctgccaaagctgatatacaatgccatttccccgtccctgacagcagcggacagtgttggttttaccattatcataacactgatggtacatattttctggttcttcggcatccatgacgctgccctttcaggtgtgcttgcgcctatccgcgacggcaatttatccataaacgcggctgcccatgcagccgggcaggcccttccgtccatatttaccacgcccttctgggtatattttgtggtgattggaggatgcggatccgtgctggcattgacggcactgctgtgtttttcgaaatcaaaacagttaaagaccattggaaggctgggaattgtgcctgcatttttcaatatctcggaacctgttatctttggtctgccccttatgctgaatccggtattttttgttcccttcctgctgacttcggtcatcaacggtacggctgcgtatctgaccatgcaggtaggactgattggaaagagctttgccatgctgtcctggcagatgccttctgtcatcggagcatttttctcaaccatggactggaaagcgccgctgcttatcctggtgctgattgtggttgacgggctggtgtatttcccgttctttaagatttatgagaagaatctggttaagctggagagcggggaagaggacatttaaactataaatataatatcaatcaaaagaaggaggatttaaaaatatgaaacgaatcgtattattgtgcaatggcggtttatccaccggaatccttgtgaagaaaatgaaagcagcagcagaggcgcaggactttgcatgtgagatttcggctgcccctgtttccgacgcggaagcagttggagctgaggccgacctgattctcttaggcccccaggtgcgattccagatggagaccgtaaagaagcaagtggcctgtccggtgacaagcattgatcctgtgtcatacggtacaatgaatggaaagaaggtattaaatcaggttaagaaagaattgggggaagcgtgatggaggatatggaactgatatgcctgcagattatcagcaatgcgggagaggccaggagcgagtccatggctgccctggccgctgccagaaacagcaggtttgacgaggccggggagcatctggcggctgccggggagaagatgaaagaggcccaccatgtacataccaggctgattactatggatgccagcggggagttggataaaataggacttatcatgattcacagcgaggatattatgatgggggctgaaattacattggctctggcaaaggaaatggtggagatgtacaaaagcagagtttaaaatgggggaggggtatgaatatgaagataaggaagctatgtttaggaggtgctatgatttttggggtggtggctttggctggctgtcaaaagcaggctaatacggaaccggtggtacaagaggcagtagaacaagcagcagaaccgtcaggagcgccggagaagaaggatgtcacaatttatttggtacggcatggaaagactttttttaacaccacaggacaggtacagggatgggcggattcacctcttacagaggaaggggaatcccaggctgacgcggccggaaagggcatgaaggatattgtatttaccactgcgttttccggcgatttaggaagacagcgggcaacagcaaagcatattctggctcagaatcaaggggatatccctgaattgcaggaagtcatcgggttaagggaagagttttacggcggctttgagggaaaaccggacgaggaattgtggcgtccgatatacgaagccaacggggcttcctatgacgagaagggatcaacctatctggagctgtcaaagaaagaaaaggtggatacaatcgctgccattgatcctctgcatatggcggagacctatgatgacatctcaaagcgttccattgaggttatggacaccattgtaaaagcaacccaggaggcaggcggcggaaatgccctggcagtttccagcggcgatgagattgccactattttagatttgctggtgcctgagcagtatcagggggaacgcattgcaaattgcagtgtgacggtcctgacttataaggacggcctatatgaactgaaggcatgtggggatgtgagctatatgcaggcaggagaagaaagcaataaataaggtaaaatataaatacgcttcaatgaaaataacagcctggcgggtcagacacattgcccgccaggctgttaccgctttatatctgctctgttaaatcaacaaatccataaactgccggcaatccctaatctttgccagtttgtagatggtattggtcttaaacagattatcaatcatcacatta

SEQ ID NO: 3264 - DNA, 7299 bp, Unknown
  gut microbiota DNA sequence
tcctgagatggcaacagtctgtacgtcctgctccacagcctgtaaaaaaacaccagccggccggatctgcttccggcctggctggctatcttcttctatcttactttatgaacagctgtgtccaataatcggttccgctggcatcctgataatgtcctaccccaatagaagtaaaatcacgattcaggatattggccctgtggcctgagctgttcatccagctctgcatcactgcctcaggcgagttctgtccgtaagcaatattctcacccacactccggtagctgattcccgcctgtgtcaggactgtactaaaattgctgccatcaggcctggtgtgtgaaaatgtgcccttgatttcctgcgctctcttgttggctgcctctgccacgccttcgtgaacagacagcggactaagacccgccttggccctctctgcatttaccagttcaaccactgcgtccgcaaatgcgtcctggctgccgccgttatccgggtcgctgggaaccgtatcccccggagcctcgggagccgtacctgggttatccggctcacccggcagtgaattgtccggcagtgagctgtccgggctgtcaggcagtgagttgtccggcagtgagctgtccggcagctcaggtcccggcagttccggtgtggggaagatgaagtcgggcggtgtaacctgcggcagactgttgtccggcagcacaggtcctgctccccatccgttattctggttcccgttgttattctggccccagccgccattctggccccagttcccattctggcctatattaccaggaagacagttctgtcctcccactccaatcacgtatgcgcttccattagcaaaaggaatctgatatgtagatacggctgccagtgatgtcaccggtatggctgcggatacaagcatggctgcggctgcggacaatgtgtacatggatatctttctcatggttacctccttatgtgttacataattattacatttctgttacaaaactataatagcacataatatttggaaaaccattagggaaagaatggaaataatgtatgccgcagcccctctccggcgccagctctctgctatccctttatgccagtggatgcaataccttccacgtaatatttctgaagaaatacgaacatcagcagcatggggattgccgatatggtcagggatgccatgatagcgccatagtgtattggctttgatccaaaaaacgtctggatggccagctggattgtcctcatgtcctcccctgtaaccaccagcatgggccacatgaaatcattccagtgggccacgaagtccaggatgaagatggtggcgtacaccgtgcctgagatgggcattacaatggtaaaaaatgtcttgatggggccgcagccgtctatggctgccgcttccagcagatcatcgggaatgtctaagaagaactggcggaacatgtagatggagaagcatttccccacaaagggaacaatcagcccggcccaggtattcacccacccaaggctggcaacctccttgtaaaggggcagcatgatggcctccatgggaagcaccataaggctgatgaccactgtcagcagcagctcctttccggggaaattgaattttgccagggcatatccgcagacggaattgaccgccaggtccaggattacaattacaaacacatagaacaggctgttgaggatgaatttcatcatatttaccctggtaaacacctcaacatagttcccaagagtggccgctgtgggccagaacgtcctgatattgctcatgtcggagaatatctgcgcctccggtttcagggacgcggcaatcatccacagaagcggcgatacaaaaatcagggcgacaattgcatttccgccatagaacaaaacgcgtttcaggatatctttttcctttaatcccatgattctccctcctccttaatctgccttgatgacccgcttcagcatcagcgacatggtgaccactatgacaaagaatacggttgccacgctgcaggcgtacccgaaatttctgctctggaagccctgttcatagatataatacacaagggtcctggtggagttctggggaccgccctgggtcatgacatagggctgcgtgaacagcttcatggcctggatcattgtaatcatcacaacgtatttaatcacattcttaagtcccggcagggtcacatacagaaacttctgaaaggctcccgcaccgtcaatggacgccgcttcatactggtctcccggtatggcctgaagtcctgccaggaaaatcatcatctgataccctgctgcctgccaggccgacataaagataatggaattcatggacgtcttggggtctgtcaggaaaccgcagggggcaaaacccagctttgtgagaaacgcgttcagaaggcctgtgctggggttgggattgtacagcacgctccagaggatggcaaccaccaccatggatgtgatgttggggctgaaataggctgcccggaatatggatactccctttcttctggatgaaatcagcatggccaaaagcagggccagaatgcactggaagggaactaccaccaccgtaaagtaaatggtattaaccagggatttcttaaagtccctgtccccaaacagctccacgaaattatccagtccgcagaatttaatcttatccggcctgaggatattgtaatcagtaaatgcatagcggaccgtggaaacagcaggcagtatgaggaacgctgccagcagcaccactgccggaaggatgaacaggaacgccgcccgtctttcatggaccttattctttgtaccatacttcatgatatacctcctttccctgttaaagggaagggggaccattgtccccctcaccattactccgcgtagttcttctggtagttggaatcaaaatcagctgccagctggtctaaggactcttttacatccgcgcctgtgaacatattcatcatggcctctgaaaatccgggcgacagcacggtatagccgggtgttcttggtcttggatggcctgtattcagtggactgctccttaaagagggagcggggatattcattgtactctgtcagcgtgtcatagctggatgccctggtgggaagttttgctatggcctgggcgtaagaggtcacattttccttattcatcagataggagataacaacgcctgctgcttccgcgtccgcgttcctggtgatgcaggcagcccagtcccctgtgggagatgtgttgatgccgccattgtcagccaccggaaagtatgtaacgccccagttcagatccgggaaggactgctccagagtggccacttcccaggaaccgcccagcatggtggcgcattttccattgtggaactcctgcttcatggggtcaatattggcataaccatcctgaatcagactgttgaggaaattggctgcttcaatgcccttttcactgttcacatagccgtcggccttggaaccgtcttcacttacaaagtcagtgccgttggaaatccagaactgctccagcacatagggaagtccctcgcccttatccatgatgatgttggttccggccacatcgctggtggtcagcttcccggcaatgtcagcaaactcagaccaggtcagggcgtcctccatcttatccggcatggtgatgccggccgcgtcagtcatatctttattgtagtacaatgccacggaactctctgttgctcccagggcgtacagcttgccgtcataggttccctgcactttgatggattccacgaaatcacttaaatcctcctctgtaaaataggagtcaatgggtacgatgattccgtccgccgcgtaattggatatgttgggaccgtccacaaacagaatgtcaggcagatcattgcttgtcacggccgcattgattttatcctcgtaagcataggaatccgcccgcacgatagcttccctcttaagctcgatttctcccttgtgttcttcattgaaggcattgattttctcaacccaccactcttcaatagccggttcatccgtgggactccagatagtcaccagtttagccccgtcgctgcctgtctttcctccccctgatttggaactgctgccgcagccgctcagtgcacacgccgccaatacagctgccagtgtcatacatgccaatctcttattcttcataatccttctccctctcttcatgatttatggttccagatggactccatggtccatacctccaaacgcttcagacttccggcagcaaaatccgcctccagatgccccctggtgctttcctggtagaaaagcttggtgcctgcggcctcgccgtggtttaagtaaacctctgccaccctccggtccataaaaatctccacatagcggaccgcgctgacatcagacggaaaacggacctcactcacttccttcctggtggataccaggcttgtcacaccatttttccgttccagatacagggcgtcatctccttccctggcaagggtcaccaggaaatcccggtcgtctccaagcttgattttcacaaaaaatgagttgcccggaacaatcacaggcgggacatcctgtcctgacactgcgaaaatacgctccttcagcagtccgtaacattcctttaccggctccgtgaacagccttccttgttccatgtgcagttcccttggaagggaaaaactgccgcaggcgcctgtgggcttaacccggtgttcaccgtaaaaatcagatatccaccctatggcaatccttctgccgccgtgttcaaagctctgcaccgcatagaagttgcttccaaaatcataccactgctgatgttctgtcttaaacctgtccccgtcaaaggtcccggtataacaccgtgtcatctgataccggccggcctcatcgcggtggcacatccatgcacctgcggccacatatttcccatccagttgaaaaaaatccggacactcaaaggtcctgattcccggttcgtgctcctgcaggagaggacctttaaagctccacgctccattctcccggacatacagcaggatagacggcacaccgtccaggctggatcccaataccatatagtccatgccttctatccgctgtaccttggggtccctgaaatcaaaggacgctccctccggtctttcagtaatgcacgggcgctccttctccacatggatgccgtcccagcaaacagcctctgtctgccattccctggtttcctcaccgtcctcctggggaccgtggtggcgggtcagatacagatgcatctgttctccctccacctgggcgcttcccgaaaaggctcctcctttgtgttctttatccctccacaaatccggctgcggttccagaacatagggcatatgggtccaatgaattaaatcccggctcaccgcatggccccagtacatatcattccattcctgcccaaagggattggactggtaaaacagatggtaatatcccttaaaccagcagagtccattcggatcatttacccagttcataaagggattgaaatgatactgttcccttacagaagtatcataccattttcccagttccatttcatcaccgctgtccggatccaggaatcttattcccctgtccatcaaatccggtcccccgctcagatacatctgggtgaaagagacccctttacggctgatgcggtatatccccttctcaggaagggccagctgtaccagacggtaccagtcgtcattcatgtgaacctgctgttcctttcctccgggtccttccagacaaatccagccatccctgtcatctgttttttcagcaaatatacagacggactcatattccccgttgtcaaattccaacatccacatcacctccttttatcctgtctgtgtctatttttcctatatggaacccgttccatatccacactatagtactattagattgatatgtcaatatgcttttgtaaaaaagcgcaaaaatagtgcacattatacagcttttcgcctcgtatgttgtgcactattttcattctatttccagtttttgtatctatcgtattcagcccttctccgtgttccacatggaacacattatattgttccacctttttgtatggaaacaggcagaatttgttccatctttaccttcttaccatctaacaggtccatcatggtatccacacaggctgttgccagtcccggtatatcctgcgctatgctggtaagcttgggtgtaaacagccgggtcatgtcaactgcgtcatagccaacaatatggagttcctccggaaccttcacacctctttggtttgctatgttaaggcagtaaagggctcctatatccgtagtgaacaccccgtcaatatcccggtaaatatccatgtactgttccatgatacggcaatagtaatcatattccatcatattccacgccatttcaatggttttgacagatgccccattttcctccataacccgattaaattcctgatgcctgtcattggagggcgtatggacgcggaaggaaccgccaaagttcagcacattcctgcagcctgcatccaatagaagccgggccgccatcctgcctcctgccttgtgatctgaatgtattatgggaatgtccggtcccaggttccggtccatggcgaccaccggcttattcaggttcaggtacgcgtaatcctggagggaatgggcaccggtgatgatgccgtccattacgttctggcgcagcatgtcaataaagtcctgctcacggttgcttatctcaatggtattgcagatcatggccttataaccgttcttatagagctggatctccatgtgcttcagcagcttgctgaaaaatggattttccatatcaggcaccacaattccaatgattcctgtcctgttccggaacaggttcctggccagctcatttggctgatagtccagttccgcagccattgcaaggatttttgcctttgtatcctccgccacatagccagttccgttaagcgcgcgggaaacagtccccacccctacacctgctttttttgccacatccctgatacttgccatttgcccagacaacctccatcgcataaaacttcattacattgcactaattacatagtactaatatcttagcaggaggaaggtaaaaacgcaagcgggtcccggaaaggtttcggcaggttctggcgggcatctgttttaatatttcgtcaatattcacaattttttctgactaattcagtcaaacacgatattctttcaaaagaatattgatttatatatt

SEQ ID NO: 3265 - DNA, 3483 bp, Unknown
  gut microbiota DNA sequence
ttaaatatcttgtcagccggaaccgctgttattgtgaaatcccctgccgggtgggcctttccgttattggcccgtgtgatggcggcgttcattttgctgttaaaatcagataaacttgtaaagattgcgtttttattcacgctcaccgtaatactggaatcctttaactcccctgatttcaccactatatccgccccgtcgggaagtgtgtcgtccagccggaatgaaatggtgacattggctgcggaagtagtgttctgggatgttatggtatactcgattccgttgatggtctgggagttagcggactgggcattgttctttcccggtatgcttaaatgtattttatcagctcctgcagcctttccaaggggatcgcctgttacgccaagcaccgtatacccgttagcgtccaccagattgccgctgttgttgtccagctgcagatttcctgcccttgtatagaatatatttccgtcagaatccattacctggaaaaaaccttctcctgtaatggcaacatccatgggtctgcctgtggactggagggctgaccgtcccatattaaggtcaacgcctgccagctgtgcgccgtagcctacctggctggcattggtaccgcccttattgttatcaccgcctgtagcgctctgcagtgtctggtaatatacatcctggaaacgtgcccggcttgacttaaagccgtatgtattaacgttggcaatattattgccgatgacatccagctttgtctggtgggcctgcataccggacacagctgaaaataatgatcttaacatattaaattctccttttctaaccgcttacccgtccgtcattcggggtaaggatagcctccaaaaggaccggctatatcattacggttccgtcaatattcgtgaaaacagtgcctttcaggctgtcttcattcacaacagtgacaactttattattttttacatttacgacaaaggcagtggttcccaacagaatcagcggctccctcagtcccttttcctccgccatgcggacgccctcgttcagacggtccagcttttcagaggaaacatccacgccccgttccaccacacgctccatggcatgtttggaaaaggatacctggctttcttccttcagtctctgctccagcagttccttaaatgcattgtcgtttgttttttcccggggcctgctcttgggcggctcacccggagtccccgtatagatgggggtatgaagcattttattataaatcattgaatccattgttcatcctccagtcccttattctggttcattaaccagctgctcataaaaacagccatcacacgttaccgccggacgggttttacttatccggaggagtcttatcgggcggggttccatcaggcggggtttcatcgggcggggtttcattgttttcgccggaaccttctgctgccggtttgtccttgatctccatgatttcatccatggaaaaggcttcgccgtccacgtaaattacgaattttccgtccagcagggatattttttccaccactccgtctgcctttttcagttctcccgataccgtaaacttagcagcggacacattctttcctaccagggaagccacataggagctcttggcattgtaggccatttcctccatctgctgcatggtggatatctgggccagctgggtcacatactgggtgtcatccaccggattcatgaaatcctggtttttcagctgcgccaccatcagggtaagaaaatcatccatgctgactttcttgtcatccccgtctccaaagacagcgtcaatcacattaccggagctgcctgtactgtccgtactgtttgttccctctttgctgtttgttttttctgaaccgtttgtcttatctgagctgtttgacttctctgtatctccgccattgtcatcggaaagcgccctggcttttgacgaagcggttcccgaaagtgcggatctggaaccggctcccggcccggatgcagtgcctgcgcccgttgtgtacggcgagctgtaatttgactgtatgggcattgttctctcctattctttcttttgaatacagctaaatgtaggcgtaaagcctgctcatgcggctctctgccatcatccgttttgcttccatcagaagttcctcctctgacccgctgtcctctgctgcatggaaactgtatccggtatgggactgctgtccccggcgctcctgcatatgttggctgaatcctgaaaaatccatggcattctggctgctgtggtaaacctcctggacttctgtattcaaaggcctcagcatatccttaagactctccatctggctggtgaccagcttctcagtctcaggattggtcactccgattcgcaccgtcgtcttgtccccggagcttgtcaggtggaccacaatatctcccagaccttcgggttttaagtggatggtcagctccctgtttcctgtctgggcggcccgttccactcctgtcttaagctgttccagcaccggagtatctatctgctgttccctggcgtcagacaccggccttaagccgtaattcattctgttctgtactgccttgccggtcaggtcaatccccctggcatctgcgttccgtttcagttcctccagcacctggttggcatcctttggttcctcatccgctgtcccggtctgttcccgcagctgattcagagtcttgttctgcctgctgtccgcactgaaaaacatatcctcaccggactgccgggtttccttgtgtccctgaaccacggccgtcatatctgcttccatggtatctgattgtaccggtcggaccgtatctgaagtctttcctgatggttcctgtccagccgcagatctggcagctgtttcctgagccatctgctcccggactgcttctgcgtatggcggctgaaccagctcctgagtctgaagggctgccgtctgctcataacccgctaaagctgtgttggataaaagggtctgttccgtctttcctggttccggaacatattccgtcagcatggcagcgtcctgtgcggcctgtatgtcctgcgcttcccctgcctgcgcgggaaccggcacctcctgcatcagaagcgacatagcctggaggtttatggcctcctccgccgcgccctcattatggcgctttccggaatcgctgtccttatccgtattctccactcctgactctgcctttttactgtcatcccggcatgttccgtcttcaatgggttcagaggattcggatttttttccctggtcaacagacgcctggtttctgcctgtatctcccatttcctgcgcctttgaatcagccgccccgtctcttttcttgtctgctgctttggtcccggtcttgcgggcatcctttaaattctgcgcaaacatgtccataaaactgacggtatcatcctgcttttccctggatccggccgttggatttgccttataacggctggctgtcagggcc

SEQ ID NO: 3266 - DNA, 20881 bp, Unknown
  gut microbiota DNA sequence
ccttttcttgtctgctgctttggtcccggtcttgcgggcatcctttaaattctgcgcaaacatgtccataaagctgacggtatcatcctgcttttccctggatccggccgttggatttgccttataacggctggctgtcagggcctgtgttaatgttcctgcattcatctttttcacctcctttcgcagataatatctatttaggaaacgccattcctgacaaatgttcctgcaacatgctcgataataagatcctgctgctcctttgcctcctcatggcggtattcctccatctgtttttccttcagcttctccagcttctttacttcctgggaagcctccgtcacaacacgcctctgcttctccgccctggcctgtgtccgggtcagctctgtctcgatctcttccagccggattctgactccctccagcacagagtaacagcctttcaggataaaaacagttgtcccctgaatctggcgctgtccgatatcctcctggatatgacggattcttaactccttatcacgtctgtcctcctccagcttatcccgctcagccataatccttgcaagaatgcccttttccttttccaggttctgttcctggtatgccagcatgcgctccagcgtaaatacaaactttttcatgacccgccccttaatctgttgcctgaatcatctgaatcactgactcgtccagtgaaaaactctcatctgtcttctgctgaagaaacccataaatacggtcgattcgttccaatgcatcatccagttccggatttgttcccttcttataagctccgatggagaccaaatcacggttgctctcatatacggataaaagccttcggagctttccggcagccgctttatgctccggcgtcacaatatcattcataagacggctgacactggataatatgtcaatagctggataatggttcctggctgccaccttccgggacagcatgatgtgcccgtctatgattccgcgcaccgtatctgatatgggctcattggcatcatctccttctaccagcaccgtatagataccggtaatggatccttcctcaaaattgccggaacgctccagcagtttaggaagctctgaataaatggatggggtataccctctggccaccggcggctctccgatactcagccccacctccctctgggccatggcaaacctggtaagggagtccatcataagaagcacatccatgccctggtccttgaaatactctgcgatggtggtagctgtcatggtacacttggaacgcatcatggcggactggttggaggtggccaccaccaggaccgagcgtctgagcccttcctcccccaaatccctgtgaatgaactccacaacctccctgcttctctccccaaccagggcaatgacgttgacgtctgcctttacgttcttggcaatcatgcccatcagcgtactttttccaacgccgcttcctgcgaagattcccattctctggcctttgccaaccgtcataaggccgtctatggcctttacccccatctgtatgattgtgtcgattctgggacgggtcatggggttggaaggtctgcctgtaatggaatagtatgacacatcctccacaggtcccaaatcatctatgggattacccatggcgtccacggtcctgccgatgagatggttggacaccgctatgtgcaggcgttcccctgtattgcggaccgcgctgccgtaaccgattccctctgtctccccatagggcatcagcagcaccttattttcccggaatcccaccacctcggccatgacaggagaaccgccctccaccacatcaatggtgcatacgtcacccagcctgcaggcaggccccgtggattccaccgtggttcccacaattttgtctatcttgccaaggtatgtatacagacccgcgttctctattacccgttctatctgatccagttccatatatttaccgccttactcccggctgtttaaagccatcagctgttttttcaggttatccagctgtacatccagcgatgcgtccacaatgccttcttctgtctctacctggacaaatcccggtggcctgctttctgtcttaatgcgcagcacgccgcccattttatcccttaagggttccaggcgcttttcaagggcctccaccagccccacagcgtcctccggaatgtggaccgttatattctccttatcacgctccgagagcacggcgcccgccaccatgtcggccagctcggcctcgtcatactccacttttttcctgagtattttttctgccatcataaaggccagtcctgccactctttcattcatctggcgcttgaattcttccagtccctgccccagcctgtcaactgccgcctgtatgccggccatatcctgtgaaatgtcctccagggcctggtttagtccctggttatagccctccgttttcgcctggtcatgtatccttccggcttcgccccgggccgtgttcactatgttatccctctgggcatatgcctcctccaatatcctggcagccgactgttctgcctgtttcctggcgtgttccagaattttacgcttttcttctgatatgagggcataccgttttccggctgtgtcctgtccgccggccccggcgctgtccgcttcctgattctctgtcccgtctgtgctttccccggtaccagcctgtcccggcattcccggctcaggctggtacaccctgaccctggcgcttccggtaaaggtctgtccctgcttcaataccttagacaattatctcatcctttccatccttggaaatcacaatctcgccttcctcctccagccgcctgataacagccacaatcctctgctgggcttcctccacatcgctcatacgtatattatgaaggtattccatatcgctctgtatggattcgcgcatacggttggacatattggagaatatggttgccgtcacatccctgttggcaaccttaagggccacagacaaatccttggaatcaatctcacgcaggaaccgctgtacggacagagggtccagataggcgatgtcctcgaatacaaacatgagcttgcgcacgtcctcggccagctgcggatttttcatattcagctcatcgaatatgtcccgctccgtgctgcggtccacatggttcatcacgtccgctatgtaattgagaccgcccacctccatggtttcctcggatgaggaggaaccgattttcttttccaggacctcctcggctatcttgatagccatgggcagggcccggtccatgttggcgattcgctccaccacatccaccctggtatcctgggacagatttgcaatgatcttcgacgcctgttccggcgtggcataggacaggatgagcgccagtgtctggggatgctcattctgtatggctgccatcagggtcttatagtccacttttctgataaaactgaatgccttggttttcagggccttgctgacccggtccatcagatttctggcctgctgctgcccaaacgccttttccaggacctccttggcgtaatcacgtccgccctcggttatgaccttttctgtcacgcagcagttataaaaatccttggcaatatcctctaattcatcttcagccagacggggaagacgggtgatttccatggacagctgttccacctcattttcagtgagataccggaacacctcagatgcccgttcgcttcccagtatggatataacagccgcggctttctctgctggccttctttcttctgcaggcatcttattttttatcctccttcagccatgaacttatcatggatgcaatgatttccggattcatctgtgcaaaggaacgtacctgctccaccgggtcctccggattcacctgcatgcggcccaaatcattctgcaccgctgcctcctccgcccgctcttccatatccgcagacggcggcacctctccctcaaagggagcaaacagctcctggtcctccttcatctgtctcctgcgcctgcggccaaaaatcaggaacagtatcaggagaaacagaagaattccggctccggccgcaatggctatggtccggtaatcaattcccgtgtccacaggcgcctgcacaggcagcgccggcttggccggagctgtctccttcggcacttcgcggaagctggataccacgatgtcctccggcgcaatgttggctgccttggacgccgcgtcaattaactgctgctttttggactctgtcaggttatcatcgttgaccgtaatggccacagttgccttctgaagttttacattgtccttttcaatctgtttctttatgtagcttacaaggtaatccacatccctgtaataatccccggtcccctgggccgtaccgcctgttccggcagtgccgtaagcaggtatgtccgtgttgttctcttccccggcaataccgcctgccccaatctggccgcctgccacgcctctgctttcccggtagtggtccaccacgccctgtccgttctcctggggttcgtattccagattctcggttatcatcttgtcatagtctatgacgaccgtggcagatacccggatcttatccggagagtaggccagcgtcagcacattcttgattttgttctgcaggcgttcctccaccttggcctcaaaatccaggcggttcaggccgtaagccgtgtttcctatgtcgtccgataccatctcctgcatggtctccgcgttgaccacagtcacacgctcaggcgccagacgcggtacgctgtccgctaccagattcttgatagccgataccttctccggcgacaaatcataggaaggcattaaagtcagagagacagaacctgtactgccggaatcctcgtcctcccatacataagcgctctcatccggcacattcaatgtgacaatggcattcttaatgcctgtcatgtccttcagagtgcgttccagacgatcctgaagattcataaggaggtactgccgtttctcaaactctgtggtagtaaaacccatattatccgagaaaatatcaaaaggaagcgccgttttcggatatcccagctctgacatctctatcatgatgtcgcccaactgatcctccggaaccgtcacttcgccctcatcattccttttggcagccacgcctcttccgcccagcactgccagaatttcgttattctcttccctggatatccctggaaacaatgttacatagctgccggcatttcctctgtttaacataatgctggctgccagggctactactactgccgctgctgccccagccgccatggctttctttctgccgcttcccaggatccgtcctatgacgccgtttccgccggctcctggttttatcttatcctttatccccatgattcaattgtaacatccttcatccagtattagacctgcatacccataatctgattataggcattcactgcctttgtagtaatctgtgtagtgaattccactgctgctgctgtcttttccgcctgtatcagcgcggtatgcaggttgtctacctgtcctgacgcaagcttcatatccataatctgggtatccttaatggcctggtccgcctccctgactgcctccttcagcacactgtcaaagcgtttctccggaaccgccttaactgtgctgtccttttttaagtcagttaagtctcctaccccctccatccttgtcaccggtatgataaacataatcttccccccgtttaacccacgttatttacacaattatccaatattttaagtatatccccattcagtcactccgtcaacaaaaataaatgttttagaaactgttttgtaaccattttgactctgtttataggaaaaaccggatgttggtaattttttccatataatggatgggggacaaaaaagcagcctcaggatgtttctttgtaaacctgctgctgctcttttctgattgggtaacttaatgtgctatattatgccgtatctcacttctgttgtattctgcttctgttgtattctgcttctgtatgtattctgcttctgctgtattctgcttctgctgtattctgcttctgccgtatctgatttatgccatatatgattccggtcttacaagacctctgccgcagctcagctgcagcccttctatgggttctgcctgtcattaattatgccaaatcccggaaccatccaggtaccgtccctctatataagcattcttaaccatgcgcccattttccgggctcatataataccaattgccgccgtccagcagccagcccgtatgcatgcttccgtcctggtcaaagaagtacatgccgtctccggctgtaagccatcccttatacatgattccatcatttcccagataataccatttccggctgtcctgaagccagcctgtctgcataattccattcatatccaggaaatagtaattgccatccttctgctgccagcccgtcagcatatatccgctgaaatcaaagagataccacctgccgtcaatgttcttccatgtaccgatgggataggtgccgtctgtgttcctgtaccaccagccctcatcatccttaatccatcccagctgggaaggggtcagcgcatcagccttgtccggaccgcccaccgcgcctccgctcagagtgcagacctcatccgcatctatatccagctcatcggaatacacccagtcgctgctggtgatgtaagctgtctcctccgtgtccttgggtatggccctgacgcggaactgataggttcccgctgtggtcatcagggggtaaaaatcataattcgtggcaatcacctttggtatgccctggaccatctgtccattccggtaaagcttcagctcgtaagcgccggcatagggcacctgggcccaggtagcctttcccggcgggtatcccatccactcagctgtatccggtatctccaatgtgccggaagcaggagtcagcaataccgtaagaagcagtgtctcatcattattggtccttttcaccgacttataggttgccccgtcaatctgaaacttgctaggacctgtggtcctgttgaaatagtagccgcttctggcatgtatctcaatctgcacttttggttcatcccccggttcccagtaatccttattattcttggcagcccatttataagcgccgatggtatacaggctgctgtccgtggtggcatacaccgtggcctcattgagctcataatccgcctgtacatcggaacgcaccttcagcgatacgctggtgatgggtgtcctcgtctctgtcttgactgctgctatggaaacagcaggaaatacagctgtgaggaccgcccagattcccaatgccgcggccgccttcttccatccatacatcatcatttcctccttctgccggctacgggacccatatccccgcctgattcacataatgctggtccacggctttatcccgcaccatctgcccgcttgacggatccagatagtaccagctgccctgccattgcagccacccggcagccatgctgccgtccggattcagataataccagtcattcccctgctgcagccactgccctgtcagttttcccttctccgggtccaggtaataccaaatgcggttgaactggagccagcccgtaaccatgtccccattggatgtcaggtagtattccctgtcgttcttccactgccagcctgtaagcatgtatccgtttatgtcaaaaagataccattttcctccaatctcctgccaacagcccaccggatagcttccgtcctggttcctgtaccaccagccgtttccgtcctgtgcccaccccggagcctgggcattggggccggttccgtccttcacgctgacaccggcagttccctttccctgggacacagcccgcttatccgctgcctgggcatcctttctggtgatttgctggttgtcagactccgtccatccgcctgctttcaggtaatcagactcagactcggtctttgccaccgccctcaccttgaaatagtaatccccttcttccgtcatatagggaaagaaatcatagctgaccgaattggtcctgggcacatggtagaccatgctttcgtcgcagaacagctttacctcgtaggaggaagccccatctaccttagaccacctggcttttcccaaaggcgtttcttcccaataagcctcctccacctggtccagagtccccttgaccccttttaatttggcagtaatggtgagactgcgctttgcgtcgcttttcttggatgtcacatactcagccccccgtatatgcgcgttggaggaactgatgcttccgaaatagtaatcctcctcagccgccagctcaatggatatgcgcggaatttcccccgccttccaggatgtctttccgttgataaactcgcaggacaccacatgatacttggtgctgtccgccgtggcagacacgcttccgctgccccccatctccacggatgaggtaacggctatggtcactgacttaatggcttcgtctgcaaaagaagtcatggcgcaagaccaccatattcccagcacaagacatactcctgctcctgccctgactgcaaaatatatgaacctgttcctaatccccatcataaacctccccttatcctttatccccattactgccatggcctgcgtatggatacaatggtccggtaggccggatcattgctcaccttaatgccttcttttctggaactggcgtgtacaatgcggcctcctccgatatacatggccacatggccggaatagcagaccagatcacccggctccatttcctcatatggtatctccctgccaaatcccgcctgttcccccgacgtcctgggaatgctgacgccgaaatgccggtataccgactgggtataaccggaacagtctgttccgccggtaaggcttgtacctccgtatacatagggattgcctacaaactgcagggcatagtctgccacatttctgccgaattcagtgccgcctatgcttttcacaggccggccgccggctgtgcctgcgcctcctgattcccgtcctgcgcctcctggctcccgccctgcggcccctggctcccatcctgcggcccctggctcccgccctgcggccactgatgcctgtcctgcgcttcccggctcccgccctgcgctttcctgctcctgcctgatgcgctctttctcctgcctgatacgctcttcctcctgccttgccctgaggatacgtatttcttctgttttccttatcacttccccggcagcctgggctgcacgggcctgggcctcctccagttcaagggcaaaactgctgctctccgttttcctcgcctcaatgaacccttccagttccttttgctgggactcattttcctcttccatgacctcaagctgggattgtttctcctccagcagctcctttttcccggcagcttcctgctttagcttctcatatctctgtataatttcctggtcgtattcataaagctgcctgaaatattcggtctggctgactacatcccctatgttctttgcctttaaaaggatatccagatacgtgatatccccctcctcatacaggaactgaatcctctttttaaggatgtcatactgtctctgccgtttttcctcggcctggcggtaatccctgtctgccccctgaatctgggtcttcagctcttccatatcggattccagtatatccttaagggccagcagccttaccaattcttcctccatggcctgttccttctgtctggactgccccagcttctcttccagctgctgcgcctcagactctgccctggacttctcctcctctgccctgcgcctctcctgttcagctctcgtgacaggtgatgcccggcccggcaaaggcgcctggaccgccagcacaaggactgccaaaatcagtatcgccttcctttggcgcccccggttaccattgattcccataccgttcttatgtatacctatttacccttcccaaattacatatcactttttaacaatgccagtataacacaaatgtaaccaggaaaaaagcctgaaaacagaaacatcccggcacagggctgcgataacgctcccccgtgccgggatacctatacataactttatcaaagcacactaaaacccagcttacagacttacgctgaaaactctgccagttttttccatacgctgcccgacatatctgctatttccttataaattttaaataattccatatactttttatgattttccatatcggggtaataagtctttttcatgcgaatgcattttcctgccgcttctaactcatcggcaaatgcccccacaccaacaccagccaaaagcgcgccgccaaatgaagattccgcattttgaggcattttcacctccaagccaaatatatcgctgacaatttgacaccacagcgggcttttcgctccgcctcctataatcacgatatcttccatgttatccgtaaactccttaagtacctgaaggcaatcataaaggctgaatgcaacgccctccaacagcgctctggcaaaatgcccttttttgtggaccatgctcactccaaagaaatcgcctctggcatttggattaaaataggggcagcgttcacccagtagataggggtggaacaaaagtccctgacagcctaattctactgatgcggcctgctcatccattaaaagataaacatctcttccctccctgtcacactgttccttttccgcagggtaaagactgtctctcatccagcggtacgcagatgcgcagctgttggtagccgtaacggtgtaccattttccttccacagaataggggtatgtaaatgtcttatcgtgaggcaccgcctggtctgtaaccagattgacattgccggcagttgccagcttaatgataatctgaccattttttacagcacccgcgctgaaatcctctgctgctgtatcggaacagcctgctataaccggcagccctcctggcaggcctgtctgtttagacacttcctcccgtaccgttcctacaatctcctttgtctttcgaatctccggaagaacctccaccggcaatcccaccatattgcatagttcctctgaccagcattgtttcctggcatcaaaaagcagactgccctgagcatctacaatatccgtacagaaatctcctgtaacccaggaacggatataatcctttgtaaacatgagacggcggattttcttataattttccggttcattctctctaacccactgaagctgcggcagtgtccatgtaggagtcggcatctgcattccaattttaaaaatctcttccccatgcttctcctttaaataacggcactgttccccgcttctctgatcattccacataatacagtgtctgattacctgtccgtttccatccagtaaaactgcattatgagtggaagcggtaactgccagacccagcataccatcaaatccgtcattcatctgcgtccggcaggcagtaacggtattgataaatgcctcaatccaaagggccgggtcctgttcggaccatcctggttttttatgttcagatggatattcctgaaaagctgatgccaggatattcccctctaagtcaatcacagtagccttacatcctccggtaccaaaatctacaccaaataattttttcataggctctcctctaatatttttttacaaccagcgcccgctccagtgcttcgaaattagcgattgctttatcccccagccgcagcgccacgccggtatagatagtatcaataatagtaagttctgccatacgggaagaaatagcataggtacgatatctagtctcctgagaatatgtattcaggcaaatatccgccagctttgaaacaggcgaactgccctcattggtcagtgaaatcacagtagccccctgctccttagcctgatgggcagcttccactacatttctggaactgccggaataggaaatcgccagcagcacatcctggtctgtcatcgaggacactgcgatcatctgcatatgatcatctgtataggcgtgggcattcaaatccaaccgcaaaaacttatgctgggcatccgcagcaatagatgcagagtttccgttacctataataatgatgcgtctggcccggcacaatgcatctatactggctgcaactgccttaacattgatggatttctgtgtcatggacaaggtttctatagcactggaaaatatcttttctatgataacctctgccggcgaatcagcttcaaggttctcatgtattttctcctgaggagttgtgagttctctggccacccccacttttaatgcctgaaatcccctgtatcccagtttcccacagactctggtaacagtagcctcactgcttcctgctctctctgccagatccgttatagatgaatagattagctgttcctgatgtgcagccatatattccgctgtttccagctcctttttagataaagatccacgtttttcttctacacggtcatataaagtaccattgcttatattttctcccatatcatttgccccctttttatttcgaaacttgtgattaaaattcattttatacgtaaaccataagtgtgtctagggcaaataagcactaaatctcttttgtcttacagcacgtcctccacagcccccctggaacccggctttgtcagcatgctcagcgctttctccacataacggcgccgtgaaaccttctcgtccgtttggcttaaggatgggtttcccaccggacaggtaatggcaaatccacgaagaatccgtgagcttcccacagactttgcaatatccacaaccgcacatatttgagtgactggaattcccacacgctcgatttccttcacaatcgttgctccgcagcgagtgctggtacctcatgtagaggtaagaatggcggcagtaattcccttatccaacagtcctttggcaatctgctccccttttacttttgcggctgctacagaagcacagttaccgcaggtaacatagacctgggggtccagatatcccagctttttttcttctattatctcccgcagcacatccacaggtaacaagcggtaaggattttccattacccaagtcccatcataaccactatggattacaaagtatttatcagacatcaggctatcccagttataacaccccacagtagtgcttccatttggtttcagcttatcagggttgctctccggaatcaaaccgccgtcagtcaccaacgctaaacgggctgtttttaaatcctgtactggaggcgccggatccaccacatcaaaggcaggcggcagaagctcactcttaaaggcttcccctctcatctttttcataagcatttcaattgaacgttccgccgcatttaggggctgctcctcattcagaatgatatcccggataatgtagccttcctcctgtgcacctgcaatgtgttctccttttagcagacgcagccctatactgcacatgacaggagccgcctttctcagggtggaggaaagaatctctgtttttacaatatatgtatctttacggaataaatcagctgctggattttccggatacatccccgtcactgtgggtatccccaattcccttcccaccgctgctgccatattaccgcagctgatcccataacgtccggcattataggcaggtccggcgataaaaagatccggcttcatagagcgaaccagttctaccccctcaaccacagcacgctcaatattctcggcgaaataattatcaccgcagataatggttcccactacttcacagtcatttttcatcaaattttggaaaagaaccgccgggcctactggtttatcctctacactgaatcccacgtgagccatgtcttcgccgccaatctggccaaaaaactgattgacatagcagacaactctccatttttttgtctccatgcttctcctccttaataatctactgccattccatgtgaataaccaatctggctcataagtcccacctgtttcatataggtggaacgcacctgcccttttgcgggatctcccgtagctattttatgacctccgattacaccgtcgtctccactgagataaagggcatcctgaggcccgcccaacagagtttccaccggcggaagagtaaagttatggtaataagtacctgagcagacaatggaatccacatttttttcactaatcatacactctatccccaaattgctctttccattgagtatttgtatgaccggaaccgcctttattcccagcttttcggcttcactggcaatagctccaacgcagagcgtggatgctccccccaccccttttgttacaattacaccgtcggcatgaaatacctccttcaacagattggcagccatctttgacaccagatagcggtgtttggcttccacggatgtcaccgtaatcagaacgcccgcgaaattcaaatccttaccatggcggcgcataagatttacaataaccggatggttttgaatctcatatgtggtaatacaccggaatcctccgcacagggaaatagctccatccaatatctctgtgggctgcatgactaatggaagactgtccggaaccgcatttccatataccatgggttcccggtagttctgcgtgtcatactgcttggagtaaatctggtaggaataagccacacttggcaggtccggatactgggtctcattgtcaaatgtctccgatgtattggccttgcatcccagcgtaacctttgccagcaatacactggtcttataccctatccggcgcaaagcttccctgtagtctctaaaatcagcattttccggtgccataggctcaatcacaagttccggcatctttgcatagggattcatcgctgcacattcaccgctcatatcgaaggacccccattttctggaccaatatgtatcattttggcaaaggacaattcctgccccttccactgccctggtaacaccggttcctgcaatctcatactcttcggtgagaacaccgggccagtcaatatttcctgaaaccttacagcggggctgtaccacgtctaccacatttataatacgggtagaatcacccgggtaagaaatatcgatcttcagggtttcaaagcaaggttctgacgccgcaaaagccagaatatcctctttatttacatatagaataccatcccggaaacaggtttcttctccgaactgcaaatcctgaatccgaatggtctcaactgttaatttcattaaataacctccttaaaatcatgtgcccattaacagatgtgggacaaaggtaactagcggcggccagattaacatcagcaccataaccgcgagaataatcagtactaccggaaccgtatagcgtatggcctccttaaacggagcctctgcaatgctcattgacaagaataagtataagcctaccggaggcgtcaatgctccgactacggtagcgattgaaaagagcacaccgaacatcagcggatctacaccaaggctcatcaccaacggatatacgattggaagtattacagctgtggcagccagagtttccataaaacatcctattaccagcataattccaataataatcagaaccaccacagtgggattcgtggaaacggaaagcataaaggtcttaatggtatcggccagattctccctggcaaatatataagagtagatattagagattcccataatcatcataagcatagccgatgatgatgtagctctcttaaatattcccagcaaatccttaagctttaaggtacggtagataaacaagccgcaaatcagagcgtaaaggcaggcgataatgcctgactccgtggcggtaaatatgcctgacacaacaccggcaataataatgattggggttatgagcgcaaaaaacgcatccttaaatgacttccatacaacgtgcaaatccagtgtactggtccctgcgtctacgttatatttcctggcataccaataacacatacccataagcgcaaaaccaatcaaaaggcctggaatgattccgcccataaacagctttcccacagaaaatccggtaagtgacgcatagacaatcatgttggtgctgggcgggataataggagcaagggcaccggaaccggctatcatggaagcaataaatgcacggtcatacccggccttttttagttccggtactgtaagtgtgctgactgcgctcatagtggcggctcccgatcctgatattccggcaaaaatcatattagccataaccgacaccatgccaagaccgcccctaagctgcgagatacaggcccggcaaaagtccagtatacgtttggaaagctttgcggctcccagaatttcacccgccagaataaataaaggacctgccatcagagagaacgaattcataccgcggattgcctgctgaacggccataaaggacggcacatcgctgcccataacaattgccaggagtcctgacagaccaatggcaaagctgaccggaacgcccagtaccagaaaaatcaaaagcgtaataatagctattgtaatcatctatttttccccctttgcatattgtcgggccaatttcggtatggcactggcataagcgcagagcatcatgataataccggccggcgccgccgcataaatgtaagaatagggaattctgatagccgcccccagggaattgccacttttttgtaccagggtaatggctcccggaaaaaatgcaatcaaaaataccacgcatatgagcctggaaaccacaaacagtccggcccggattttattatccttcaaaaatcctatgagaatatccacagatacgtgtgcgtccgccctgacagtcaatgcggacccgataaaggtaagataaattccgcagaaccgcatggcctcttctgtccatggaggcgcagaactcagaacaaaacggccaaagacctgtattgtaccaaaaatgagaatcattataaacatcagtgcgcaaaaccaggtctgaattgtttcaatagcctggtccagtttaagcaatgtcttcataattcacagaactcctttctaagaaaaatgcgcatacatgtcctaacccatgtacacgcatcattgctttcctaaattaattattcaatgccagcatgcggtcgatgaggtcgcccaggttgtaattatttatatattcatcatagatggactggcatgcatccttcattcggctgcgctcttcctgagaaatctcgttgatttcaacgccagcatctgccataactttctcagctgcatcatctgaagcctgacggctggacaactgtttttcctggctttccagagcacattctgatattatgccctgtaaatcctccggtatggaattccacttgtcttcattgataaatacacagtagattgcgcctaaatgaccgattttagagagatatttcccctgctcctgaaggttctgattcaccaagcccgttacatctgcttccaccgcatcagccactccctgctgaagaagggtgtatgcctcactccaggcggatgtaaccgtgctggcgccaagtgcattccaaaggttgacatacagaggcgtctctgctgttctcattttaagcccctttatatcctccagacatgtaataggtttattttttaaaagaggctgcctgataccgttggaataggtcatgagaaggcgggttccggatccctccagcattttaggtacttcctccggaataatagtgcggattagttctgcctgggttgccaaatcctttgtaaggaacggcatattaaatacagccaattcaggtatattgagagcagccgcccagtcagcagtatcgcagcatgtcatatccagggttcccatcgtaacctgctccatcatttcacgggcagaccctaattggctggagggataaatattgactgctacccggccgccggacttttcttccaccagagccttaaactcttccggagcaatggccaatgcatgaccgggattctggatatgcccaaattccagggttatttctgcatttcctgaggcagccacctccgccacactttccgttccttcgttctttgaaggagcttcacttactgcgtttcctgaactgcttttgctgccacagcctgccagtaagcatacgaacatcaatgacgacataacacgaatcaatctttttttcatagttgcacccttccttatacatttaatattgaaatacaccctgtcttttttacatacccctatatttcttacccagctcatccgccatcaaaatagcgtcatatactattttctctgttatgaaaactggttcctgatgaaccagaggtccatctgctgtcttttttgcaatcgctgtgatattttcctctattggttccacatccagctgttctaacgtgacgggcaggccgatatccaccataaaacgcattaccttatccacagtctctgcaggtgtgttttccattaccatctggcatacgatgccaaaggccactttctctccatgaagatatttgtgagtggaaggtatcatggtcaaaccagaatggatgccatgggctgtagccaatcctgtattcagaaaaccgaggccgcttaatagggtattcgcctcaatcacattctccaaggactccgtaatgactccccgttctaatgccgtcaaggcactgcgtccgtcagaaaaaagaatatcccagctggatttagcaatagccataccagctttgcagcggcgccggccgcctgcaatatagttaggagaatcagaaccttggcaggctaaggcttccggataagtagccagagcatcccccataccggctacaaacaaacgcttcggtgctttaacgataatctcgctgtccaccagcactaaatgagcattgtgtttcatctttcttgaacctatatattccccatccgctgtatagagcacagcaatctcactgaccggagcatctgtagaggcagatgtgggaacaatgataacaggcaggtccacgctatcggcacaaagcttggcggtatccagcgttttacctccgcctacacctacaataagagctgcgccattacttctggcaatttcacaaatcctttgcacctcatcgtcgcagcattctcctttaaaacagatagaaaaaaactccccctcactttctccatatgtattttccaatttttggtttaactctgcatacaaaaaactatcaataatcacacatgcctttccataaggttttgaatactccggcaggtgattaaattctcctggtccctgaacgtacttaaaaggactgccaaaggctctcgttgttgaattaaccatgcttcttgaacacactccccaagcgtgttcgtcctcctttcaaaataaaacaaccgctaagttccagcaaatcacgacgtcgttctttatctggacttagtataatctatatgaaaataattttcaagttttttctgtccattattatattttctacattatatctaatttttttgtgttttattgtgtattattcctattttatcgcaaattaatttaaatcccccgcgccttttattaaaataattttcagaaatggctatatattgcgtaataaccaaaaaataaaagcctgaaaacagaaacatcccggcacagggctgcgataacgcttccccgtgccgggataccactgaaaattccatatataacggttagccttccatctgccgtcccagaaacccggcagccgtggatgccagcttcatctcggcgtccccgaacttggcccttggctcacggctcatgagagccacggcgccaatggcgtcgccttcgcagataataggcgccaccacctgggcgctgattccctccagctcctcgtccactaactggataaatgccttgtcttccctggcagcgatgacagtgctgcgctcattgattgcctgttccagctgacggctgatatttctctggagcaggtcctttttggcccctcctgccacagctatgacctggtccctgtccgtgatgcatacgaaaaggccggtggactgtgccatggcctctgcatactgcacggcaaatgaggtgagctccatcataggcgagtattttttaaggatgatttctccttccctgtctgtgaatatctctaacggcgtaccttccctgagcctcagggtcctccgaatttcctttggaatgaccacacggcccagatcatcaattcttctgactattcctgtagctttcataaacaaaattcctccattttactttctgtcatttatcttctttgttgcccgtaaatgtagtatctgtcaaacagaggaatttatacttaaagtaaccttcaaagtaattatgaggttttaagggcaggaacttcttttatttttttgtggtcgccccggtcagtgaccacctcgtaccctatggacgccattctgcgttttaattctttaatattggccgcggcctccatgcctgtgctgattttattgtcgtaaagcatgtacttttttctcacttccatgggcgacagatttggcattaccacattggcccctgccatcacgccctgttcccttccatccggctctatggtccccagagccgtggtggcaggcagaagcacatccggcagcatgagccgtacaatggccagcagcagaagggtctggcgcagggtgccggcaggcctgtccttaaagggggtatcgtgatgagggataaatgggccgattcccaccatctccggctgaaggccgtgcataaaatccaggtcctccgctatatgggccgtggtctgatacggt

SEQ ID NO: 3267 - DNA, 581 bp, Unknown
  gut microbiota DNA sequence
ccccaccatctccggctgaaggccgtgcataaattccaggtcctccgctatatgggccgtggtctgatacggtgagcctgccatgattccgcagcctgtctggtatccaatggccttcaggttatgcagacattccttcctgtactcagaagacatctgaggcggatggagactggcataatggcacggattggctgtttcatggcgaagcagatagcggtctgcacccgcatcaaaccagcgcttataggtatcgtaccctttttcacccacagaaagtgtgaccgcacaatccgggtactgctttttcatgcgctccaccagataggcaatcttctcatccgtaaaccacggatcctcgccgccctgaagcacaaaggtccgaaatcccagcccatagccaatgctgcagcactccataatctgctccggtgacagcctgtatcgggaagccttttggttgcttctcctgataccgcaatagtagcagtcgtttttacaataattgctaaactccataagcccccggacatatatcttgtttccgtaattagcaagggctgcctccctggccttttcgt

SEQ ID NO: 3268 - DNA, 3224 bp, Unknown
  gut microbiota DNA sequence
ctggttgcttctcctgataccgcaatagtagcagtcgtttttacaataattggtaaactccataagcccccggacatatatcttgtttccgtaattagcaagggctgcctccctggccttttcgtacagatatgagtcctcctcccctatgttatccagcaggaaactaaattcctccctggaaagcacatgagacttggccagtttatccaccagcgtaatcacccgctccatcatgcacctctttccattctttctttcagtcccaaaggcaggacacaggtatacgtcctgttccttaaggttaacggatacagcctgacctccaccccaaacgcctcattgagatgttcctcgctcagtatctcatccgttggtccgaacagagtggtcccatgggcggtgagcagcagggctttctgggaaatggacaaagcgtgttccggataatgggtgttcacaacagcggatatatgcttttccctgcacaggcgttcaatggcctccagcacaataagctggttcctgaagtccaggttggattccggctcatccaacaccagaatggacggatttgcagccagcgccctggcaataagcaccatctgcagttctccgccgctgatgtggctgcatagcttacccttaagatatcctattccaatctcttccatacaggcctctgctatttcccagtccctctttttaggctgtctgaagatgcccagatgggcatttcttcctaaaatcaccatctcctgcgtgctgtaggcaaaggccgacgcctttgcctggggtacgtacccaatcttctgccacagctggttatatgggatgtcttttatgttgacgccgtccacaaaggtgcctcctgtgttccactccagaagtcccagcatacatttaagcaaagtggtctttcctgcgccgttggctcccaggacagacagcacctggggttcatccagggagaagtttacattttttaatatacattcatgggaggaatagccgaatcctccgtcccttacctcaaatatcataaacggatacctcctgtctttctgaggagcagtatgaaacagggcgctcctataagagatgtcaatatggatacaggtatttccgtggccatgaccgacctggccgcggtatcaattatgagcataaacagggctcccgatgccatactggcgggaaccactgatcggttgtcatttccgaatatcatgcgcaccatgtggggaatgagaagtcctatccagccaatctgtccgcacatggagacaacagccgcggtcaccatggctgcccccagaatcaccaggctgcggattctctttaccggaatgcccagagactttgcctcgtcctcaggaagcgacatggtattaagcttccatctcaaaaggaacaaaagcaggcttcctgcaaggataaaaggcgcccccataataagagtggtcctggtggtggatgccatgcttcccataagccagtatgtaatggaaggaagtacgtcctggggatccgccgcatacttcaccagagataccagggcggaaaacagggagctgaccaccatgcctgccagtataaccatcagcggaggaatggtgccccttacctgggccacgctccaggccatgagcacggccgcaactcctgtaatcatggcaagggtctgtatgccgaaggccggaagacctaacagaatacccaggacagccccaaaggaagcgccattggcagctcccagtgtatccggggtagccaggggattggcaaataatccctgaaatgccgcccccgcagccgccagccccgccccggacaaaagggccagcaccaccctgggaaaacggatattggatatgaccgtcctcacctgtcccgaaacctggacatccgggaaggaaccaggtatcagcacagccgccagctccttgggagcaatggtaaaccggccgattgccatggccgcggccgcggctgcaaaaattactgccagggaacccagggtccagtaccggttccagcttcgtttacttccattcatacgtttattccaccctcatatcattccggctttgtgcattaacgcctatttcttatatccggccgctgcctcccggccaggatggtacatcctctgtacctgctctccgcttaaatccacgccgtatagttccttataataatcctttacctcctgggtcatgtccacatccgaaaacaggtccggatatacctgttttgccatccacagaagcgtcatgggcgtatccgtgctgggcgtataacttctgtaggtgccgagaggaagtttatatacattcttgtcctgtaccgcctttaccggactccagtcgtcctgtccaaccgcattttcatagaggtcctcaggctggaccggggtaaaattagtgataaaaataatatccggattccattcatagacctgttccatgttgataaccgcattggaattctcagccgccacaccttccgccacattgcggcctcccactgcgtcgcaccagaactggccgaaaaatttcttacccgaggtcaccatggtggtatcactgtaattaaacaggaacaggatatccttcttttcctcatcctttaaaccggacaccttattctggatatcctcatatatgttctggctgtaccgggagacctgctccgccgtatcacccttttccgggaaaatctggctcagcaggctaatccactggtcgtaagtctctatactgtcgtaattccatttatttacagataccgcaactgccgcaaacccggcagagcgcagcgcctccccgatttccttgctgcccgcattataaaataccacatccggctccagtttcatgagctcttccatgttgatatcactgccgttcataaaatccgtgctggcattcaggatgtcgggaaacagctctcccagaagccctgtcctggcggcgctcatgctggccggcgccatacccacgattttctccccggatcccaggaacaccgtgatgatggaggggaggggaaggatatccgttaccaccacacggttcacttccctgggtatttcaacctggctgcccgcatggtctgttataataacagtgccgccggattgggatgtgtctggttccccggcggagtcttcccggctttttgtctcctctttcggttccttttccgcctgctgccggccg

SEQ ID NO: 3269 - DNA, 881 bp, Unknown
  gut microbiota DNA sequence
aggaaggatatccgttaccaccacacggttcacttccctgggtatttccacctggctgcccgcatggtctgttataataacagtgccgccggattgggatgcatctggttccccggcggagtcttcccggctttttgtctcctctttcggttccttttccgcctgctgccggccggtgtctgcggcccggcttgacgcagccggtgtttctgatgccccggcctggcagcctgttaatccggcggccccaaggcacacgcttaaaatgattgctgttaactttttcataatactcttcctctccttacaaccctttatttttaccctttgtgtatcacctgtatttatacctgtttacccttaaaccgaatcatccagagcgcacacaaagggcctcataatactgtgatacattctgccggaacatgcctcatggggaaaatccacaaacacaatattcctgtgggcagaacacacctggcggtacaggggatcggccaccacaaccgtactttccgctattgcgcggataacttcatcctcatcccagtcaatgatgtctccctccagagcaagagccttctccccctctgtggggcaaagcacggttacctggtccgcgccccactcctcccgcagacagcaccgcagggaacctgctatgacctgttccccaatgataagaacctttctgccggataaatcctcaggcagaccggcaagccccaaatcaggccggatgctcgcggctgcatcccatgagggcacatacccggcaccatcaaacaggctttggttttcaccggtcagcgccgcctgccggatgcattctgccagacgcccggatgttctcctgcccacaggtgttcccaccacccagg

SEQ ID NO: 3270 - DNA, 3736 bp, Unknown
  gut microbiota DNA sequence
acgcgtctgcatcccatgagggcacatacccggcaccatcaaacaggctttggttttcaccggtccgcgccgcctgccggatgcattctgccagacgcccggatgttctcctgcccacaggtgttcccaccacccagggcgttccgtacatcttctttagctctgcggccgccggaagtcccactgccgataccaccagatttacgtcggccagacccgccagccgcagttcatccaggccgctttccatggcccagcatcccacggtctccattccatggcttctgagaaaatcctttaatctggctgtgtttcccgtaagggaaaaatccagcggagagactcccagtatattaactttcagggctgccggcctgtccgccttaatcccgggcgggcagaaccgtttcacaatccacctcagagcctcccctgccccgcggacataggaatgcattccattggtggcaataccaaacgtggggattccggtcttattttcaatcattctggcaatccccttaaagtcagttcccatcatcatgggaataggggttcccccaatgcatataaatgccggacaaagattcagcgctgcgtccacaatatcccgcaccagcttttcatcgtcccccatgactgcttccagctccgacagggctgagatatacaccatactgtccatggagtaccaccttggctcatcatgggtggtgtaggtggaattgcagcctgaggcatcatgcatcacagtcatcccgcccagctcatataaggctgagcagattcctgatatatccgccgcgtataccggcagaatccggtttgtccgtttcaacagcagcacccccatccctttacctgtatcagtttttccgtatccttttcttccccggcagcttcttccatcatggcggccagctccaggataccgccgtacccgtacagtcctccgtcctccaccatatttacaaaatgagaagtccctgtaaagtaggctgccttctgcccgattgccagcacctttcctcccgtctcccggcaccatgtcctgggcagaaccgccatcttgtggtataccgtgggacagagcagcatccggggacattgcttcttaagccaggcaaaggtatcctcttcttccggcgatatggtatccgcataaatacgttccacccggaaaccgcatttgacaagcagcttcgccatgccaaagggcctggaagatgccgtatagtcaatggccacagaccaccccgcaagctctcccgcaagcgtttccagggccgtctctgccttctgccatagctgatccatctctacttctttccagatggagtcaaaatccagttccagcaaatccgacagacatttccagtgttcccttatctgttcccagtcatagctcaccggcagatagacccattcctgtcccaggcgcccgcaaagctctttcgccgcaggccgccccagaggattcgtcaccagattgagctttgatgaggccatggtctcatattcccggaaatcacggcaggtacatatatccttaatattaaatccatttttttccaagatattataaagctctgaacttttccgcagagccagattattgccgatgacatttacctgcttcgtacacatatcagcaggttttaaaagggaatacagctgttttctcataaaagggtccggcggcattttagtctttctcataatggggttcatccagcactgcacgaatcccacctgtggaaaacgtgtgtttaactccccgaatacgattttcatatccgttcccagaaaatgatggatacagcttgtaaacagcagcagggcctttggcagcgcaggcagtccctccaggatatgagtcactccctcaatgatgatctcctcgcagtttccctccagcaccgaatcctcatccacggatatggtagaaaaacggctgctgtcgccaagctccgcagccgacagtaccacgcccctcaggcagctctgggcgcatacgaatacctgatggctctcaggcagcagcattcctatatggacaatggtccatcctcccctggccggggcgctgtattccaatccgtatgtaaaaggtgccaggctgtccacctgggacagggcaagggccgtatcctgccccgcagtgtcatgcagtctcttaagcataggccttcttcacctcttcctccccgcaggccgctaaaacagcgtccgccattttcctgtactgcccggccatatcgctgtcaggataagcctccatgacagtctttccaagctcctccgtctctcccaccagagggctgtaatccagggagcctatgatttccgtttccatgtcctctgccagctcctccaccttctcctgttcccgcttcacgccgcggcggttgaggaggatgcctcccaggctggcataccccctggcttcaaaggactttaccgccgcggctatattggcagccgcatagattgccatattttccccggacgtcacgataaataccttgtccgcatatccttcccggataggcatggcaaagcctccgcagaccacgtcgcccagcacgtcgtagatgaccacgtccggcttatagacctcaaaggcattcctctcctccagcgcctcaaaagcagtgataatcccgcggccggcacatcccatgcccggggtaggacctcccgcctcagcacagagcacacccccgcttccctctgtcaccagttcatcaagccccgccttatctcccctggccctgatgatatccaggatagaggtcactgtatgtccctggtgaagctgtatggtagagtccgccttgggatcgcagcctatctgcatcaccttgtatccccgctctgaaagcgccactgataaattggatgaaatggtggactttccgattccgccttttccgtaaaccgctatttttaacatgttctatcctccccctcttgtctttaaaacacaaaaaacctctctccgaaattcagagagaggatatcatcagcataccgaggcttcaccaacaggccatatacgcggttcatgccaaccgtgcctgcatacggcacacactggcaaaccacgcaaaacagctcctgcacagccaggacagttccgctctctctttatctcagggttgcttcgcatcagagaaaggttctatttagttattaccatcatattccaggcggaaggaaaaagcaagggttaaaaaattatcttgtcctgcaccttgtttgggctttacgaaaggtcaatacccgtgatatcataaccacagataaccccggcccggaaaaaagcatgaatccagctgctgtaaaagcctgccgggtagaaaacaataagggaggacatactttatggaagaccgtctggctgtcatcagctgcatcatcagcaatcctgattccgtggcaacggtaaatgaaaaattccaccttcagtccggtctgattatcgcccgcctgggtgttccctgccgggattacggggtatccgtcatcagcgtggtcctgcacggaacccagaaccaaatcagttcctttgccggagacctgggaaaggtggacggtgtaaaggtaaaatccattcaggtgccggtgaacaagtaaaagaaagggaacaaaccatggaacatttggaatggctgctgtctctggtagcaaacaccgcaatcattatttttgaatttatcggcgtgggtatcat

SEQ ID NO: 3271 - DNA, 4028 bp, Unknown
  gut microbiota DNA sequence
atcctgcgcacggtggtggtccgtgagtggaaggaaataggaatcgtggccggaatcattgcattaagggccgcccttaccttcctgattcactgggaaatcaaagaagaagaacgggcagaataaggtcctgacacagaaaggccgcgagaaacaggggaattttcctgttctcgcggccttcctgtatctgggtgttatcatagtattttatatgcgtatcccgcacatacttttcagaatctcttctgccttccccatcatctcaaggctgtcctggtttttattccttctgtcaatatagtggaaggaaggcacatccccgggcaccagtttcaaatcacccttataggacctcaccatgtccggaatcttatccacctgtaatttggccttctgatacatggtaagccttacttcctggcggttaatcaccacctctgtcacataggcctggtgtgccagagccctgatggacgctatcttaagcaggttctccacactgcgcggtatatccccaaagcggtccatcagctcatcctgcatatccatatactcttcctctgtctcaatggcggaaatacgtttataaatatccagcttctggtattcattcttgatataacgtcccggaatatatgcgtcaatatcacactccacaacggtatcgtaggaatcctcctccaaggtctctcccttaagggccagcacggcctgattcagcattttgcagtacagatcataccccacggcttccatgtggccgtgctgttctgcccccagcacattgcccgcgccccggatttccaggtcccgcatggcaatcttgatgccggatcccaattccgtaaattcccggatggcctggaggcgcttctcagcctcctccctcaaaagcttatccctcttatacatgagaaaggcataggaggtcctgttggaacgccctaccctgcctctcagctgatacagctgggacagccccatgcggtccgcatcatggataatcatggtattggcattggatatatccaggccggtctcaatgatggtggtggacaccagcacatcaatttccccgttgataaaatccgccataatccgttccagctcatgctcccgcatctggccatgggcaaatgtgaccacagcatccggcacaagggcctgaacacggccagccacctcatcaatatccgtcacacgattgtatacataatacacctgaccgtttcttgccagctcgcggttgattgcctcacgcaccatctcctcattgtattccatcacataggtctgaatgggagtcctgtccaccggcggctcctccagcacactcatatcgcgtatgcctgccaggctcatatgaagggtcctgggaataggcgtggctgtcagggtgagtacatccacattttccttcaggtgcttgatcttttccttatgggcaacgccaaaccgctgctcctcgtcaataatcagcagtcccaggtccttaaactgcatatccttggacaggacccggtgggtgccgattacaatgtccaccattcccttgcgcaggtcctccagggtccttttctgcctggccggcgtgcagaaccggctcagcatatccacccgcaccggaaaatccttcatccgctgcacaaacgtattataatgctgctgggccagaatcgtggttggcaccaggtataccacctgcttgctgtcctggacagccttaaatgcagccctcagggccacctccgtcttaccgtaccccacatcaccgcaaatcaggcggtccatgattctcctgctctccatatccttcttcaccgcgtcaatggcatccatctggtcatccgtctcatcataggggaacagttcctcaaactctctctgccacaccgtatccgttccatactggaatccggccttttcctggcgcgccgcataaagcttcaccaaatccttggcaatctcctggacagccccacggaccctggtcttggttttattccactcggtccctcccagcttgttgagcttaggtttcttggcctctgctccagcgtatttctggatgctttccagacgtgtggccggcagatacagattgcctccgtccccatactcaatcttgatatagtccttgatgaccttatcccgctcaaccttctcgatgcccttatatatacccaggccgtgctcctcatggaccacataatcccccacggacagctctgtgaaactctgtatggccttgccctggtagtttgtctttttacggcgctttctttttttctccacgccgaacatatcgccctctgtgataaatacaaacttcaaaagaggatattcaaatcccctgtggagattgccgtaggtgaccagaatctctcctggccggaccttgcggacagaggtatttacagcgcccggatttccggtatccgcgctgccggcgccctctcctcctgcatttccgctttccccttcccgcccatccgggcaataggccctcaggtcatattccctcaggtcgctggcaagcctgctggccctggtcctggaagcagataaaagaataaccctgtatccttccttcttccacctggttaggtccttaatgagaatctcgaagctgttctggtatgagttcacatttttaacatctatgctgaatttctgatttaccttcatgcctggaagcttctggtccagccctgtaagcataacagcatatggtttctgcatcctggccaggatctcggccgctggatagagaagctcggtctggcccggcagcaggtaccccttttccagcctgtgcaccatgctttccctgaattccagctccacggtctcgcccttttcctttaatctggcaggctcatccagaaagatcacgctctcaccctggggaaaatattccaggaaggaaaccgtatccgggcagaaataccggatataagcatccagcccgccaatcctccacccctcgtccagtccgcttcgcagctccccgataatggtgtggattcggtgggcttcctccggtttatgctgctcccttagtgccttctcatatgtcttttcttccttttccagccttctgattccggcagccagctggtctgctgagagcaccacctccgcagccggataaatggtgatgttctctaactgctccaccgatcgctggctttccagatcaaaggtacggatggaatccacctcatcatcccacagctcaatgcgcaccggcacttcctcagtcagcggaaaaatgtccacgattccgcctctgatggagaactggcccatgccgtctacctgggccaccctctcatagcccatggcaatcaggcgttccttccagacatccaaatcaatcacctgtccgctctccaccgtgatggactgctccctcagatatttgagcggcagcagatggtccataaggccgtccatagtggtgaccaccacgccctccctgtcctccatgaggcggcgcagcacagcaatccgctgtctggccatcaggtttccatgaatgtccgcgctgtaaaacagcaggtccttggcaggatacaaccacacccggctggtaaagctgcgtaaatcatcgtagatttccttggccctggtgtcatcatacgtgaccaccagtttccaggaaaatgcgcttgcctctcccagctcgtacatcagatgtaccttctgcgaatccagggtccctgttacctgcagcggtccctttccggatttcagtgcctgaaccagattgtcatactcctgtaattctaataatggattttccattttatccctgcaccccttatcagcccttatggccgttaaactgattcattgccgcgtcagcgccctgagtaatcatcatctccactgccccggcagcttccctgaacgcgtcctccatgacagccctgtcctctttggagaaccggctcagtacatagtcagccaggtccattttcttaggtttgtcgcccactcccaccttaatgcgcgggaac

SEQ ID NO: 3272 - DNA, 1678 bp, Unknown
  gut microbiota DNA sequence
atcctccatgacagccctgtcctctttggagaatcggctcagtacatagtcagccaggtccattttcttaggtttgtcgcccactcccaccttaatgcgcgggaactcctgggttcccaggtgggaaatgatgtttttaatcccgttatggccccctgcgctgccttttttccggattcgcagctgccccacatccaggctgatatcatcatatacaataataatatgttccgggtccactttatagaaatcagccgcagcccttacgctctcgccgctcaggttcatgaaggtctggggctttaaaagcagcaccttctgtccgccgatgatgcctcttccgtaacatcccttgaactttttctcctccacggtggtgcccagacggtcagccagcacatctataacctcaaagcccacattatgtctcgttttctcatactccctggtgggattgcctaaccccgcaatgatgtacattaccctgtcatcctccttatcaccttctgccttcctgccaaatcccagccgctcttttattttctcccatattccgctcatttttccgtcactttgccttccagttttatgatttgcccgcattttccaatatattcctatatttataacacgcctttaagcgttagatacaaaccacatgggggtatctaacgcttttttccgttccatcattctatcagattacgcttaaaaagtaaagcagatggagggctctttcctccatctgccagcctctatctgttaatcatattcccgtcatcaccggctgcttccaactgccatggtttccaaagcccgttcctctgtaaaatatccgcatttcaccagacggtccagaacctgctgctggcgtctggctgccagttcctggctcacagtgggtgcatagcaggatggggcgttgggaatgccggccagcaatgtgctctcataatccgtcatgtcctcaggctccttgccgaagtagccattgcttgcatccctcacgcagtaatatccgtttccataataaatggtattcacatacagctccagaatctcattcttgctgtaattcctctctaaatcaaatgccaccaggacctcagccaccttgcggaccagctccttttcctggctgaaatacatattcttggccagctgctgtgtcaccgtgcttccgccttccacaaaggcccctgcctttatatcattgaatacagcccttccaatggctatcacgtcgattcccggatggttatagaacctgtggtcctccacggacagcaccgcatccacataaatctcaggaagctggtcaaaggtggtatagttttccttggcacgtatggacgccactttatcttcaaggctcatactgtccacggcctcccggtacattccgtatcccttcacagccactgtcacgctgaagcacagcaccaccataagcattatagctgccacccacttgatacctgtacgcaccttcatcctttcacctgctttctcttctgaatcatatatgttggaatcatcttatctcatatatgtatcatagcataagagaatacaataatctttgaatttgccttaatataccgtgactattctctgactatttatgaaattttttctaaaggtctgattggtttttcttaaggttttcaggcctttc

SEQ ID NO: 3273 - DNA, 2367 bp, Unknown
  gut microbiota DNA sequence
tgcataacaccacatactatgctaaactataaccgttgtgatgcctgtataagttcatgattggatgaacgtttctaccagctaccggaatagttgactacatgcttctattttgtatactggtttttttgtgccatgaaaccaggcaaatcaggcagtgaaagaaaggagtttccctatgaatccaaccacaaattacgacgtaatcattattggcgcaggtccctccggcatcttctgcgcgtatgaattaatccagaagaaacccggcatgaaaatcctcatggtggaaaaagggcgccccatcgaaaagagagtctgcccaaaacgcaccaccaaggcatgtgtgggctgcaaaccctgttccatcaccacgggcttcgcaggcgcaggcgcattttctgacggcaagctgtccctgtcccctgatgtgggaggcaatcttccggaaatcctggggtatgataaaacagttgaactcttaaaggaatctgataatatttacttaaaattcggcgctgataccaatgtatacggcatggacaaacagaaggaaatagaggaaatccgccgcaaggccattggcgctaacttaaagctgattgaatgtcccatccgacatctgggaaccgaggagggatataagatttatacccggcttcaggagcaccttctggcccagggcattaccatggaattcaacaccatggtcagagacattatcattgaaggcgataccgtaaagggcatcatcacagacaaggacgaaacctactacgcgcctgaggtggtttccgccatcggacgggagggttctgactggttttcacacatctgcggaaaccacggaatccagacccaggtaggcactgtggacataggcgtacgtgtggaagtccgggatgaggttatgaagttcttaaacgaaaacctgtatgaagccaagctggtatactatacccccaccttcgacgacaaggtccgcaccttctgtaccaatccttccggggaggtggccacagaatattacgaaaacggccttgcagtggtaaacggccatgcgtacaaatcccaggagtataagacaaacaacaccaactttgcccttctggtaagcaagaactttaccaaacccttcaacgaacccattgaatacggcaagcacattgcccagctgtccaacatgctctgcggaggaagaatcatggttcagaccttcggtgacttccagagaggacgccggaccacggaggagcgcctctgccgcaacaacctgattcccaccctgaaggatgccgtgccgggtgacctgtccctggtattcccccaccgcatcatgacggatatcaaggaaatgcttctggccctggacaaggtgactcccggcattgccagcgacgaaactctgctctacggtgttgaggtcaagttctattccaataaggtggtggtcaacgctgactttgaaaccagcatcaggggactgcgggcaatcggagacggtgcctccgtcaccagagggctgcagcaggcctctgcaaatggcataagcgtggcaagaagtattctgaaacagatggaaaccctgtaatatcaaaacgtttggaatccccttatttaaggggaccccaaacgtttttgtgttcttatccgcactattacaccttatcccaggactccatatatgccaatatatgctccgcgtcagaatctggatgcagtccgattaaatcatacagcctctgcaccacctccgcgggttccattaaatcctcagcaatcctggcagccgactgccctttttcccgcttacgcatgacctgggttattaatttcgccatcttcccctgttccaagcccttttcaagccctatggtctcccgctcctccagctcatctgcaaaaagttcccgcagcgcatcacacatcttctccacctcctgacacgtttcccagtttgcccgcaatattaaatccatggctgtctcatacaggggattctgttccttccccttatactccttcatcagtacttcaatgtcttcatccggcttcagtccgcttctcaaacggctcagccagatattgtcctcctttgacagttcccttatgacgagaatctgtagcggaaacaaaagtcccttaatgtaatatatccccggggcttcctcctccatatgcactccataagccttttccaaaaacacatgcaggctccgcggataatgttcccctgccaatgtgaccgtcacctgagacggcaaaatctcctggaccctctccgtattggactgcagtaaacacgcatatcctatagatttataaaaatcatttatactgatgtaatcctttatccccttatattcc

SEQ ID NO: 3274 - DNA, 133 bp, Unknown
  gut microbiota DNA sequence
gtcaatctgcaagggcttccttgtaagattatactccgcgtaaaaccgcagaaaccgccgctcttcctccagttcaatctgcaatactgcaaaaaaaccgggatgccattgaagccgttttttatccatacac

SEQ ID NO: 3275 - DNA, 195 bp, Unknown
  gut microbiota DNA sequence
aacctgggacggcaaaatctcctggaccctctccgtattggactgaagtaaacacgcatatcctatagatttataaaaatcatttatactgatgtaatcctttatccccttatattccaccacattatactgacggaatatgcggccaatgttcttttgtatcacccgtccggtttcctttctgaccaccagaac

SEQ ID NO: 3276 - DNA, 5012 bp, Unknown
  gut microbiota DNA sequence
actctccctttattataataaattatgtctctgtcagcaatagctgtatctgaaattctgtcctgcccggaaagctgcaccaacgctctatggcatcacccggctccttctaaacatgctattgcagtatcacaatttgaatctatggccgaaacggccgtcacagcgcctgaaggcgctaaagaatgtctgtccgacatctgaaaatacaactcaactatagcacaggcatatgcaaaaaacaagagccgtcccggttcataatgtatcaaccgaaatcagctcctgttcatccttctgtatcttatgccattccttcctctgccgcctcattctccagcaaggttgtctcatacttattcaaaatgatggtctgaatcatatcccttgtgttggagtttataggatgggcaatatcgcggtactctccgtccgctgccttgcggcttggcatggctatgaataaacccttctccccctcaattaccttgatgtcatgaatgacgaattcattgtccagtgtgatggaaacaattgctttcatcttgccttccttttcaacccgtctcactctcacgtctgtaacctgcatgttttctaccccttccgtcttatcccgccggtcccccgctctgcgctccccgtgcgctgcgcggggctatgtgcgtattataatgtatacctttcgtttttctccacaacgattttgatgttctccggtgtgccgatgtgtgtggtgttggcacggatggtatccctgctctctacgatacagttctcaatcactgtgttgtcacctatatagacgtcatttaaaataatggaattcttgattacacaattgttgcccacgtatgcctttttaaagagaatggagttttcaactgtgccattcaggatacatccgctggaaatcaggctgtttctgaccagcgcgccagggttatatttggcaggaggaagatcatcaatcttcgtgtatacatcaggatactgtttgaagaagtaatccctcacctcaggtttgaggaaatccatatttgtcttataataggagtccacagaagcgatattgctccagtagccgtccagcttataagcataaattcttttaagattcttatagcgcaccagaatatcattgaccaggtcatatctgtcttctgccgcgcagcgctccagcagttctatgagctgccttctgcggatgacatagattccgcaggaaatggtggtggcgtcagatgccatgggcttctcctcgaagtccgtgatacggccgtcatcattcagcttcacacagccgaaccgggtcacatccgtgccatcttccatgtccttgcagacaacggtaatgtctgcctttttctcaatgtgatactccaggaccttattataatccagcttatatacaccatcgcctgccgctatgaccacatatggctcatggctgttctttaagaatgtaaggttctggtataatgcatctgctgttcccctgtaccagtcgccgttctccggtgtaatggatggggtgaatacaaagagtccgccctgtttacgtccgaaatcccaccacttagaggaacttagatgcaggtttaatgacctggaattatactgtgtaaaaactgccacgttctggatgtgggagtttgtcatattgctgagtgcaaagtcaatgctgcggtagcttcctgcaaccggcatggcagccactgccctcttattagaaagttcccgcatcctcttgctgttaccacctgctaatacgataccgattgctctcattttacgccacctgcctttataatgtaatttccgccagccagtaatccgtcaggataatcgcctacggttgtctcgcctgctatggcagtgttcttgcctaccttaaccccgtcaggaatcacagaattctcaccaatggtcaccagatcgaactgatataccttggggtcatatgtactgggcgcatactctcctgttcccagttccacgccagagccaatccttacattctcagcaatgatggccttgttcacaacggttcccgctccgatgacggttccctgcattataatggaatccttcaccacggctcccttggcaacagtaacgcctgctccaataacggagttcattacctcgccgtaaatctcagttccttcaccgataatgcttctctcgatatttgcctcattggaaataaactggggcggaatcacatcattcttggtgtaaatcttccaatattcctcatacaggttaaactcaggaatgatatcaatgagctccatgttggcctcccagtaggaacccagcgtacctacatccttccagtagccattatattcatatgcgaaaatcctgtcgcctctcgcatggcagtatggaatgatatgtttgccgaaatcacaccccggctcttccttcatcttgatcagtgcttcctttaatacaggccagctgaatatgtagatacccatagaagccaaattgcttctgggaacaggaggcttctcctcgaattccgtgatacggttagactcgtccgtaatcaggatgccaaaacggctggcctcctcaatgggtactggcatggcagcaatggtgatatctgcattattggctttgtgataatccaacattacctcataatccatcttataaatatggtcgccggataaaatcagaacatattccgggttatatgattccatatactccagattctgataaatggcattggcagttcctgtgtaccaatcactgcctttactgcgctcatatggaggcaaaatggttacaccaccaacgttccggtctaaatcccatggtactccaattccaatatgagaatttaaacgtaatggctgatactgtgtcaatactccgactgtgtcaactccggaattgatacagttgctcagcggaaaatcaatgattcggtacttccccccaaaagatacggccggcttggctactttttgtgttagcacgccaaggcggcttccctgtccgcctgctaatagcatagctatcatttcttttttaatcacgttatcacctcttgctgttaaaatttttgtaattttaattataccacaaacttcgtaaatagtacataaatttttaaatttatttcatcgtttttgtgcatttttccgacattttttccgtttttaaccatttgatggtgatttatctatatctagtacccctttccaaaatttaccactaaataagtccccctcgcaggctgtatattcacggacgtttttgtcaaaaacagctataaacataatatcagataataggtacccggtgcattccaatttctggaacgcacagttccgcggacatctgacataaaacgcacacggcataatgcaaatgctgcataatccgcatacggcataatccgcttcagttaagtaacgtaccttacgggtattttccccgattaaacattatgattatgtaatcatattgaaaatacaggcttcacacccggctccataggaaagttaagccttgaaacatagcgtgaaatatcatataatcacgtatatgtagttaccgtccatttccaggggaattggggatactgaatatatagataagagaaaaggagaatatcagtcatggatctgattaccgtaagagaactttacaaacatccggaggaatatctggacaaggagataaatgtggggggctgggtccgcagtctccgtgattccaaagcattcggcttcatcgttgtcagtgatggaagctttttcgaaacattgcagattgtatatcacgacacccttcccaactttgcagaagtttctaaattaagcgtaggcacagccatccttgtaaagggaaccctggtaagtacgccccaggccaagcagccctttgaaattcaggccgcagaggtaactgtggagggcacctcctcaccggattatccacttcagaaaaagcgccactctcttgaatacctgcgcaccatctcccatctgcgtgccagaaccaataccttccaggctgtattccgtgtgcgctccctggttgcatacgctattcaccagtatttccaggagagggattttgtgtatgttcacacgcctctgattacaggcagcgactgtgagggagccggagaaatgttccaggtaaccaccatggacttaaacaatatcccaaagacggaggagggaaaggtggatttcagccaggactttttcggcaaggccaccaacctgaccgttagcggacagctgaatgccgagacctatgccatggctttccgcaacgtatataccttcggccccaccttccgcgccgagaattccaataccacccgccatgctgcggagttctggatgattgaaccagagatggcctttgctgacctggatgacgatatgtgtctggcagaaggcatgcttaaatatatcatccgttttgtcctggagcatgcgcctgaggagatgaacttcttcaaccagtttgtggacaaaggccttctggaccgccttcacaatgtgttaaattccgagtttggccgcgttacctacaccgaggccgtaaagatactggaagaacacaacgatgaatttgactacaaggtctcctggggatgcgacctgcagacagagcatgaacgctatctgacagagcaggtatttaagaagcccgtattcgtaaccgattatccgaaggagatcaaagccttctatatgaagatgaatcctgacaataaaaccgttgctgccgtggactgcctggttcccggtatcggtgaaatcatcggcggcagccagagggaggacgactacggcaggctggtagccagaatggatgaactgggccttaagaaggaggactatgacttctatctggacttgaggaagtacggatccacgcgtcacgcaggcttcggccttggtttcgagcgctgcgtcatgtatctgaccggaatgtccaacatccgcgacgtaatccccttccca

SEQ ID NO: 3277 - DNA, 151 bp, Unknown
  gut microbiota DNA sequence
cgaactgggccttaaaaaggaggactatgacttctatctggacttgaggaagtacggatccacgcgtcacgcaggctttggccttggtttcgagcgctgcgtcatgtatctgaccggaatgtccaacatccgcgacgtaatccccttccca

SEQ ID NO: 3278 - DNA, 653 bp, Unknown
  gut microbiota DNA sequence
aaaactccagggagattctgtgagagcgcgaaagcgcaggacagatataagcgtccataaaatcttccatgctcacaggcaaaagggaggcatactatcccatctttggtgggtgtccctattgtatgtttacatcccgctctttggagcgctgattacatcagcacaaatatgaatgccgctatatgcggccaattaaatgtatagggggaattaggaatggacgttattacaaatctcgtagcaaaaggtaacagttttctctggagttttctgttgattgttcttctgtgcggcaccggaatttattacacgatccgcctgaggttcatccaggtgagaaagtttggtgaaggctggaaactggtattcgggcacctcagccttaatggtgagaagcacgaaaaaggtgagatgacaccgttccagtcaattgcaaccgcaattgcagcccaggttggtaccggtaacctggcaggtgcagccactgcacttttaggaggcggacctggtgctatcttctggatgtgggtaagtgcgttctttggtatgtcaaccatttatgcagaggcaactctggcccagaattttaagactgaggtaaatggtgaggttaccggcggtcctgtttattacataaaggcagcttttaa

SEQ ID NO: 3279 - DNA, 40656 bp, Unknown
  gut microbiota DNA sequence
cacccttcaaatcttctatagaataaacaatatttttattctcctctttttttatttcataatagtaatccggtcgtacatccaaatctgtaactattgctattggtatatctatacactctccattttttcttttgaaaatatttgcatatctaagaaatgccagacttcctacattaacaattgagaccccatatttttctaatggcataccaattatttttgcgataacgggcattagaatattttctgcatcaccttcaacaaaaatgactcccttagcaaaaaacaagttagcttttgtagaatccaaaaatctttctaaatatttataatctccactttctaaagcagtatgggcagaatctagcatataagctttattatttttacaatatatcagattagatatttttatttttgatgctaatgttatgctatgtgtcgtgataatgcactgtaactttttattactattatcattatcatttttattttgtaaataagcaattagtcttaactgcgcctgaggatgtaaatgagcttcgatttcctcgattaaagcaatattaaagcgattttctatgtcaaataataataattctaatgctataaataactgatttaaagaacctaatccaacttgattttgagcaataattaggcttagcctgcgcagaatactagtcaattcatttctacttgctgaaattatcggttcataaccatgcgaatcataattattacccataaattctcgtaaagttgcttctaatttccctgtgatttctttcgcacctttctccccatcctcaattccaaaaatttcatctttttccagtttttctttcttaaaatattcctcgattttttgattagctataccaaagtatctttctaatacatgaagatctttttctttagtaaaaagtggatgatttagcaaaatttgcgccaaccttgaatggtaaccatgtttcaattcattttctgcatctcttagcggcttaagatacgtcactctcaataattcaattgcatcaaagcgggtatctaattctggcatgcctgcagtaatcgaattcataattctgttatctctacgtcttgctatcatccgaacactgagctctgccttatccccatcaaatgtaagccattccagaaaattgcctgcctcatcatcacttaattcttgaaaaacacattctatcttcaataattcacttcgttcaccttttaaatcctcataaaaatcacattcttttatttgtaaagtatcatggcttctagttccaagaacaaatttaattgcatcaataattgctgtctttcccgtatcattttctccaataagaacatttaatcctccctttaaataaacctctaatgcaggagtcgcatctaaattggcataaccatattttctaaaattccatattcttacacacgataaatacatttttcatatccccttttttacatatattaatgtgactgtacacaattataccaaatatatggataaattcccatcattttatacacatactgctatttacactataaatttactgctatttctatattccctacacaatccacgctttcataccttatatctcacaaccatttctcttgttcattagctttgcaatttctcctctccaaatacaattctatatcctttcatctccgaaaatagaatcagataatatctttcttatctctgttaatgaccaacctacaatcttagttttcttatattttgccagagcttcacccccttgagactctataacactctctatctttcccagattcagttcatcaaaacataaacaaaacattaatctcactatatccattttttcattatcttctatcaacacatcactcttttcatatttcttaaattcatatggaattttctctggaattttttcgtccatatatactttcttcgtcttcagacaaaaaagcaggctaatgaatactttcatccatcaccctgcttataaagcctatttccaaattattttttactttcctatccacccactaaaaaatccccatcatcgtcccaacccagtaaatcagccccaagacccagctggtcaaaaccccgtacaaaatcaccggcccggcaatggtaaatatcttacagccaacaccgaacacctcgccctccgcgtgaaactcgatggccggcgccaccacggaattggcaaatcctgttatcggcaccagggcgcctgctcccccgaacttcacaatctttggatagatattgaatccggtcagcaggatacttaaaagaatcagctccagcaaagtccaggccgctgctgtttcctggtccatacccatgctgttcatcatgaaattcagggcaaactgtcccagcacgcagatgattccgcctaccagaaaggccgccgccatgttctttgccaggctgtgggtgggagtcacctgtttcacgtactcctcatactttttcttatcaatctccattcgtttactcctctcaaaatccggctgcggacagccctaaacctttttggctcatcctctttggccacatcatcccagggaggccatatgattccagaaatataccagggaccccgccattttccctgccgccagggcaaatatcagatactgaagtcccacggccaggtgaatcctccggctgatgaccggaagtgcctttagcgtctctgccagggacatgaccagacagcccacaaaaatcccaaccgacagtccgaatacacatatgaaaagggtgccgatatagggccccatatagatgggaaactcataaatatccagtatatttcccaggaccccgcccagaataatcactgtctcatacagaaaaatatgcttcctggtacctgtctttcccatgaggcgcacaaacacgccgataatggccaggaacgcatatacgccggctgcaatgatgccgccggcgcacagaccgaagaacgccagcagacattttttaagtaatatcaattttggactcctttctgccgtcattggcaatcagggtcttactgatattgtcctcataaaggcgcatttccacctctaacggcgtggggtccgtattcagttttatggctgcgaaatgattgaagaaaccgatgatgcccacggccagaccaaccgaatagctaatctccagcacagtaaaacctccggattcatagcccatgaccaggctgaacacctcgctgaacacatcggtgacgctgacgtcattgttaaaggtcataatggcaaatgcagcgccgaaaaaacacaccaggcagacaaatacagtcttggtccactgccagatgtaagcaggcggggaaggcggtttgtaggctataataaaatccgtctcccccacgttgtttacatcaatggtggagtccagctgttttaacttgttgattacatccagggcactcatgatatagcgccgcttggcgtccaccttcacggtcatgaccttcatggagttgcatttattcatcacattctggtcgtcgcagtaaacctgggccacgtcctttaggacaacgtccttgtgggtcagctccgtgatttgacttagttttaaatagactgtatggttcatagacctcttccgctcctttggatttcctgctgtccgtacatcatggacacagggtcagtcacaaaggccggacatacttcctcttccacggaaggcccgtccatctcctcccataccagcgtcccttccttttcatatcccctgtctccgaaacctgaggacagataccataccagggcccctatcaggagaagggaagctatgactgcaagcagttcacatactcgtttaccaaaacccataagaatcacatccttttcaagaaaagttaattggtttctggtatctagtatgacttccatggaactttttataccataaggcttttgtttacagttttttcctcatttctttcaatatacgtttttccagcctcgacacctgtacctgggaaatgcccagctctccggcaatctgggtctgagtctcattgtaaaaatatctgcgcagaatgatttctctctgctcttcctcaagtccctccatcaaatcctttaaaaccattcggtttaacaaatcctcatggtcattgttgtcctgggccaggcggtccatgagataggtggaattttcatccccgctgtccgccggacggtataacgactccacctctgccgctgcttccagggacgccgccacttcctcacggctggttcctaacctgcctgcaatctcctcaatggtaggttcccttcccagagcgtatgtcatttcctccctggcggccctgaccttaacccccagttccttgatggagcggctgaccttgatcataccgtcatccctgagaaatcgtttaatctcccctgtaatcatgggcactgcataggtagaaaatttcacgtcaaacccagtgtcaaatttgtcaatggccttaatcagtccgatgcttccaatctggaacagatcctccatctcatatccccggcctgagaaccgccttacaatgctccatataagtcccacattgtccatgaccagctggtctcttgccgctttatccccttcgtgagccatattgattaatttcatggtctcatccatcgccgtcacctgccgatggatttcttcattgtcaccaatgtgccatgatttggttcggactccacctctacctggtccataaaggcctccatgaaggaaaagcccatgccggagcgctcaccttcgggatccgtggtaaacataggctccatggcctgtttcacatccgctatacccacaccgcagtccttcaccgccacggtcagggtccgttcctccatatctgcggtcaggtccagatatatggttcccctgtctcccctgtagccatgtatgactgcattggtcactgcctcggatacggctgtcttcacatcgtccacctcctccagggtggggtccagcctgctcatgaacacggcggtcaccaccctggcaaactcctcattccgggaaaggctctccatttccagcctcatgtgttctctgtttgtctccatcttcttatcctccatctttttcatccctttattgctgattccctgtcttcatatcctttgataaggcggcttacaccgcccatctccagtatccgcctgacctggggtcctgccccgtaataggccacggttccccggctggctgccatctgcttataacggtttaaaagtaccccgatgccggatgaatccataaatgatgtgtgtgtaaaatcaaatacaatccgattgatgtaattctccgccaaaagcaggtccgtatcccgtttcaggttcctgcagttatggtggtccagctctcccggaaggtgaatcaccagcatctgctccctggcctcatacgtaaacgttgtctgttccatccctccatactcctttctcagtgcctataaaatacaaaaaaagataccacaaaagacatgtttcttatcttctgtagtatctttcctgaaaaaccgtttaaattaataacctctggcattctttgcccggtccacatattcggaatccgggaattcattgaccactttgtcaaacatggaattggcattgtccgtgtcgccggcatcctggtacagacgccccacatagaacaaggcttccggattatccggctttatggtcagactggcctggaaatagtccatggcctctgtcttattgcctgcgttccacagctgaagtccccggtccaccagactctggtagatattcgccgtcatatcctgacggatattttccacaatagcctgtatgttttcgtcctcaatcaaatcaaagcctgctcctgcaaatgccttggccgctgccaccaaatcaccgctcctgtaatcctggagaatccaaatcagtccctggtactgggcaatgacgctggtgttgcctgtggtcagctcgtccagacgggcctgaatctcctttgtgtgggcatccagctcatcgtaatccgctttcagaatatcgtactgctgatttgcattgttaagcttctgcatgtaggatttcaggttgttatcgtgaatgctgttaaggtcccttgtcctggccggcagaatgagaaaataaaatgccataatgcccagaaccagtcctataatgatgtgaagcacagtggaaatacctgtattttccttataagtattagggatgatgacatcgtcatcctccatcttccgatgggaaaatgccttcaccatcttgcgcttctccgcatcagccctgcctgtattctgttttacaatggacatatagtacagggccttctggttgctcttgtcaatctggagaatcttgtacaggcagcgcccggccttattaaagtcctctctggccatatataacagggccaggagcagatgggccttcacaaaatgagggtttgactccaccaccctggccagctggagaatggccaaatcatcgcttccgttttgggcgtgccagagcgcctggttaaatgttttcacattctggctctctatctccagctgtcccggcttcctctgaatctcatccagataatggtccgccagattatcctccggctgcagattcaggctgatgacccactgtaccagggcatctgccacttcaccgttctcatagtatatcagtcccagcagattcctggcatctgtctgatacttattaaaatgcaggctcttcttcaggcactgggccgcgccggacagatcccgtatcctggccttttccaggcccaggttgtagaagctgttggctatctgctggttctttcttgcatagtctgtattcacaggtcccgctcgcctctttcttttatcagttccatcatgatgtccgtcatatccgtcaaatcgctcttaacaatggcgtcctccacctcttccacatccaggcttggtttaaaacgctcaatctcctcttcaaaatcaatcatgtatatcactcctatcttatcaggtctgctcagggcttctgctccagtaccgccttaatctcaccgatgagatacagggatccggcgcagaacagcagtccctcccggctcttttcagccatatcctcaaccgcgctctttgtgtccccatatgaataaacaggtctggacgtataggttctgaataccctggccagctcttcagccgccagtcctctgtcactgttcatatgaaccacgcccactgcttcccatatcatctctttgcacagctgctctgccatacgctcatagtccttatctgaaacagctgcaaacagcagccatggcttctttccctgtctgtccgaaatttccccggctgtctgtatgaacgcctcaataccgccgggattatgggcaccgtccaggtagattcccggcctcacctgctccatacggccgggccagaatgtattcttcaggccctttataatatgctggtccgatattccccattcctttccgtccgggcagatgcagggaccgtgtcccggcatccggcatcctgtcctgggacattctccggggtagcgcaggacgtccagggtgcgcacagccagcatggcgttctccgcctggtaaaaagcttcaaagggaatctccagctccaggcatctgccgtccttcatcctggcgttaatggacaggcctttttcgcctatctcctccacataaaaatcatcccggcctaccggatatctggcagcacccttgcggaaagcaaatccttccagtatggtggagacctccggctgcccatcgtcaaaaacaagaggaacaccggtctttataatgccggccttttcccctgcaatcttggccagggtatcgcccagatacctggtatggtccatgctgatggaggtaatcacacaggctgccggccgttccagcacattggtggtatccagcctgccgcccatgcctgtttccagaatcatcacatccacatcatgcattctgaacaggaccatggccatataaaacaggaattcaaaaaaagtgggatggcagagtccctggtccgcaagctttctgctggcctcaaggacagtctcaaaagccccttcaaagctttcctgatccaccatttccccattaatcagaaaacgttcacgcacctccaccagatgtggtgagataaaggtgccggtgctgtaaccggcctcacctaaaatagaggtgagaaatgcgcacacagaaccctttccattggtccctgccacatgaatcgccggtctgtcccggtcagggtttcccagataatccagaaaccgcctgacgtcctccaatgaattctttttcctggtccacatgggaatgcggtccaaatactcctctgcttgtcccataactaaaatccattctttcttaaaagcctgtctgccggacaggcttttataatcttaacctaattttattcaattggcaaccggatattctcgccgcccttcgtcaggatgcgacaggaatcctctttgccggtttctgtattattggctggtttctggttgactggtttctggttgactggtttctggttgactggtttctgattgactgcattctgtaacaccggctgccttctgtaacaccggtttccttctgcaccgggccctctagtttccctccgtattcagagaggcttgcctgcggcgtcccaccggaatctgcgccagtatgatggcgccaaacataagggcgcagcccagtacttccttggaagaaagcctttgccctaaaatcacccatccggccagaactgaaatactggattccaggctcagaatcagggaagccaccgttggattcatccccttctgtcccacaatctgcagggtataagccactccgcaggacatgatgcctgcatagagaaccggcgcccatgcggctataatctggctccattcaggcgtttcataaatcagcatggctgctcctgagaggatgccgctgacaaaaaactggatacaggacatctttactccgtccacaacaggggaaaagaaatcaataatcatgatatgcacagcaaaaagaaatgcgcataccagcatgagaagatcccctttgttcaccgacagttccccgcccttcatgcacagcatgtaaagacccgccagtgacagaactactgccccggcaaccaccggactgcatttcttacctaataaaagaccaagtacagggacaatgacaatgtagcaggcggttatgaaccctgcctttcccactgtggtgtactggattccaaactgctggaaattgctggccaggcaaagggccacgccgcagcagattcctcctataatcagggtcttcctggctcctggtataacaggaacctgctccttccttttattcttcctgtcaaaaaaccatatgcagggaagaaggacgacaccacccataaggcatctgacgcagttaaatgtaagtgggcccacataatccattccaacgctctgcgccacaaaggccaccccccatatggaggctgtcagcagcagcaaaagcgcattttttatcttcatagtctgacctcgctgtatgtaatgaatatgaagcagttaaaaacaactgcctagctgtcataaaagttctgataatcagggtttcagcacgtcaaggctgtaattcaccgccacatccttgcgcacatacgatttattgaaagcggacagaatccggtccatgaccatctcgctgttctcaaaggtggcggaggacagaagcagaatgaactggctgacactgtaacgcgcgtaaacgtcgctggaacgaagggatttctgaatagacgccctcaggcgctccatggccctcgcctggatctccggcttcagggtgcgtcccttcctgtctcccacagtcaaaagacaaaggtacacggaatcaccgctgcgctccacacctctgcgttccagctgtaccagacgcttgaacaccgcatattcacactggtacgcgccatgaccttctccggcgctacccgtgcccagattctcctgaatcacatccaggtcagtcactacctcctgctcgctgttgctgataaccttgtataattccttaaaatgctctgagggcgtcatcagacgttcccggtagaacatatccgtggtatccttataccgcttcagggcagtctcctgttccccctgtccatacgcagcataaatccagtaatagtggaaatcctcggcaaaccggtcaatgccgatggccctctggcagatttcttccacctgggcatactccttatcccggatcagttcttccgccatataaacaaccagcttctggtataatgtgtgataataggcagccatgggacctacccagctctcctcagctgacctgggcagaaaaatacccctgtagagttcaaatgcctccaggcaggcctcccacatattcttcccatccaattccgggtccaggattctccggcacagactctcaaaccggtccgtgtccacctctgtttcccaggccgggttccacatgtaggcccccttctggctcagaatcaaatcctgagatgggaaaccggcggcctccagcatcttcctaacccgaaaaaccagggttttaagggcgccgtaaggattatcctgaacaccgtcctgccagatggcatggaacagctcattgatgctcacatctcccctgcgcttgattatcagatagctcagcaggctccaggctttcctggaccggttatcgctgtcgcacatggccttttcatccattgtgatggtgaaaccgccgaacatcctgacatggataaccggcttatttcctgatgattgattcatgctatgctctccctctctatccctgtatctggtctgccgcggtgtatacggcctggcgcggtgtagctggtctgccgcggtgtatacggcctgcccccaccgccctaatttttctccgggttcatcactgaagctgtgccagacgtatcttcacctgctccatcatctgctcatatttttcaagctttgcgcgctcctcggcaatctttgcttcgggcgccctgtttacaaacttctcattgcccagcatacctctggaacgggccagctctcctgccagacgtttttcttcgcctcttaaccgctctatctccttctcgatatccaccaaatctgcaaatggcatataaatcactgccttgtgaatcactgctgatacagcatcatctgcaattccttccttattctcctggagaatcacctcgcccgcatagcccaaagcggcaaagaagcttttactgtgctcaaatatctgcagcagccctgcgtcctccgataccacataaacagttgccttcttactgggaggaacgttcatggatgaacgcacgccacggatagctcttacagcctccttgatggtctctgtggactgttcttcctttgcaaaattccagtcatccctgtaaaccggccactgggaaatcatgatggtctcctcttcctcctggagattgcagaaaatttcttctgatataaacggcataaagggatgaagcagtttcagcgcctgaatcagcacatgcttaagcgtccagatggcagccgcctttgtatcgtcctcttcattgtacagccttggcttcaccatttcaatataccaatcgcaaaattcttcccaaataaaatcataaaccttctgaagggcgattcccagctcgtatttatccaggttctccgtcacttccctggtaagggtattaaccttggacacaatccatttgtcagccatggtaaggcggtccaaagccacctcgccggactgagcagccttctcaatgttcatcataatgaatcgggacgcattccagaccttattggcaaagttacggctgttctccacacgctcccaatagaagcgcatatcattgccgggcgcattgcccgtaatcagggtcatgcgcagggcatctgcgccgtacttgtcgatgacctccaggggatcgatgccgttgcccagggacttgctcattttccgtccttcggagtctcttaccaggccgtgaatcagcacggtgtggaacggaagctttccggtttgctccaggccggagaacaccatacggataacccagaagaaaataatatcatatcctgttaccagaacatctgtgggatagaaataatccagatcctctgtcttttcaggccagcccagggtagagaagggccagagggcggatgagaaccaggtatccagggtatcctcatcctgttttaatgaagtgcagccgcacttagggcaggcgtggggagcttccttggaaaccacgatttctccgcattcctgacagtaataggcaggtatcctgtgtccccaccacagctgtctggagatacaccagtcgcggataccttccagccagtggagatatgtctttccaaagctctcaggaacaaaagtaaggctgccgttcttaagggcctcaatggccggcttagccatctcctccatctttacaaaccactgctgcttcaccattggctctaccgtggtcttgcagcggtcatgggttcctacgttatgggagtggggaaccaccttgaccaacaggccctgggcctccaaatcagccacaatggccttcctggcctcgtagcggtccataccaaaatacggtcccggaacatttactgtggcatcgtcgtttaagataatgatttcttccaggttgtggcgcttgcccacctcaaagtcgttggggtcgtgggccggggtaattttcacgcagcctgttccaaattccttgtccacatacgggtcggcgataacaggaatctccctgtctgtcagaggcagcttaagcatcttgcccacgatgtcctgatagcgctcgtcctccgggttcaccgcaaccgcggtgtctcccagcatggtttccggccttgtggtggctatctccacaaaacggccaggctctcccactacaggataattgatgtgccagaaaaagccgttctgctccacatgctccacctctgcatcagagatagaggtctggcatacagggcaccagttgatgattctggaccccttatagatgtagcctttttcgtacagcttgacaaagacctccagaactgcgtcagagcagccatggtccatggtaaaacgctccctgtcccagtcagcagatgaacccagtttatgaagctgattcacaattctggtgccgtactcgtctctccacttccagcactccttaaggaaaccgtcccgtcccaggtctgccttgtcaacgccttccttcttaagcttgtcaataaccttgacctcggtggcaatggcagcatggtccgtacccggctgccacagcgcctcgtagccctgcattctcttatagcggatcagaatatcctgcatggtattgtccagggcatggcccatgtgcagctggcctgtgatgtttggcggcggcatcacgatggtaaatggtttcttactgcggtttacctctgcgtggaaatactttccgtccagccacttctggtacaggcggtcttcgatgtccgccgggttgtaggttttctccagttccttcatggtttgttctccttttttgtagatggtttttgtaatgggtctttgtaatggctctttgtaattggtctaaataatgggttttaataatgagtcttgataattaatttttgtaattagttttgataattagttttgataattagtttttgtaattagtttttgtaatttttgtaattatagtaactaatttgtttgggttagtggttttgttaatgggtctgttaatgtttttgttgatggactcattaacggtttggttaattacagaaaaatggctgccggcagacagaccctgtttgcctgaaaataaaaagcccttcgccaatcccggttaagggaaggcaaagggcggagtgtccgcggtaccacctttgttttgccggatgtccggcagtctcattaggcctttaacgcaggccggtcggaagcagctacacagaaggaaacttttcatagaggcaatacgggaatatccgcctgccagtcactcagttttatccttcaccgctccagttcagaagctaccttctatcatactctgcccgggccgcctttcagccagtggaccgccctctctgatggtttatatgatgtactcctcttcttcgtaaccgttgtgtttaattggattgctttgtttgcatgatttgcttgtttggtttatttgctttgatttataattatcaagcataataattattgggggatttgtcaagtgttttttggtgaagcttgcgctggtggaagcttgcgctggtactctggcagagttttggcaggtatttgtgtacagcttatcctgtcatccccgctccccaagccggaaaaccgtattcttaagcactgctaatgctatctccgcaaacgtacattccagtccggctggttataaaatattaatattgcaaacgccaatattgttattccgaaaaacagacttgcccctttcacttttcctttatacctgttactatgccgtccgaacaaataccccagtatcactgctgcacaatatcccatcaggctcccccaggtattgtggagtacatcatccagctctcctagtcccctatccgtcagaacctgagtaacctctataacagacgaaaaaacaaatcctatgatggctgccttcttccagtccggctttcggagaatgatagtaaagaaaaatccgaatggcatgaatagggcgatattaccaagaatcagataccaatgattgccagaatgttctctccaggccctttttatggtccagaaaagctggagctgtatgtctccttgtcctgtttcacggtataatgtggcatacaggatgaccgctatggaaaaaagaaataggaaacgaaacagatatttgcgtggatggaacatggcacctcctaggggaaatttctttgtaagtgattcaaaaactctaccattagtactttataatactattcaatatctgagataatctccccacccaccctccatgagtgtgaagtttagaaaatgcctcaaacaagttaagttgcaaaaaagttccacctgaaggtatggtagttattgaatggagccggcagaaaaatattacaagagatacctactactatcgtctttgaaaggcttgaacttgtgtcaagaatcctcggtcatgcttctacgcagacaactagaatatattatgctaagccatcccttgaaatcataaaacaagcgatggataaaagtaatccagagctaaatgcagcagagcagttgtggccatctctttttcgagtcaggcctgccggatggcttcataattcccggcgtacttccggcggattttatcctccagttcaaagagccggttgacatacatgaccccctggacagatgcctgcgtgtagtcgagctgctttcccttggggatcgcgtcgatcagatatctgcgtatatgggcccagcaggcagtccgttttgcattcggtactttgttgtagccactggacccgtcgcacatcagatatccaaggaacccttccaggaattccttcgcattgtccccggcccgcgttgacgaatacttgtagatgatgatcggcggttctccgtcttcgccgctgcgaaacagtcacatgtaggaattcgtctgcgcccgccgtcctgggaacgtggtgcggctgatatctacgccacactgtttccagtcctgctattaccaaataatcgtatttcaaaacaaatcttctcctcattcattattgtatactaaccttaaatattctttttcctgttattctgttgataagcagaagaatttttgcaaaagtctcaaatttcttaaatagcaaatagtatagagtattgctaactattatgcatgtaagcaatcgaacaaacaatccaatgtttccgcttaacggaataaatctagtaagtaatgcaacaccagtagttacaaatatcatgattgcagttccacctaaaagtatcttcgtatattcggaaacagatctgtcaaaaacatatttaaacaaattcctatacagccacggaatacttatgcaacacatactgattatcgtcgagattagaattccatataagcccataggctttactaatataagatttactaccaaatttgcccctgcttcaatcaaaggtctaaatcgatcctgatgccaaattcctgccgcgtctttgtataagctaaacaagctcataatttcacataaatagaaataaatgcaaaacagaatcaccatcaaatagctcagcatcaaatctttccctacccaaatttccataaatggttgaaaaaggcatgcaaagcaggttgtacaaaacccaattagccacataaacaacattgatatcatcttgaaatcacagtaattcttttctttactttcaagcaccatgctgtttcctatactagccaagcacgctttatatatcacttgattgatccccattactgctgaaagaatataatagtagttttgatatacggctaacgcagtcaaacccaaaaacgcggatataacaattgtatctgccgagttaacaacaactcctccaatcttcgcggtaaaaagatcttttactttctgattaatatttttaactacctctgtatctaatttccctttaggttgtaaatccggatacaaacgatttgccataaatgcagttaaaacattattaagcaatactgcggaaagagcaagaagcaaaaatagataatagtttttccacactaccaaaaccacaatctgtgtagcatattgaattgtgctgaccacaagaagtgatctactaataatatcatttcgttggaatgctgttaatagacaacttttatacgcaaatagccaatatgagaaaaccgtagccaataaattcaagatatataaggtatatacattcagtccacctggaacttcaccgctaattaaatgtgggataaatggcaaaacgataatacccgcacctaaaataatgatcccaataatacgataatatattttatacaacttcattaaagcacatattgtaatatgatcattttgggcaatgggttcgtacatactaaataccatagcagagccaacccctaactctgccaagttcaacacttgaagtaccgatgcaaataagctatttaacccgacatattctatgcccaaggaatatatcattattgttctgataataaaaggagttattatctgatatacttttaatattcctccgaaaatcatatttctggaaacatttttcactctgcctttttgcattttattctcccatatttttcagaattgctcattacgtattcgctgtaaaggacgctatttcatcaatagttgcccacatttcttctaccgtctcagaataatagtctgctacttttggaactccggcatctccataccacaaagttaatattgattttactccggcattttttgcactttttatatcattatagccgtcacctatcatgacggtattctccaggtctgcccccaaagcttccattgctttcagaattggcatcgccgagggtttgggttctggaacatcatcaccgcaaatcaatacatcaaacagatcatcacattgaaagtattttaatatttccaccgtgcggtaatgatcctttcccgtacataatgcagttttgtagccatatttcttaagtttacgaaccagcttcatggcttcccagttgaccaaaatcttatcaacagattcgctactgattctccgaaacgatgctgccatcgcagctggaagccccattttttttagcatcccattaacagaatcaccagtatgcttgatatactcttcataagacggacaatggtcatctccgactacttctttatagctgccaaaaaaagcagctttctggacttcgctagaatcaatcaggcaaccgtccaaatcaaaaatcagatataaacttttattcacaatttcccctccatcccataatcatttttttgttcatagtaagcattggctccatgcttacgcataaaatgcttgtccagaatatggtgaggagctggcttcgcatttggcgaaatcatgcagatacaaattgccatctttgcaactttctcaagaacaacagcatggtatacaacctgtgctgcatcctttccccacgcaaacggaccatggctacggcagagcactctggaaacaaacagcgaattcaggctgcgattctggaatgttcggtaagtaagatttcgtgtacagggaattgcaccaatttctccaaatgctttaaaaaactcaatatgcgttttggtgtcggaagacagatttaagctaccatccacaatatgaccatccacatcaacaacgaccatgtcctttgcagacaaatcctcatacgccacaccagatggtttaatcgcggcaagacctctttaaactttttcctttaattcttccaacatcactatgccatctcctatgtttattctaaagccttactatattcgctttgagtaataaaatgaatctcaaactccggatttgtctgcacaatatccgcaatcatttctgtattttctcttgtcagttcttgtctgtccttatcctcaacgcctgtttccaaatcgtttttatagaacgtgtcacctgctgaacggtacccatccagtccagctacatataccccttccacgccgcaacgtatcagaagtctaagcagcaggatggcggagctatccagatttacccatccgaatttaatcagagagctatagtttacaaccgtggtatcttcttcaattgcgccctgaatattcgatgtaacaataaccttcgtctcaggggcacactcctgaaattttctaagattatatcggtttgtgctgctatagaatatgtaatccaactgatatccgctgatcacattattgactgcgatgaccatcgtcttcttctcatcgataaatttttgaatgtgctccttttctgctgccaccgatttacctggtgcaagcagcagaatattgcggttcttgaatgtattgctcagcttttctaatgccagggcatcagccacgggattgtcaaaatactctacatagagcttttccagcagagcgtaatcatactttttcttctgaacatcgtccaacagttcaataatgccacgcaaatcctttgacttaatattgtgacgctttagaagctgcttcacattgaaggtatgggcattataaattccggcaataaagtaaggaatgctgtatccccaggaggtcacctcctgtgctgatgcaataacagtatcaattaaatccaacaattcgtcaatattgtacttttcctcatgcttcttattgataaactgtgcaatcaattccgtatgggcatttcccgcactgcgaccacagccaaacaaagaagcatccaccacaacatcccggtgggcgctcatcttgttgatataactctgggcatttgcatctgccagcatcaggttattatgggcatggaagcccagcaaaatatccttggagaggtattggtccgcaagaccggtatagtgaagcatatcttcttcatacattgcgccaaaggtatccacaacagaatacgccaaaggtttgaactcattaactttttctataaagtcaataatctcctcatcgaaaaaacccattgtatctacatgctgaacgcatacttgataccccttggcacgaatctgtgctgcgtaatccaataccaacccaatctcattcttcttaaaacacacccggattgcatctatggatcttctatcatactcagaaagatacttcaggtcataccggccatagtctaccaaagctacatatgtttttcctttcttcttattcttcaggaaaggaatgatatcttctactctctggaaagatgtacttcctttgatatagtctgcattcttcaaaaagccacattctataatatccacatttgccatctcaagaccatgaatcatcttgtggatgttcatctctccccacatcaaattatcaataggggcttccctcaaggtacaatccaataactgcaatctgcccataaatcgtactcctttctactacaatatatttatggttaatatcccttacagccagtaaggaattatccatcttgttgcttaagctgttacaatgttggagcaatcggtatatcggcctcctttcttggacttcgcgtccgtaattaagactgataaccagctcctcatttgcagcgttcgttttatgcaggttgaactgcctttggtacgttcgtgtcacaccacagtagattgaataggcaatgagtaaaactggtacttatctattgcaataatctttaggagtgacaaatttatgaacatgaacgctgttggtattgatgtttccaaaggcaaaagtatgatcgccattctacgaccttatggagaaatcgtttcttctccctttgaaatcaagcacacctccagtaacatccaatccttaattgagcagatccgatcaatcgaaggtgaatcacgcatcgttatggaacatactggccgttactacgaaccactggctcgtgagctttctctggcaggtctttttgtaactgccgtaaatcctaagctcattaaagattttggagctcattctctccgcaaagtaaaatctgataaagctgacgctgtaaaaatagctcgttacacccttgacagttggacggaattgaaacagtatagtcttatggacgaactacgcaatcaactaaagaccatgaaccgtcagtttggcttctacatgaaacacaaaacagctatgaagaataacctcatcggtatcctcgatcagacttaccctggtgttaatacttactttgatagccctgcccgtgaggacggcagccagaagtgggttgattttgctactacatactggcatgtggactatgttcgtaaattctcattaaatgcatttgtcgaccattatcagaagtggtgcaaacgtaggaagtataactttagcaaagacaaggctgaagaaatctatggagctgcaaaggagcttgttcctatacttccaaaagatgatctaaccaagctgatcgtgaaacagtccatagaacaattaaacactgcttccaagaccgtggaagagctccgtaccctgatgaatgacacagccgccaagctgccggaatatcccgttgttatgggtatgaagggtgttggcccgtctcttggccctcagcttatggctgaaatcggagatgtcacacgctttacccacaaaggggctatcactgcatttgctggtgtagacccaggtgtcaacgaatccggaacctatgaacaaaaaagcgttccaacctccaaacgcggctcatcttccctccgaaaaaccttatttcaggtcatggactgtctcatcaaaacaaaaccgcaggacgaccctgtatatgcgtttattgataagaaacgtgctcaaggaaagccttactatgtctacatgactgcaggcgctaataagtttctgcgtatctattacggaagagtaaaagaatatctaatgtctcttccagaatagagaataccacatcctttcagaccagcagataatggtggtctatttgttgtacctgaaatttaatcaacaataaatcttgaaaatttctcattttcctattgactttttatttgcaggctttatttgattaagccaagtacattcgctctcttgccgtccggcatttccataagagccttagccagtttctcatcgcttaactgtgaaatcatctttccgagaacatagtggtatactgcctcaccatccttcgaattgataccctttgccatcatcgcatcatcatccatgtgatactgcattctggcaagcagataatcaaagatggtatcaatatcggtagatgtcttcaaatctacctccatgccatagggattatgaccgaaatagtaataccactctctcatacttgctttaggtgcaagttgaataccgtcagtgaagaaatacagcttgtccagatcctgcgaatttctatgttctggcccccacttaaaggtgtatggcttcatgtccttatccagaaggtaatggtgatactccatcacagtgattagggaatcatagccctctttgagcttctcaaaataggtcttgcagccctttctgtagacatctgcgcctaccattggtgaagtgcagcaagcccacataacatgatcctctctggcttcaccagtgatgtagtacaggaaatcctggaaaggaagtgtctctgcagaatattcataaggacgcttaattgctctggcaccttccttatctgccattgtaaggatgtcatcatcctcagaggatacgattacctcagtgatcgcatccacctgcttcagctgacggattttgtggacaaggaggttggattcaccaaactccagcgtatttttgcttggcagacgattgctcatgccttttgccgggataattgcagtaactttctcgctcataaacttctctcctattattctttatttttgaagaaatcacgcttttggcgcaactcatcatcgctcatattccaccattgcatctgctccaacgatgcaattttctcatcatcaaaacggtatttgatgatttttgcaggaacaccgactacaactgcataaggtggcacatccttggtaaccacagcaccggctccaactaccgcaccgtttccaatggttactccacccagaaccgtgctattactaccgacccaatcatcatgtccaatgttgactgggttgggaatatcgttgtaaaaatccccagcatccggtgcaatttcagatgttggggtgagttttgccttaaatgacacatttgtagaatatatcacccgccccccgaaatgttttttttagttttttcaggcgtagtgtcctgatcagtctcgacggaatcagactcgttacgatttccaacattttactaccttccttttattgttttgtattatgcttcatctcgcattacttctaatgcgttttttcaaaacctatagctttcgtattcttatatacaaaacagggcatctggcaatcagccaaagctccagtttgaattttggggaaaactctggaaccctttttatcctgcgaatattccctttatgatcccagagcgcatacatatttctgttcatttacagcggcgggttgaagtccacttgtagtttttctggaagcagaggaaggcatccagtatatcatgatgatctgtcagctctacgccctgaaaaacatccacattaccactcccctctgcattgtcaacttttcttctgcactggacaacatccgccgtatgttcaacagctgtagtcagcatgaatgtaatcgtgttttttagtgcagcattacgggcagcggatacgcctttggaggactgcaaacagttgatccgatgatcattttccttccacgcaaggcatttcgcccaagaagcatcctctgagccgttttcaaccagcaaaagttctaagttcttataggtattcccaaggatgctctgtacacatcgatctattatattttcattgttatgaaccggtaaatagcacttactaactccatttactttattacctccctgccgttatataatgcaaccaggaatttcaggtttagattggcaatccgatacttgatacctttgacttctcttttcgcctgacttctatacacttccctatactgtttctgaagtattttgtattcctcttcttttaagattttctgatattggttggcaacatatataatacggtcaagcggctgttccatcttcttatatatttgttccatgccaccgacctgggataatgcatagacaagtatgtcgttatattttttcttctcttccttagcaaattcggacacagaataaaactcatggagcaaggcacatagccatctgaatgcccattcttcctcacagcgaaaatcccgtctgcatatatccagtgcttcactgatcgcctgtatattatcaactctatatttaggtttaatatcatgcgaatcagaatcgttgcgcactaaataatcgtacaaatttcggttacagaaggcgattatctttgctttttttaatgcagcaagctgaacaatatactcttctgccttccgtcccacagggaaacgaatatcctgcaatatatctgcacgatacagcttgcccatgacagcaaccgcttgctccataaaatacgttacggcatcctctgcactcaaacaatacacgtcacctttgtcttttaagaaaaatggttttggaataaccatatttcctttatgattctgtggataaatcacagatatatccgcattattaaccaacgaaatctctactagaacagaaatacattccggctctatccagtcatcactatctacgaaaaaaatccattctccttttgccgtatcaagcccaatattccttgccgaagactgcccaccattctctttatggagtacctgaatgcgacagtctcgcgtagcccacgcatcacaaatttcagggcagcgatcagaactaccatcgtcaatcagaatcaattcaatattctgatatgtttgttctacaatactgttgatacattgatccagataagcctctactccatataccggaacaatgatactgaccaatggatttccctttatcatccttacgattctccccacactttaaaaaacttctgatactgatttacgccctcatctgctccaaatatctcctgcttagtagctttctgccattcaagacacgccgcataattttctctcgcattaattaccactgcttccagttcatcggcattagagaaggtcgtatccgtcaaactcgtgaacatattgggctcctgcgttgcataccgaaaggagattcttttcttgaacagcatatccgtatacattgtcgagatataagtaatataaaaatctggaatcatttcaaactccttcaaatcatcgcaaataacatccgtatcagataaatatttagcatactcttcccgtttattgctgggatgaaaacggatgtaacattttaactccagatgttcagccacttggtgtgctgacttgagcatagctaggttattcttgaaattatccagcccgtcaaacacaattccgatcttactgagaacattcgtcttttcatattcaaattggaatccagcatacttcataggaccaactacaacaatctgcttttccgaaataccacattggatagcatttatcttactcagcatactgtttgccaagtaataattactacaaaaaccggcaaaaatctcatttccattaccatgttgtaatgttgcagtaggataattttgtgttattgcaagctgagtgagggcgttatcaatactccactgatcgcaaaaagtcacgactttctcacacctaaacttctttatagcattgataaagaagtttgcttgattgacagatctaaatacagatacagccatgtccaagctaatccatctatcacggacaatcgcattcagcctgttggcccagataaagataaaaggcaatttaatgatatttctaatggataactttgtgctttttcgatcaatcaaaaacagagtagaattccttgcttgggttgcagtattttcaacacactgcaaataatctggccgcatatactgatttccagtaaatatgaaagctatttttccagttccaattacagaacttcggacttgaaaatcaaaaacagatgctgccaggcgcttgagaatacttctcttatctatagaaatccgtctcatagccaagcaaaagatatagtccgtcaacaataaatctgacttcatcttgctatgcaactttacctttttaaaggaattgcacatatctttgaattcttcataatcgaatccattttgaaaagaaaaacattttttcatttccgccatcttacctctccttcaaaatctttttgccagtacggattataaatcctttcgacatgaacgccatcaaaaattatgtatatttatagcatcaacataacgagagcgcatatagctgtcatcttttctcatgatgtcaaattcgttattcaaacatatagataaaaactctctacattgtaaacggaaacaactatacctaacatcttcctacaataatactaactttcataaattatctactccattctatctatttgcaccagaacgtatttcaaaaaaccgccactgcaaaccttttctttcatattcaacacattattacgatagctctggtacaagtgttcatggctttttagtgcttcttccaattcatctaaagatgatataccaaacccaagagcattttcttcgatgagtgagcataatgctgcttccttccaaattacaacaggaattcccgcagcaatataaagtgacactttatgtgggttattgattcgcaaatatttaccatagctgcctgagcatgtctcagttgaacttccatcccacacaagaccatatgcaccatataaattagcaatcaattcatccggcttaaaactgccgtgataagtcgcattgtccatttgcattttatcaacagcataattcgagccgtagagagaaagcgcaaatttatgtttatccttctttatctgatataagtatccggctttgctctccaacagattcccagcaacaattacagttgatttatcttcagaaatggtggccggagtaccatcataaagatagtcgaataaatccagcgaaatatattccactgaaagtttctccttttgtaacgtcctaatcatgaacggattatggcaaatcaggtagtcagaactgccaagcaatgacagttccagtactttcataccatctacgcccttatcccccaatgggatgtctctcaagtaatcaatgtcgtgaatcaaggtagcaattctaatctttgatttgcaccgcttcagaatgcggaatatgtttttcatcaaaagccggttgagcggatattgcattaagacaatgtctccatccaccagcttattccgaaggctatatgttgcaataacaccggaaatgatatcctgtactcttgttcttacttgattgctttcataaagagggattagtttataaccacactcctgagaaacacgaagaacgtcattccctgcctttgatcctgcattattttgaccgtttgcacccactactgatagtatatattttcccatgtctcaagcctcgattccttctctgttgttagccagcatcggcaaaaacatcagcatataaatagcaaagattctcaaattaaagtaggttccggcggtcaggccaaacacaatcataataacaaccaacatcctcggcagcctatgatcagttgttccatccataaactcataatggaggagagagcgtaacatcgccacataaagaccaattccaatcagtccatagtaaacaatgaaataacccaagtcaaaatccacaagaaagctggaagacaaagagtaatcaaacggaccatagccaatcagataattccacggctgcatttgttttatcaaattggtaaatatactgatcttgccgccaaaggaattactcatgccctcatttactttaaacagtctcagatcatccaaaataccagaacctatatttccagttagattcatgaataagacgaagatcagaaagaagaacagcattgttcccagaaaacgcattgcatatccttgatttgctcttccttctgtaaacaaatgataaataagaatcaccacacctaaaacaaaacctgtgcgtgatcctgccaacacgaacccaataatgcaaagtagataaactacaatatttctcataaagccacagccatattttcgggatacaaccaagtgactgcccagacacgcaacaaggaaacacgcaaatacatttggattcacaaaaattgaaccacaacgaaaactggataatacagtaaattgtgtgttgtaaaattgaatactatcgccatagaagttcttcagtattgtattcatatcaataactttggtaaactgcagtatggcaacaactacagacaatgttaagagcatattccagatagatatatattttctaatatctaccttggaacgcattattatctgagcaatcaaaatatatataatgcctctctcaatctcttttactgcataacgactgctccccaatgcagagaatccgccaaatatggaaagtaccatgtatacaatacccattccagcaattacaacgaacaactttgtaatttgattcatgtatagggctacttttccctcatgtgccatcatgtacagcagaacaattgcaagcaccatagtaatgggcatgagaaatctgttaaccaggaaaagcaccacaacaattgatagaaatgtatatataaaattattattgtttcttaccattatcgtgcccctccattatcctgtctcttcactatacatacttccatcaactgcgccagtgccgcagcattgtccttaacaaaatatcttgcatttgcatattcctttgccacatcccttgcatacaagcaatcggacaataataccggtgcaccgactgacatagcttcacatatcggcaaaccaaccgtttcaaggtaagacgggaatagcaatatcgactgtgcaaaccagtcgctcatctgctcccgattttgctgtcctacccacaagaaatccataccacaatccactgcttcttcctgtatcctgctgattctggagttttcgtttccttttagcgtaaacacacatcgaaattgtgtgatacctttttgatatagcagctttgaagcctccaatatcacatcatgattcttaaaccttgcatcacttgcaggataaaagaacgtacatttatccgccggtaaccaaattacatcctcaaataaatttatctccggaaatacgacctgaacctttgtttcagatattcctgtctgacggacaacttcatttttcatccagttagtctgaacaatcacaatatttgctctcttgatagattgtttgatcatcgatccaatcagattttgataaatccacagttttttatcctcatcaatgctaaatctatgttcagaaaacggcaaagcgttatggatataaacagtctgtggcaatttacaaaatggaatatccgtattctgtaaggatagaatctgctcaatcttatagtcgcaaaggtattttttaacacctatataatcaaaccacaacctatgcaaccatgttttttttacttccggaacattgatcaccgtaatattatcggtattctccagtgtatgtttgcctaacagatacacatactggttctctttgtcctctttatgaatgccgtaaaaccagttcagtacggtcactgcaccgccattttcggcggcgacatcatacactagaatcctcatttattttctccaaatcattttattgacaatgcccgaatagctctgaatgatcttaatgacctttgtagacacagctctgtcctgataacacggaacttccgctgctagatcgccattggcatacattgccgttacaagttcaactgcctgcaatacctgttctgtgctaatcgaaccaattgtaaacacgccctgatccatagcttccggtctttccgtagaggtacgcaccgatactgccgggaatttgaaatatgcaccctcctccggcaccgttccgctatctgacacaacacaaaaagcattttgctgcagcttgttgtaatcaaaaaatccgagtggttgatgctgaatgacccttttatcaaaaataaacccacgctgctcaatatatttcttacttctcggatggcaagagtaaagaataggcatatcgtatttctctgccatcgcattaactgcattcataagagaaaaaaaattctcttcgatatttatattttcttccctatgtgcagacaaaagaatatattttttcgcctctaatcccaagcgcttcagcacatcactgctgtcgattttttccttatgatctgtcaaaacttccgccataggcgaaccaaccacaaatgtgtactctggttttgcaccactatcaagtatgtaccgccgtgcgtgttctgaataacagagattaatatcgctcgtcacatcaacgatgcgacgtataacttcttccggcagattctcatctttacaacggtttccggcttccatgtgaaatactggtatcttcaatctcttggcagaaataacacagaggcaggaattggtatctcccaagacaataattgcatcgggttttactgcactcatcagctcataggatttggagataacatttcccattgtctgaccaaggttttctcctacaacacccagataatgatctggctctctcaagccaagatcatcaaagaaaatcttattcagctcgtaatcataattctgacctgtatgtacaagaatgtggtcaaaatactggtgggctttttttattattgcggacatcttaatgacttccggacgagtgcctacaatcgtcatcaatttaagtttgctcatatcgtttcctctctcatcatatgtctctcacaattcatagtgcggatacatctctttatgtgctctcatccatagtgccatttccgcaaccatctgttcataattcggtatctcaaaatcgtcccccagcttggacggaacaagggacttgtctgcaactatgccctctaccggattgattgttacagaattatccctcaagtatttattgaacagtttcaacaattcgtatttactgatagagttatgaggaaccgcattatataagccgcccatgcgttctttcgctacatactccattgtttttgccagttgaacagttgtctgtcctgtccacattgcttttgtgaatccattgatggtgccactttgcttcataaaccagctcaataatccaataccgcttgccttaatatccggacctacaattgaattacgaagtgtaatattcttgtcatcattcaactcaccaagcgcctttgtccgatcataaaaggtttttccatctggaaaatcagactctaaataatttcccttttctccagaaaatacacagtctgtactcatatgaactacctgtatcgatgttccctctgttattcccgccaaatagtgcggcaggtaagaattcaaaaatactgcaccaggtttgttattttctgcgaattgatttaaaagtccgacacagttgatgatactatcaaaatttcctgaatctataacttcttttaactgaaccgtattatatgcatcaccaatgacactatcaaaatataaagatttctcccttgcatatcctaatacttcgtgtccagtttctttcaaatagacagcaattgtatttcctgccataccattgctgccaagtattaaaaatctcataaatatttgctctccctctgctgcatagtgtttttttggtctcacttttctctattatttatcttcactcacagtgcactatcactctacagctcgctacctttttgcagttcctctctgatatatgccaactctagcagtttttcttttacctgctccacagaaagaagatccgtattatttgaattaaattccgttaatgtattccgctctgtatctccgtgaataaaatacttatcatagttcaagccacgcttgtcacacggaactcggtagaaattccccatatcaatagcatgtgcgcattcctcattggtcaggagtgtctcatacattttttcgccatgtcggataccgataattttaatatcttcttttttgccgccaaacaaatcgcacactgcctctgcctgaaccccaatcgtacaagccgaagctttctgcaccaaaatatctcctctttctccgtgttcaaatgcaaaaaggaccaaagaaaccgcatcatccagagacataataaaacgagtcatgccaggatctgttaatgtaatagcgttccccttacgaatctgctcgatccaaagtgggatgacgctgccacggctacacataacatttccatatcgggtgcagcagatttttgttttgcttatcgtgcggctcttcgccacaatgactttttccatcatggccttggaagtacccattgcgttgaccggataagcagccttgtccgttgacaggcagataacagtttctacaccatcgtcaattgccgcagtcaacacattttctgttccaagaacatttgtcttaaccgcttcaatcgggaaaaattcacaggatggaacttgctttagtgccgctgcatgaaatatgtagtctacgccgtgcatagcacttttaatagattgtatatctcggacatcaccaatataaaagctgattttatctgcaacttccggcatttttgtctgaaactcatgacgcatatcatcttgttttttctcgtcacgggagaaaatacgaatttcaccgatatctgttttgagaaagcggttcaacactgcgtttccaaaggaaccggtgccaccggtaatcattaaggttttatctttgaataaggacatatttagttcctcctcttatatgtttaaatgcttcacaatagctttatatcctactttcggcgtataattctcttctaaatatttaagtccgttttctttcattcttggatcaatatctaagttagcaatatgctccaccagtcgcacaaaattttctatcttgtcactggtgcattgccatccaaaaccattatcttcaacgatatctccaacatctgttgccggatcagtacaggtcagcaccggaatccccgcctgtatgtatgctaataatcgagacggtgtattcggaactgtaaatctgtagtccaagaaaataatgccacaatcacagcaggcaaccattgaatcatattcctgttttggcaattgccccatcactctaacatgggagcagctttctttttcgacatactcatcgagataatgcttctccgtaccgcttcctacgactaggaagtagacatttttcatatccttacacgcttcaagacacttcacgataaaaggcacatcctgtggtcttccaaggtttccgccatagacaaaaattttcttatctacaggtaacccatatttattgcgcacctctttctttccattatcaggcagcgataaatcataccaatcagaacagttgggacaaaactcaatgattttctttttatccaactcgtcatgttctttcacatatcgtatatttgcttctgatgtacagccaatcacatctgagagcttgtagagtttttgttctttcaggctgaaatacttataaatcacgcccttaagtccagttttctttaagatccccaaatcaatggaattctggggaaagatatccttgagcatgagataactcaaagctttgtcccttttcttgatatacgcaacaactctggctaatgtcactggcggagtagaatacaggactaaatcaaattttgtgttggaatagtatttttttatagcatttatgaactgctgctctagtaagactgtagcaatacccttttcaataaggttggtttgctgaatatttcctgtcctaacttttagaatttcccaggaatcctcttttacaatatgtgtcttcttattattctttcgttcaatcggagacacaacataaacaatatctccccttctgacaaactctcttagaaggtctggatatattccacggttttcaagattcgtaaaacccaataatgttaaaaatagtattcttctcatcgcaatgctcccaatatgaatttcaaaatatcgtccatcttacaaatcaccccaagtctccacggtgggaataccacgggatttcaggtgcttgttacatctcaaacttatcaaagcagaggtgcgccgtctcctcataagaaaccagcagctccacgccaatggccgcaaactccgcccgatgcttggagaggatctcaatttccgggtcaataaaggtggcaaccaactgaatctgctctttttgcagatgcccagcagcgtttcgatgtactccggtacgtcaatccgtggcaccaggtatgccttatctgccaaagacgccgccagtgcatagggctattgtccgtcgaaatgattttcgatccgacttcaacggactgcttgaaatccttgatcaactctcctcggcgaccaacactgcacattaaaatgttcatgccgcaatcctcctttcagagaacacagcatggaggcaaacgctactgcatttttccccctccctacgcgatgatttttgcaggggtacctacatatgtaccttcaataaacaaattctcaactaccactgttcctgctcctatcgtacaattactacaaatatctatattattcttcaccacagcgccaatgccgatatgggtattatcgcctacatgaacagtgcctccaagtgcagcattgggagatatatggacgaaatctcccagcacattgtcatgctccacaattgcaccagaattaacaatgcaatgctcgccaattgttacttcggcattaacgatcgcgccagccataacgacggttcctttactaatctgaactcccaatgcaatctgtgccgatggatgaatcagcttcacccaattgacatcgtggctctctgcaattcgtctgcgaattgcattgttgccaacagcaatcacgaaatcggtcttgccatcattcagtctttctaaatcttcggatgtgcctacaattgggaaaccaagacatttgcctgtggcattatcatccagaaagagtatgttctcgtattcgtttttcagaccgatgtcagcaatcactttcccatgaccgctagcaccgagaattaccaatgtattcatccaactgtttcctcttcaggcactcccataaattcttccattgtagcggaagtttcgctattaatgccctctcgtttcaagaccaccgcaaccgttttgaacagaatcatcacatcaagccagaggctcatgtgctccacgtagtagacatctttctcaaacttttcttcccaagtcagactgtttctgccgtatgcctgtgcatacccggttagacctggcttaacctcatgccgtctaagttgtctttggttataccttgggagatatttcataagtaatggtctgggtcctacacaactcatacagccattaaggatacaaaacaattctggcagttcatctaaacttgtactacgcagcatctttccaaaaccagtaaggcgtttttcatccgatagcaggtttccgttttcatctttttcatcggtcatcgtccgaaatttgtacatattaaatatcttgccatacagacccggacgctcctgtttgaatattaccggtgaacccaatttgattttcaccagaatagcaacaagcaacaacactggtgacaacacaagaattgcacataacgaaagaataaaatctaatgggcgttttatatatttctcatagattcccatcttgtgtattggtttcacttcgttctctagtacatttcccacaaataatccctcacctcattcaatctattcaaagcaagctcttataatctcaatcacaacatcctgctgttctggtttcatcttattgtcactcggcaggcataaacctctatggaaaatatccataccgacatctaatggcattccatccctgcctatagcatcaccagcgatatacgaatttgtctttgcccttccattaccctctcttgtgacaaatccattcatccggtaaattggctgcatatgcatcggcttccagattggacgcccttctgcgttatgtgttgcaagtgtatcaaggatttctgtcggacagctctttccatgttttggaatatatagagcttctccctctcccctcacctgcttgcacatagcatccgggtcgataatcaagcaggacagccaatagttcggctcactgttttcatactcaatgggattcatctgcaccggcagccccttaaatccagctctgtatctttcataaattgctttcttttgagcaatatgttcattcagatacggaatctgaccacgtactacaccggcaatgacattgctcatccggtaattgtagccaagctcctcatgctgataccacggcgcgttttccctactctgcgtactccattttctgactttctcggcttcttccttgctatctgtcaggagcactccgcctgctgatccagtaatgattttatttccgttgaaactgcatattcccacttttccaaagtttcctgtttgttttcctttataggtcgcaccaagagactctgctgcatcctcaacaatgaccgcaccatgcttatcacaaacagcctttatttcatcaattttccccggtgtaccgtataaatgggcaaccacaacaatctttacatccggatatatttcgaaagccttttccagtgccactgggtccatattccatgtatcatattccgtatcaatgaatataggaataccgccttcatacacaaccggattgactgttgcatcaaaagtcatgtccgaacaaaaaactttatctccctgctttactcctgctactttcatcgcgaggtgaagtgcagccgttccggcggacagtgccactgcatatttgcatccaatgatctcagccatctgcttttccacttcattgatattggcaccaactgtggacatccagttggtttcatatgcttccctcatatattccaattcttctctgtgcatggttggagaactcaaatactgatgctttgaaattggcttaaaaaaattgttttcattaataaacatacttatctccttgtaaaatcaaggctttccttgattaacatgttatatttgaacatgacaaaaacccgcaccaaaattactctctgatacgggcttgccatattcctataggattttaggagatctattaaaatcatatcaagatactattctctcattaaatatgataatctgcctattgaacccataggaacagttacaagttatcttgatgagattaatttcttgactgttccagcctatcacgtctatttatcattttcaaactatctaaatgacaacatgcctatccgaatttttttcagtgcaggcttagttaacttcctcttatttgttttctctgaattggtctggttaacgaataaccaagatgacggttttcctctgacttaacaaggctgccttcccaaactttgagaatatcaactacatcttcttggtattttcaattcacttgaccttctctgtatataagcctgtgttcacaatttgctaatttcagacgtaggttcaagtcaacccaggttacagttctctcaatacaaacaagattccgccctaatacgacaccgtagcttccggcacctccagctccgcaacctcatccgacccgtaaaccttaatactaccgccggccccggtctcccatttctggccattgccgtcagtcacctttgtattcttcatcactttcccggcggcatttaccaggcattttccttcccccggaatgtcgaacacctcatagcgggcagccttatccgccttttgcatcttccccttgtagtatgcataaccgtccttgatacccgtgatgcccttgcctttgatatcaaaataatattgtgaacgggtggcgctgacgccgtcatccaccatggctttacccaccgcgcatttcctgtccccatcctctgcgccgcagtaataaaagtcgccctttacctcaaccaggccgtactgggccgcgccgaacatatcgaaaatgtaatacccgtcaccgattttctttatctcatagctgtcctcgccaccgcataccggttttcctgtattatcgaagtaataccactccttctgccctgagccgctggcatccggaggtccctccaacttcagccaggcgctttccaccttttctccgggaatatacttcttgtccttttctgtctccggctggtaaaaatagcggtatcccttgatttcaggcacagtactgctcatcttcacccagccaggatacatgatgccgtagctgtcaaaacaataggtaatgccgtccacatccttttcctgcttaccgctgccggaacgcttcttcttgcccgaagtcgtactgaaataaaagtaagcatactgtccgtgttcctggacataatccgccacatcggtattatccatccaggtttccggtatctccagccattgccatcccgctgctctggcgccgtcctccgcacagtagtaataagagctctccttgtcgtcatcctccggagtctctgtaagccagcccttgcgcataacgccggaggcgttaaagcagtagtacttcccgtctatcttatgccacttgtccacgatgacctttccgtcgctctctgcatagtaccagttattataatccgcattcctggagtccaggccgctgatgacaaaccattcctttttcttcatggctccgtcatcgcccatataacgcttgtcaccgttattatccgttatccagcgtttccggtagttcagcccgtttgcatcgaaataataagtcctttccgttgctgccgtattctctgctgccccatccccgattgtcttatatccgccctttaacaccgccccgtcttccccggcatagtaccagctctctgtcactgccttggtaacgctgttgacattctcaatcttgaaccagcctttatcctgaagcacgccgtcttcatccaggtaataccgtttccctttgacattgtctatgtaccagcgcttcctgtaattcaggccgtttggatcaaagtaataccattttccatcaatggctccccagcctccccgccacagcacgccgtttgaatccccatagtaccaattggtgtattcctggccgttggaggatgttccggtgatggaaaaccagcccttcataagctcacctgtgtcgtccacatagtaacggttgtcctccaggttgacccagcgcttcctgggagaattgccgtttttgtcaaaatagtaggttatgccgtccagctcatgccagccatccgtcaaaagggaaccatccggctggacgtaataccagttcacatagggattccccttgctgtccacgttctcagtggaaaaccagccgggctccggtctgacgccctccgcatccacgtaatatcgtttatcctctgccgtaaaaaaagacgttctgggtgaattgcctcccggatagaagtaataataccttccttccagctcatgccagccgtttaccaggattttcccgtcagccccggcataataccaggccgtggaaggctttcctgaaggcaggcttggattggatgtgacgctgaaccattcattttcatagcgggaaccgtcctcctttacgcggtaacgatctccccctgcattcacccagttgttggtgacaatcagaccgttgcctcccagataccgtggagtgccgtccgcccaggtaacccaccggtttaccaccttcttatcatgctccatataaaaccattgctgcgcagtatcctgctgccatccgtccgccccatatacgggcatggcggatatgaccaggaccgctgatgtgcatgtaaccatctgcatcaatgttttctttatctgcatccgtgtcttgatcttcatccaatccattcctcgctgtaaatttccctatgggttttatcgttatcattcatcctggcataaatcttgtccagatatggtatggtggccgaggcccaggggtattccgccatatatgttcctgtataggctgtcatataggtttcatttcccttcacgaactcatataaatcacattcaaaccattctgtatgaatggaaaatatacctcttttatgtatcagcatttcttcacatccatattcctccagcgtctttcgcagccggtgataaaccactctgatatttctcttggctgtgctctccttaaggttttcatataaaatatgtaccacctgcgccagagacacgcttcctcctctttgattgataaggatagccagaagttccttggattttttgcttggaaaatagattacgcggccgttaacaaatacgtcaaaaccataaaatgtctgtatatatactttgggcttttccggcacaccggcaccctcctttgcgtgatgtgtttcaggaaactaaatcctggtattttccttttttgtcatagttatttcctgtttcctactgtatactgccattgcattatgaagcgccatcctgctctttaccggagatc

SEQ ID NO: 3280 - DNA, 819 bp, Unknown
  gut microbiota DNA sequence
gaaattgaaaagtaaaaataaggaagaaagattggaggaatcagtttgagtttagaagaaaaagaaaatggaatcgagcaggaaaataatacgcctgaaccagcagggcatacaggagaagccggttcagaaaacagtgcgctggtaaaaagacgccctcagaaccgccggccggttcagagaagaacggcgagaccgaaaaatacatctgaagaaggaaggaaggctgagggagcggaaagtacggtacagacagaaggcgcaccggaggccgcagaaaagaaggaacagaacagacgggctcccagacgccgcactccggctcccagacagggacagggtaccggcagaagacaggttccggctcctttaagaaatacagatgagacagcggcagctcttcctgcaaagcgcagcacacggggaacaaaaaaggacggaaaaggcaagttaaaggtgatccccttaggcggcttagagcagatcggcatgaatattacagcctttgaatatgaggattctattatcgtagtagactgcggacttgccttcccgggggatgatatgctgggaatcgatctggtgatcccggatgtgacctatttaaaacagaatattgaccgtgtaaagggctttgtgatcacccatggacatgaggaccatatcggtgctcttccttatattttacagcaggtaaacgtgccggtttacggaaccaagctgaccattgcgctcattgaacacaagttaaaagagcacaatctgttaaagaccaccaggcgccgtgtgatgaagcatggccagtctgtgaatctgggc

SEQ ID NO: 3281 - DNA, 1476 bp, Unknown
  gut microbiota DNA sequence
cccctacccagttacatatatcagttcattataaaaagcttagatttttgtcttgacaactgaaccactatattttgatggatgtgaccgaatccgataaaagtctaaggatattaaatgcggcggggatgaatgttgtttttgcatcctccattgacagccaatcagttgtacaaagcataataagcctatatataacgatgcctctatctgtaaagagtcttattaatttactgcaacaggtataaagcatatactcaggagcccggacagacggccctgcgcgtaccctgtaattgattttgtatgaggcatgatttactgcgtaaagttttttaatctgcactttttgacatattatgcttagacataaattaagctattttcacaatattaagagatgcaccggtgccggtctgtaatgagaccggaccatttacgccatataattgtaatgccaaaatgtcacctgctgttaaaggctgcataaaagtcacactatattcatttgtagatgttgaagaggtattaattgaattcgttattggtgcgccatttaatgttactcttgatgacattggtaatccggatgtcattttgatatcataggaaattaaataggttcctgtttgagcaactgtaaactctgtatttgtagcatttaccgcaaatccatccatatagggttgaactggcagaggaatattagtcccatctgttgttactgaaatggtacttgctgaaatattaagtgctgacattgcgcttgagattgcagatgttcccgttggtccggtggctcctgtagggccagtcgctccctggatcccggcagcccctgtagcgcccgcaggtcccgtggctccggtaacacccgcagccccggcaggtccctgagttccggtggagcccgtagcgccggcaggcccctgggcgccggtagcacccgtagcaccagtgactccggcaggcccctgagctccggcagctcccgtagcgccagtgaccccggcaggcccctgagctccggcagctcccgtagcgccagtgactccggcaggcccctgagctccggcagctcccatagaaccagaggggccggtcgcccctgtagccccggtcatgccgggaatgccctgaggtccggtgctgccggtgggcccggtcggtcctacatagccctgaggtcccattgcgcctgttggcccggtgggaccgggcataccggggcatcccctgggacccattggaccctgtaatccggttggacccatcggtccggtcggtccggggaacgggcagcatgtgggcggcgcacatggtgtacatgggtcacagcaccatctgttcctgccattattacagccattttggcggaattcggcagaatatggttcaaggccatcctgttgtggatttatattgtctggatagtcataatacataatggtcactccttattattttaatggatag

SEQ ID NO: 3282 - DNA, 17338 bp, Unknown
  gut microbiota DNA sequence
aggaggtatcatattatgccaaattgtaaaaagaggtcagaacgtaagtcggagcaacttgtgatacgtgtgacgccaaaacaaaaggaacactgggagacgttggcgaaggttaaagggctaaacttatctcaggtgatgcgcatgatggtggatgattttttagagaatcctaattggattactcataatacatggcgttttctgaaggcggcagcggatattatcgacaaagaggagagtgctaacacaagaaaggggaatgaatgatgaatacaagtacagcaggtcccggaataataattgtaccacagcaggaatttaatagttacggtgaaagtcgtaaattgattgagtatattacgagaaccggaagaagaagcaaccaatctgatgatttgctcataataggggcgagaggtgttcaaataagtcagggcattgaaactgtgattcatcaatttgaacagatacaagggatgtataagccgcggtgtcatacatatggcagacattgccaccatgagttttattgtctaaatgatacgttaataggcttatgcccatttttatttgatagagagaatatggaggaactggcttatcggttaagcgatgtatattgggaaaaagggcatcaggtagtatatgcagtacattgtcctaatgagaataccgggcattatcatattcattttgcagtaaattctatatgtcttgagaatggacataaatggaatacaactgagaattataggcagaaaagagggcgattgtttaatgatataacgatgcaattagtagaagaattattgaatggttagagaatcctgatgatttgtaaaattttctctttcatctcaggggaacgggaggccagttccttcatgatttctctgtctatggcatcagaagatacgtattcattatccaggatataatcaactgttgttccaagtgtattacaaatagagaccagggtagttaaggataccttgacccggtcattctcaatattgcttatatgggaaacgttcacaccaattttattagaaatatactcctgtgtaaggcattttttaacccggcattcgcggattctttccccgattcgtttaaagttgagttcctgcatctgttttacatcctttttatttttccttattgtaatatgtccaatttcacaatataattatctatagctataatttatatagttatgaaacatatataatgtttgtcttaactcaaagatttattctacaacgacatattgtgtcgtaccagccttgtatgatagcactatgaataaggggaaagaaatatggacaaggttgaaagagtattaatgcttttttggaaattatatagtggattaagaataagtaaggtagcattctgttttgagacagatattaatacaagaacctttgaccgagatatagaagctataagaaactttttgtcagagaattattcgggtcaggaagtcgtgtttgaccgtacgagtaatacgtattatatgacagggcctactcgaaagatactgacagaggtagaatatacagcaatcagtacaatcttgttgggaagtaaggcactgcgtcaggacgagatgaatgggcttatgaaatcactaagggaattgacagagcatggtaatcgtaatttgcaggatgaattgggacaaatgctttcagaatacgatggaagtagccatgaatatgcaatattgaagatgcaatgggacttatatcagtgtataaaaagaaaagtgataataaaaatacgatatcagagcccttgggaagaagtggaggaaaaagtgattgtgccttttgcactcttctttgagaattatagtttcagattagaagcagcagattttgaaaaagaaggaatgaatgagtactgtgttgataaaattgagtcttttgaaataattaggaagcttagcgcatcggaatgtaatcagtatttaaaaaaataaagaatgaaggagacaagggatatggcgagaaagattaagtttgctatgaaaatgagagatgacgtggaggtgaggacgctatcggaattgaaagagcattttgatttagaacgggttatgacatattatcttgatggaaaattggatacatggttggcagataggtactatgatgaattgtatgacaatatacaggaattggaccgggatgcccccgacttgggaagaagactgtgtgagctatttggtgtggattatgaagatgatgcgctgagtgttgaggaaattgaagaacgtaatcgaaaaattagtctattaaaagaaattacagatgatgaggaaataattgaaaatattgatagcgtagctttttcgcaggaagaattggctgatttgctggacgaagggaggactcggatttatctttgcggttcggattttaggataccagtgaaaaagaagcatataacatatattggtattaatacatatctgaatattaccgaaaatgagagagaaaaatatgaaaaaaatggcatagagcttataaatttattaaaagaggagccaactttttcaatggttgttgacaaagaaataagtgaggatgtacatgcagtatttttgtgcagaggtcgtgaagattatgaagacgaaaattttcttgtatatgctacaaagcaaggtgaaccgtatgaaacagaacattatgatgtggataatgcttatgaagaagatgattacgaagaagatgatgaagatgacgaaattagtatggattttcaatataagataaatttgaagaaaattaatacaccagaaattttaagatataaagatgccgcatatattcataacaagattgttttttctgctgaagatggtcagggacaatttgtaggtgtaatggatgtaactggacaaaatgtaaaagtattaagacgttggaatgaggaggaagaatcactttggagctgcgaatttactgaaaaccatattttggcgcggtactcttcaagggatgatgatagtgaacattatcaaatgatatctgttgcaggagatgtgaaagagatagatataaattctctgatgggatatatggagatgccgcaaggcttttattgtctggattggtgtacatctggctatgtgtccggtaatattttgtttaagggggagagaagagagaaggagcttagaattccaattaaacttccagagacagtgaatgattgtatcaactgcctttatggatgtcgttatgccgattataacgaagaaaaaatatatttctttgtgggaaacgattcagggtgcccatttggtaaggagggctatttttatgtatatgatattaaacgtaagacaattaagcctgcatcaaaaatatttatagaatatttttgcggaacattttgcgtccatgataaagagattatttatattggagcggagagctatgaaaatcgtgacccaaaacttatggttctaaatatgaaaacaggacggcaaaaatgcctttgggatgcgattggtgaatacggaatgcctgtaatcgaccagatgaagattgtagatgattatttatatttgttggagacaaaagctccttattttagaatgggggcatacagaattcgcttagatggtacagaacgaacagaaataggttgtaagaaaagcttcctggaaagtagcatatcatttcttggtgagttggctgctattcttaaagaccaaaatggtgaagtattggaggatacagaggtgcctatcaaccgatatataaaaaaaatagagaagatttgctagtgttgagtcctaagaatcatgattcatcggataagggggatggaggttagagatgcaaaagagacttattaaaaaaatcagccagtatatagatgctggttttcccattctttatattaacagcttcgaggatgataaaattgacagcatgattgaagaactagggatgggaaaagaaatcttagagtggaatggtgcaaaagggctggtcgattttaaaaccaagaatccccagcttactatatcaaatagtttggcaacagttctggacctgtttttatccaaggatgaaatagaacgcaaaattatggtcttaaaagatatccatagttgtattagtgaaccagaggttattgccaagcttaagattatagtgaatctgattaatcagggaacagatgccacaatcatcatcatttcaagcgtccttgtaataccgcctgaattagagaagtacataacaatcctggaaatggattacctttcggttgaggaaatcaaagcattagtccgtacctttatggaagagaatcaactccctatgataaaagacgaattgctgaatgaatttgcagtttcttttaagggattgtccgagtttgagatatgtaatcttctggctcttgcctattcggatgatggagaactgacgcggaaggatttgggattgatttttgagcagaagcagcagacaatcaaaaaggctggtatcctggatatgataccattgaaggaatcgatggatgatataggcggcctggataatttgaaaatctggcttaagaaaaaggcaaaggtatttcagaatatccaggcagcagaggcgtttggggtggacatgccgaagggagtgctgatagccggtattccaggatgcggtaagtccctaagtgcaaaagcaattgcccatttatttgatgttccgttgctgcggctggatatgggacggcttatgggaaaatatgtgggggaatcggaagcgaatatgaggagagcggttgccttagcggaagctatttcaccctgtgtattatggattgatgaattagaaaaggcatttgctggtatcggtagtaatggtggcagtgcggaagtgactaccaggctatttgggtatttcctgacatggctccaggagaaatccagcccgacatttgttgtagcaacggcaaatgatattacgaaacttccgccagaattaatgcgtaaagggagatttgatgaaatattttatatcggtttgccaacatcagaagagagaaagtgtatttttgaaattcatattaagaaacgtaggccgtcagatttgaagaaaataaatataggcttactgactggaagaacagatggatttagtggtgccgatatcgaaggagtggtgaaagaggcggtggaatcagctttttcggaaaaccggaaagaagtgacaacggctgatttagtacaggccatagacgagacaaactcgctaatgggaacgatgggagattcattgaagacccttatggatgaatataaaaaacgcaagtataaaaatgctgctaggtaaggggggtctgaatacaaggagatttgtaatggtaaaagaatatatagaggaaaaagaatgccggaaattgaatcaggagttttctgagaacttaaaggactatcaaaaccgaagtgctaatctgacagatgaagactggctgatagaattaatcatgagaaaatgcagtcatatcaccagagaacaggctgaaaaagaggcattagaaatcttacggtcgcttgatgtttgcgaacatgatttgtcatctttggaggatgctggcagacagggaatttcatccgaacattggttggaacaaaaaatccaggaatcagcaatcggattaagcgcatatcagtatagctgtattctaagggattttgacaatagtctgtaccgccaaaatctagaaatggcagaagcacttagccgttcatcggatggtcatattatgatgagccctaatttggatggaaatattgcagagcacatgatagccagaacgacagaacttcaagggtatatacagaataaaaatattaaggttgaagtccgaggggtaaatacggctaattcggttgatgtgcgtgcgatgaacctggaaacaggcaagttccagaattaccagttgaagtttggagaagatgccaaggctactattgggctgattgaaagggggaattataacaatcaacagattattgttccttcggaacagcttgaagagattcggaatcattttaagcttaaagggtcacagaaaaccatcacggaccatattgaagtaaatggtgtaaagggtcgttcttttacaaaagctgaaatgaagcagatacagaaacaggctcaggaagatggcattatgcctgttctggacgattattattattcaactaaggaatatgcgttatccattggaaaaaatgctggtgtaactgcattacagatggtagcggtaacaacagggcttgatgtgattgcaaaagtgtgccagggcaaagaaatacggacagatgaaatggtagaaactgcattaaggtcaggaacggataccggggtaaaggttgtggcttcgggaacattacatgtggctgtaagaaatgagatgataccgtttctgtctaaatctttaggaacaaacgtaattaccaacatagcatttgttggagtggagaatgcaaagattctttttaagatggccgaaggtaaattgtcaacagtcaaagggatggattgtatgggaagggttactgtgtccatgactggcggaatgatgtgcatggcactggcaaaaggtgcattggaaggatttgccttaggaggggctgtaggggtaggagcaggtctggtagcgggcatggtgagctatgcaacgggaagcagcattggtgagaaagtctattctacagccaagaaagtggcacagggggccaaaaaactggcactaagggcatttgatactttaaagtccatgaaagataaagtaatggataaggttcactctataaacttagcttgataataattgtattagttagtggtgcaaggttttataatatgaaagtatttattgtatatggaaatggaaactgtatgtgggataagatgtatatgaagaatatctattcaaaagccgagaagaatttttaagtgccaggaggtaaaagaagatgagaaagctctttgtgaaaagtatggtaacaataattttggcagtagtgctgatgacattaccagcatatgccatgccaatgattggcgcatctgcccctataacggtaaagcaggtttcatctgtagaggatgatggagtaccagattacaatcacggatatataaccctaaactacaattatttgaatgagcagtgtagcttaattgggtatgacaattatgttagcggcagggtcgccggagaggttagtgatgtggaaacatcgatgggtaccactacctttgtaattgcaatggacattggaaaatggcaaggtagtgagcaggccatagaatactacactgtatcattaaccccagacaaatcttttgttactataaaagatggagatttggttactgtgtatggcgaagtgaatacctggacagatagttttggcgtagaaaatggatgggctacggttagttcaccgtatattgatgcatggcaagtatctgtatatccagccggtacaagtattgataccatctttgatacatggcattctgatgacttgggagaatattaactaataatagtgatgggtgaaagatacttttacttatcgtctatttttggttcaatgctgttacctttacttaaaaataagtgagttatgcagcgtgagataacgttggagagaacttatagaaaatgagtttattagtcggatacggggaagtgaatatgattttatagatttgtaaagagttggatttaagcaacatcaggacagacataattgtatctcggacatttttgaatatatattatccccttgaatcaatcataaccaatcaatttcaaggaggtaatgtatatgtcagcaaacgtagaaaccatgttttacacccgtgagaagccctggcatggcctggggaccagagttgaggaggcaccggattccagggaggcccttcggctggctgggttggactggcgggtcgtccagaaatccattcaaacaagggacgggtttcagattccgggattcaaggccaacatgcgggatacggacaaccgtgtcctgggagtagtgacagaccgatataaggtagtacagaatgaggacgccttcgcctttacagataaactgttgggcgagggcgttacttatgaaacggcaggttccctccaagatggaaggcgtacctggcttcttgcaaagctgccgcagcgctatatcataagcggggatgaaatcacgccgtatctggtattcatgaatacacatgatggcacaggggcaattaaggcggccatgacaccggtacgcgtggtctgccagaatacactgaatctggctctctccacggcaagacgttcctggtccacgaaccataccggagacattgcaggtaagctggaggatgcccggtataccctgctgtacgcagaccaatatatgtcagaactgggaaaggagattgaccggatgaaccatataaagctgtcagaacggcaggtattagaatacattgacgcattattcccattgtatgatgagccgacaccccagcagaagaagaacctggcccgcatgaaggaggatatgcaggccaggtattttgatgcgcctgatttaaagagtgtgggaaggaatggataccggtttattaatgcggtatctgatttcgcaacacatgcaaagccgctgcgggaaagtgctaattatagggaaagcctgtttgcaaggacgattgaggggaatgccatgatagataaggcgtatgccatgctccaggcagcatgacaggaaggaatgttggatggataccctgattaataagccgcaaccatattttacagaccgggaatgacgggcagaagcctggatattcccggtttttacatgaggaggagaaatgaaccagaaatcgaagaatgagataattgaggatatgatgagacgccccattcccagaaaaaaggtagggcttgtgcgccttcagatggtaaaggaggggcgtgccctgtatgggatgaaccggatgactgacccggttaaggcagtggagatggtaagcccgctgtttgcaatggcagaccgcgaaatgatgctggtgctttcacttaatacccgtctggaacccatggcattggagatagctgccgtgggaagcctgaatgtctgctgcattgactgccgggacatctttaaacatgcaatcctgaataatgcggccttcatcatgagcctgcacaaccatccgaccggaaatccggaacccagagaggaggaccggaagattacagcaaggatggaggaatgcggcaggatgctggggattcctatgattgaccatatcatattcggtgaagattccctgtactatagcttcaaggaacaggggagaatcaaatattcggatgaggaggtggcctgatgccgcttatcattattgaaatcatcatccgattgtttaagaaataatatgaggaggtataggaggattgctaactaaaataccaacgcttaatatgacacacgaagaatggctgcagagacgtaagacaggaataggaggctcggatgcaggggcaatctgcgggctgaatccatatgtaagtcccatgggtgtataccttgataaaataagtacggagactacggacttggataatgaagccatgcggcaggggcgggacctggaggaatatgtggcccggcgttttatagaggcaaccgggctaaaggtaagaagaagcaacatgatgtatcgaaacagccggtatcctttcatgctggcagatgttgaccggtttattgtaggggaggatgcgggtctggaatgcaagactgccagcgcctacaatgcagataaatggaaggatggggaaataccggcccactatgtcctccagtgctatcattatatggccgtgaccgggaaacggaactggtacattgccgtggtcatcctgggccaggggttccagtacaggaagctgacctgggatgacgggatgatacggaatctgattgccattgaggatgatttctggaatcatcatgtagatgtgcaggtgatgccggccccggatggttctgaggcttgcgatgaggtactggaacagtattttcaccaggcaaggaaaaactcagccgttccattgataggctttgatgaaaaattggagcgccgggaagaaatcgtaaggctggtcaagaaactggaacaggagcagaaacagattgagcaggaaatcaagctgtacatgaaggacaatgaaactgcgttcagtgaccgttacaggatatcatggacaaatgtggatacatcgaggctggataccaagcgtatccgggaggaatgtccaaaggtatatgaggactttgtcaggaccaccagttcccgcaggttcatggtaaaagcagcagcatgaaggaggatgtaagaggatggatgtaaagaatgaactggagaagagggcgaacataagtcagacagggcaggtaaggctgtcgaaaagtatgacaattgtggatatggtaaaggcgctggagccggagatacgccgggcgcttcccgccgtcattaccccggaacggtttacacggatggccctgtctgctatcaacaataccccggaactggcagactgtacgccgatgtcattcatagcggcactcatgaatgcggcgcagcttgggatggaaccaaatacaccgctgggacaggcatatctgataccatataggaataaaggaaccctggaatgccagttccagcttggctataagggactgattgatttggcttaccgtaccgggcagatacaaatcatccaggcccaggccgtccgggaatatgattattttgaataccagtacggacttgattccagcctggtccataagccggggcatgaggaacgggggcagataacattcatttacggactttttaagctgtccaatggaggcttcgggttcgaggtcagcaacaaggcggagatggatgcatttgcagcgagatattcaaaatcctttggcagcaagtacagtccctggacagaggattttgaatccatggcaaagaaaactgttataaagagggcgcttaaatatgcacccatatcctccgatttccagaaggcgctgtcattggacgagacagtaaaatcaggactttctgtggacatgagtgagatacgcaacgactgcctttcggcagagacggcgcaggaggctgcataatggaaggtggatatggcagggaaccagaagcggacagttttctggaagagtctatcatggaacggattgcccagattctgcatgaagatttgaaaggcaccaagacgttttatgaggagcaggagaagataatggaaggtctggaccaggaaatcaaggataaatttgaggattttgccagcaatatgatatgcatcagtgccaaggaatgcctggaggtctataaagaggcgttcctggatgggttacggcttggacacagggcgtttaggtaaaacaggcaatggctaatcatgcttccatctgtatgccggcagggatatgatatgcagagacagggagaagtttgtgtatagcaatgaaagaataagaggaagccacgattcgtaagcggatgggtggcttccttttaatctgaaaaatgaaagaggaaaggctgggaaatacatggattgtacagagcttgaaacaggaagccatattaagacaaagcggatgttttatgagcatcatggaatctacataggggaagggctggtgattcactatgcgtttgacggaataagggtggatacaatggagaagttttcccgtggtgaaccggtaaagaaagtaccgcattccgattcgccgtatacaggggatgagataagggagagggcgttcagccgtctgggagaggaagaatatgatttagttctgaataactgtgagcattttgcgaactggtgctgcatgggggaagaggaatcggaacaggtggaggatgtggtaggactgataggggaattactgaaattggtagaagagctctaaagaatgaatcaagggatagaggaggaaagacaaaatgacattggaagcatatacaaatcaggttatgagcagcataaaagtaaggttaggggaggcatatgatgtaaggagtcagatagtacggaaaaataatggaatcgaattaaccggaatcagcattcatcaagaaggagagaaagcagctcctgtgttttatttgaatgagtatatggatagagagccgctgtgcgaagaagcagcggaaataactgcccaggagattacaaataaatatatgacatatggaacggttccggagattatcaaggagatggaaagtgatttttatgaattcaataaaataaaggataaagtgcgatttaagcttattaatacaaagaataatgaagcgcttttgaaacagattccaagcataccatatatggacctgtccatcgtgttttacctatatatggaggaggataatgggggaatgatggtagctcagattcagaaaggacatcttgacttatgggaagtagatgtccaagttttgtacaaagttgcactgcaaaatatgcagcgtgtaatgcctgcggaaatcaagagcataaatgaaataatacataatcttagatgcacatatggggaggaaattgaggaagatggaaaagaaccgccattttatgtattatcaacggtcagtggaatcaatggggctgcctgtatgctctatcctggaatgatagcgaattttgcggagcagcgtgggaaggatattattattctgccatctagcgtgcatgaagttttgttactagaagacacaggagagatggactttgtagcacttatgaagttggtaaaatacataaacggtacagaggttccgatggaagatattttgtccgaaagggtgtatgagtataatttggaaaagaaagaaataaaggtagtagcctaagtgatacttatagtatgtgtatgcaggattattaaaattcgatggtccggtattctcaaaaatatcggactatttaaaatggcaaaatattcaatagataaaatgttttgaattttcgtattttcgttattttagagtacggaataactgccatatacaagttttgatatttctatgatataatttttaaaactatatttagcaaagaggagaaagccatgggatgtacattaagagatataacaaataggttatattctaaaaaggttgaatgtgtagatgatgagggtcaagaatatttctatcaagcgcaatttaaaaattttaaagacatttgtgaaacgcttgatatagctgatgaaataaaatggattaaaaaacgtggttactgttttgacgatagagacatgggattctggtgttatatattagaaaattatagtgatactgaaatggaccatttaagaagggctgaagtggatgtagataaagtgagcgatatgtttgttgttaaattatatgaaggtatagtaaatacatttattaatgctggcgttactggtgtccagctggagcaagtgatggttaaactagacaatcggattgattatcctgttagaaaaaaaagagtgatgattagcaacgcgttggataatttagatgagcagataaaagatattaattttatatcagcatcagacagatatgagtggctaaacggatttcaaacggctttaaataaattagaacaggagtggacagtgtatttcgataagatgattgagattcggaaacaggaattttcgggaaaactcacaaagatggaaaatgaaaatccagaagaatatgaggcattaatggcattcgatggacctatagaggaagaagtatatagacaagaggaagaagacgaggaatattgtgacttactaagaaagtataaggaaaagtgtggattattgaataaaaaagtagatgctaaaaaatcgaagataccatacttttctaaactgcaaaaagaggtcgaagatttaacgcaggcaatatataaacgtaaagatatgattagtaggcaggttatagagaagtattatcctgagtttcagcaggatttatatgacaaagcccaggaaatactctattcacaaatgataccagcgaaggaagtgtttaagctggctacagggcaagaatataaaggagagtttgttaagaagcctcaaagcgattcagattaattaggtataggctttttgacattttagatgatgtcaatagtgaaaatccgtagaatatttcactatagtataattttcaagatatgttatcctaatgttatcaaagaaatcggtagggcccaccgtaaaacaggaggatatcataaatgattcatgatgtaaaagtttttgctatagtaaagcaaggcaaaataataaactaccgatatgaattgacactcatggatgacagaggctgtcttgcggagcgggtgttagaagtaccagaagaaggggtgtcagagacaaaatatttgaaacaactgcggcagtatggtgcaagtgatttaaaggcagcacagggagaattggcgatggcgataagcaaggcattagagcgaggcattaacgcttatcggtttgttgatatcggatggaacatgatggacgaaaatactgtatttgcattttctaactgctgcgtcactcctgatggaataaattatcagagttttgcggacatagaaggatttgacttaattgtgtctgaaacatttaccccatcaatgaagtgtgccagaatgagatttctggagcttatgaatatattggggaagaagtctgaggttttatatcctgtgtttttcatgaatatagcagctttattgaataagatacttggaaataatggacgggctccggctttgattatgtggctgggaggaaggccggggtcaggcaagacagaattagcttgtgctttgggaagctttcttaataaggatatttataatcggacaaaaataacaaggaaacttttttctgcatttggtaggcctagagatatgaacctatcactgtttcaacataaaggtcttgtgtttatcttggatgatgcgaagatggaaagggctcaggggcaaagggaaaataccagaacttgtatagatatatgtattaggtcggttaaatctcaaaagctgttagaatcttttgataaagctcaaagagcaagtgttgaggagaatttggatgcaggagccattattactggtgagtatatggatgcttatcaatcgtctatggcaagaatggtgtatttagatgtagatgatttgattaataatactgaatattcgctgacattacgacggttgcaggataatccacatatcctttcggatttgatggcgtattttgtgcaatatttatgttgcaaatatatggatgatatatattggactgaaatggtgaaaactaaggataatctatgggaagaggataagaggatattttatggtacaaatcagtccagattggcggataatatgtcatccttacagttgacagcaagcattgtagcagattttgcgaaggcatgtggtgcagacgattcttttgatgttgaaatgtttttaaaacagtctgaccagatattagaaatgctaatgaaaagaaccgcattgctaataaatgaaaaggatgaaatcctgctggatgcatatcgagaagtggtgggccaattgaagctgcaaaatcctatacatatctattctgattcgggcgagctgcaaatcaaaccctatattatagaatgcgatatggatggggtgtggataccagatataaatgtttttattgaacatgaatccaaggtccaatgtccggctattatctgtcgcgtagataaacttatacaagcattgacaccgcaaatgatacaaataactcagaaataccactatacagggaattggtccgtaaaggttgataataccagattaagggaggctggaattatctgcggtgtattaagaaaagataaaacctacaataatcagtttccttatcctgtagatgggtttacctacaattcatttattgaaacagattgtgtatgcttgaatttaaacaatgtgattgtaaagccgctggttgaggaatttctaaagcaggaaagtaataggacaaaacaatatttagcggatatgtatactggtatttgtgatgaggtggttgattttcagtataaatggacaatgcagtttagaagatacttaagagctgtgaaaagtcatatggaagggagataatctgatgcaggagaagaatttcgctgaaaaagcattgctgacaattaaggaactccaggattatactgggataggaaaaaataatacatataaattggcgcgggaatccggagcagcagtttatattggaaggcatatattcgttaatagaaagcggtttgatgaatacttagattcaataactggataaataattgtttgcgggagaagatgattctcccgcaactcttatagtggaggatattgcagtgaaaagtaatgaaaaacgcaaagacccaaaaggacgagtacttaggccaggagaacggtaccgtgaagatgggagatatatgtatcgatatacagataagcttggaaagcggcaacatgtgtatagccataaattaacatcaacggataaggtggatgaaatttatgtaaatgaacctagtctccgcgaaattgaggataacataaaacgtgaccagttggataatataaatacgaagggggctgaaataacctttaatgaacaatttcatctgtggatggatataaaaactaaattatctgtatcaaccaagcttaattatgagcatttatggcgaaaacacataaaggacacactgggagcaaaaagactgaaagatattaaaacctcacaattaaaacagtttttcaataaactgtcagatgaagaaggtctgtcagccggaacattacatttgttgaataatattatctaccctgttcttcaaatggctgttgacgatgaccttttgcgaaaaaactattgcgcaggaatcatgaagtatattgaagccaggagaagtccaaagagaatagccttatcggagtctcagcaggaggtgtttatccgtttcctgaaacaaagtaacagacataaataccatcttccgctgtttgttttggctttggggactggaatgcgttcaggtgaaatatgtgggttgcgatggtgtgatattaatttaaaaaagggatatatttcggtgaatcatacgcttcagtataaaag

SEQ ID NO: 3283 - DNA, 13893 bp, Unknown
  gut microbiota DNA sequence
taaaaggaaagcagtgcttttatatcagtaagcccaaaacggagtgcggtaatagggaaatccctatcttatctgaggttaagagacaattagtagagcaaaagcgttatattatagcgagacagatacctacggattatatagtggatggacacagcaattttgtattccttacaaaaagtgggaaaccgtatacgaatggtggaattaacaactttcttaaatccattataaaggactgcaatacatgggaaatagagcaggcccaaaaagagggaagaagtcctgtactattgcctccgtttagcatacataatttgagacatacattttgcagccgcttatgtgcagttgtacacgactataaagcaattcaaatgattatgggccattccgatataaggattactatggacgtatataaccattattcaagaaaggatatagaggttacaatggaggctcttgaaggaagattgagaatcagttgatatttttctgtttagattccggaaaatgttgtaaggtatccatcaatcggatataatgaaaagagatacagttgtgatatatacctaaaaaacagagaagaggtggtattttgcaaagccagacccaagatgtgcttattcagtatgtgaatagaatacatgagatatatgggagtgaattaaaggctgttattttgtatggttcctatgcaaggggagattataccgaatcctcagatatagatattatgattctggtggattcaacggaggataccataaaacagaaagggcgtatggtttctgatataacctttgattttaatctggaccatgacattatgattatgccgattgtaaaaaatgtaaatcatttccagtactggcttccggctgaccctttttataagaatgtgaaaaatgagggggtcgaattgtatgttgcctaatagtggtaatcccagggaccttgctcttcaccgtcttacagttgcaaaggaggatttggcaactgcaaaagatgattttatcggtaagcatttcagagcagctaataacagagcatattattcaatctatcattcgattacagcagtattagctttggagcagattgcttttaagaggcataaggacacaattgcatattttaataaagaatatgtcaagacagaaaaattttccagacaactcggccgcaggattggcagggcccaggagattcgtcacgccagtgattatgacgagttctatatcgcttccgttgaagaagcccaggaacaaattgacactgccgagttattattgaacgcagtggagcagtatgtgtcttcctttggaaaatagcggattctttcctgactccaatttgactccaattgtggaggaaagggtaataaaatgtaatatgctataaactgtaaacaacgtaattatgcggttctcagtaagtggtaaaacatagcgggacagtataaaatacctttaatataaggggaagcaagaagtatttttaagtgaataagtacgtatttaagggcgttctgcgagggcaggacgcccttttgagtccaatttgactccaaagtatgcttcccgattcgggatgttctggtgctaggtccgctgcctctgtgtggattcccgtatgatgagctctgtgttcagcagtacctgccgcggttttgcgccaggggtatttaatttttcaatcagcagctcacatgccatgtagcccatctgatattttggctggttaatggttgtgatgggcggggacgtggcctgggatatgttcacattatcaaatcctgtaacgataatgtccgatggtacggaaagcccggccaggcggcatccgcgtatagcagctgcggcaagtacatcggagactgcaaacactgctgtgggatgctccttctgggacatgagctggtgcgtggaggagagggccatgtcaaagtctagttcaggcagctgaatgatccagtccttgttcagggggatatgggcggcttccagtgtctgtatatatccagcttttctctggcgggcatatttataccggtccggtccgcacagaaaagcaatttttgtgtgcccggtggacaggatgtactccatcattgtcttggcagccgccacgtcatcaatgctggtataggagaccaggtcctggttttccgtatactcacaacactgtacaaagggaatagtatggtataggctgttaaaatatccctggtccatggcgtttaatataatggcgccgcagaggttaatgttatttaacagattaaaaaaggttgattcagtagatgaattaagatgctggacatttaccagggtgtagtaatcatggcgcagggccgcgtcctgtgctcccttgatcacatcattgtaaaatggattggagacagacggtatgttgatcagtatgaccttgccgtccttttttgtattggttgttataaagctttcaggcaatggataattcagcgaatggatggcttccatgatcttttttgcagtgctgcctttgactgcagttgtattgttaataaagcgtgatacggtggctatagagacaccggacatatctgctatctgggaaatggttggttttgttgccatggctgatacctcacaatctaatgatatatttagaatacaccaaaatagaagaaatgtacaggagaaatgtaaaaaatgtaaatttttacaaagtattgacaaaaaaatgaaaaaaagatatagtattaaatgaaaaagccataaaaactagaagaaaatgatataattttacataaaaatgtaaaatacatgaaaaggaggaaaaatgaagtttggtgtaagttcctatgtctgggtatccccgttttcaaatcataccacagaacaattaaagcatgccaaggagctgggatttgacatctatgagataggtgtggaggatccctcgtcatttgacccggcctatgtgaagcaagaagctgatatggcaggtatacagattaacatatgcggagcctttggcccggagcgggatatcagctcagatgattcccgttacagggacaagggaatggagtatatcaggacgctgattgatatggcatcggttttcggctcaccctatgtggcgggacctatgtatgcggcaaccggtaaggcaaggatggcttcagaggaagaacggaaacggcagagatcctatgcagtagataatctcagggatcttgcgggctatgccgccacaaaaggaatcaggctggcccttgaacccctgaaccgttttgagacggattttctgaatacagttgaccagggggtggaacttctggatgagattggatgtgataatgtaggtttgttgttggacacatttcatatgaacattgaggagaaaagcctggggcaggcgatccgcagggcgggcagcaggctgtttgactttcatgcatgttccaatgaccggggaactccgggacaggaccatattgactgggatgaaatcagcaaggcgctgagggatgttggttacgacggcgcggtggtgattgaatcttttaccacagatataacagagattgccaaagcggtttctctgtggagacccctggctgccagccaggatgtgctggccttagaggggctgaagtttctgaaggagaatttataaatatataattataaatcaaaaacatttaactaaggagggtgtcaaatgaaaaaaggactgttagcattaatggtggtttcgggaatgactctgatgactgcttgttctggttcatcccagacagagacaacaaccgcagcacagaccgcggcaaaggaagaaacgtctcaggcagagcaggccagtcccaaagaagcagaggagtccagcgcggaaagtgcgggggggaaggtttatggttatattacgccggggcctgacacatggtatcagcgcaatgtggaaggatttcagatgggagcggagaaggatggcaacaaggtagttattttaaattcagactacgatgtcagcaaagaagtctccaatattgattccatgataaaccagggcgttgacgggttgtgtatcttttcttttaatgaaagcggagctaaaatcgcagcagaaaaatgcgcaaaggcaggtataccgctggtgtcaacggacagtgtggggacagctctggataacaatgggaacgacattgttgcagctattgactttgactggacagagatgggcaacaattacggacagtggtttgcggataactgcccaggtgaaaatatctttgtaatcacgggaaactttgagtcagtgccctgtcagaggataaatgaagctatgcaggcaaaggtggatgaactgggtaaaaataagatcattgatattcaggaaggggaatataatcccagcaaagctatcacggtggcacaggatgcgattgcttccggcaaagacttttcggttatttttgttatgaatgaggacatggcagccggtattatccaaatgctggattctcagggagtgtcagaccagtataaggtggtttcacagaacggttctcccgcgggccttccccttattaagaacggcaagctggattataccatctcatcatctcctggttgggagggacttgtttcttatcaggtactgaatcagtacgcaaccggagccagcacagcagttcagcagcaggttgaacttcccattatgcctgtggaccagagtaatattgatgacaagaccaaggtagtgccatgggaagtggatgaatgttactgggatttgacaaaagagtattttccagagttaatgcaataagaaacatttaagtgggggttcatatgaatccccatttatagataaagggagggaaaggaattgggaaatattttatccatagacggaatctgcaaatccttttccggcatacaggtactgaaggatgtgagcctggagctggaggcggggcagattatttgcctggcaggtgaaaacggggccggcaaatccactttgatcaagatactttccggcgcggaaaaaccggacaaaggaaaaatcactatatttggaaccacatatgaacggatgactcccggtcaggccatgcatctgggaatcgctaccatttaccaggatgccgaccttgtgagctcccttacagtatccgacaacatatttttgggaaatgaaaggctgaggggcagagcttttgtgaacagcagggagcaggaagagaggacaaggaagctgcttcagagcctcagcatggatatgaagccttccatgcttgtggaagagctttcaccgggacagaaacagaatcttcagattgcaaaagccctgcatcaggaagcacggattctgatcatggatgagccaacggcttctttgggagaggaggagaccgcatctcttatgaatctggtggaacagctgaggaaaaaaggactgggcatcatctatatctcccattatttagaggagatgttccgtctgggagatatggcttatgtcctgaaggatggtgtaatggtaaaaaagcttatactgaaagagacaaatcaggatgagctgattaaggccatggtgggaagggatgcatccaacttctatcagaaaggaagtttttcatccggtgacagggcccttgaggcagtgcattattccggcaacggtattgtccgggatgtgagcttttcagtgtccaggggggaggtgtttggcctgggcggtctggtgggcgcgggaaggacggagctggtacgtatgatatacggagccgataaaagggattcaggaaccctgaccctggatggaaaggatatcactcccacgactccaaaatccgctgtaaaaagaggtgtattccttgtttctgaggatagaaagggtgaaggtctttttctgatacgttcggccagggaaaatcttactatatcaaaaaacgacaattctttttttctgaatctgagaaaggaaaaaggaattgtggaaaaaagcatacagcagcttaagataaaggtattcagccaggagcaggaggtaggaaatctgagcggcggcaaccagcagaaggtggttatttcccgatggcttctggaggacggggatgtatatatttttgacgagcccaccaagggcgtggatgtgggggctagagaggaaatctataagctgattgaaaaactggcaaaggaacagaagattgtaattatggtatcctccaacatgcccgagcttatttccatgagtgaccggattggggtcatgagggaagggcggctggtgcgtatcctggattcggcagatgccacagaagataggctgataaaagagtatattggagtgaaggagtgaaggacagatgaaggacagaaataatctgaaatacaaaattttaagtcagcagtggctcatacttctgttgattattttactgatatccgtgcttacggcgctgaaaaatcccagatttcttatgcttaacaatgtgatgaatatttttgagcagattgcagttctgggcctggtggctgcgggcgctactatcctgattatatcagggaattttgatatatcggttggagcggtcattggattaagctcctgtctcatggccatgatgatgaacgcggggatccccattcccgcagcagcggcggcgggcatcctcacagccatgttctgtacgttttttaacggggtacttgcgattctttttaaagcgccttcctttataatttcgctggcaaccaccagcgtatatacaggagcggccctctatctgacaaaaggagtcattcagaccgtgtacggaaaatttgacacaatgaaccggttccgcctgtttggggcaattcctctgatttttattattagcctgatggggtgtgtggtggttggcattatactgcggtatacgcagataggacggcgtatctttgccattggttctaatgagaaagcggcattcctgtcaggtatcaaagtgaccaggaataagcttatattctttgccctgaatggcttttttgtaggcctggctgctgttctcttgctgtccagggtaggctcggccctgccttccacaggagcgggatatgaacttcaggccatgggagcggtggtaattggcggggcacctattaacggtggaaagggaaatattgttggaacatttttcggcgtactgcttatgggacttatctccaacgtgctgaatatactgggagtcaactcttatcttcaggagattgcttccggcgccctgattatcatatctctgggaatcagcgccatcagagtccatatgcttacaaagaattagggaggttcatgatgaaaagtataggaatcattggatgcggaaggattgctcaggtaaggcatattccggaatacgcagaccaccgggacgcaagactggatgcgttttatgacctgaacccggagagggccagagaactcgccggtacatacggaggccgagtttatgaaacatatgaagaactgctggaggatgaaaaaattgacgctgtctccatatgtgttcccaatgagtttcacgcaaagatatccattgcggcactgaaggcggggaaggatgtactttgcgaaaaaccaatggcagtaacccttgaggagtgccgccagatggcagaagctgctgagaaaacaggacaatgccttatgattgggcagaatcagagactagccaaaggccatgcgcttgccaggaagctgattgagcgcggggatattggaaaggttataacctttaagactacctttggacatggagggccggaaagctggagcattgatcccggcagtaatacctggttttttgacaaaaaaaaggctgccatgggagctatggcagatttgggaatccataagacagatctgatccagtacctgatgggagaatacgtagcagagactacagctgtgattaccaccctggataaaaaagatgggagcggaaacctgatcggggtggatgacaatgccatctgtatctataagatggaatcaggcgcagtgggaactatgacagccagctggacttactatggtcaggaagacaactccaccatattgtacgggtccaaggggattatgcgtatctatgaagacccggaatactgcatcaagattataaagccggacaatgaggctatcctgtacaatgtagatcagattcagaccaatgacaagcagacaaaatcaggtgtaatagatgcctttatggactgtattgttcacggaaaggaagcacagctcagtggaaaaagcgtactcagcgctatggaagcagtttttgcaagtatagaatctgccaaaacaggaaaaacaattaaaataggctaaggagaatgaaatgaagttagggtttgtaagtgccatcctggatggatggacttttgaggaaatgatggatacggctgccggactggggtatgagtgcgtggaagccgcttgctggccccaagggaaagcggaacgccgctatgcgggtgtaagccatattgacgtggataatgacagccgtgggtacgtggcgcatattcatgagacatgtaaaaagacaggagttgagatcagcgccctggcatattatcccaataccatggacggtgattttcagaaacgggaggatgccatacggcaccttaaaaaggtaattgcattttcagaaaagctgggcattggaatggtcaccacctttgtgggcagggatcagactaagagcgtggaagaaaatcttgaggcatttagccggatatggcctcctattatccaatatgctgaggagcacggggtcagaatcgcaattgaaaactgtccgatgctgtttggaagagaacagtggccaggggggcataatctgtttacatcacccgccctttggcgaaaaatgtttgatataatacccagcaaaaactttggcatcaattacgatcccagccattttgtgtggcagatgatggattatattcagcctatctatgaattcagagagaggatattccatgtacactataaggatattaaggtttatccccagaagcttaaggatgtgggaattatggcatatccgctggaatatatggagcccaagcttccgggactgggagatgtggactggggacgttatgtgtctgcgctgacagatattggttatgatgggtttacctgtgtggaagttgaggaccgggcatttgaggcggaccgggaaaggattctggacagcttaaagctatcaaaacgttacatagagcagtttgtaatataataaaaagccagtataatctaatatctcataattactcacccttttcccaacgattccctgttttttctctctaaaaatcggcctccggaaaaatcatgtttatggtttttccggagatttccttttccgatgatattacacatgtttttcgtattgttctttttggcggccccttattgcagttagtcataagtgcacaaatagggctaagattgacaacggactgccaatatgtggcaaatgcaatagacacagggtgggatttgcgttaaagtggaatcataaaataacatatgccctataataaatgtatgtaaaggagaggtgctgaccatggaagcgattaaattgagagacgggttctgctggacgggtattattgacgacaagctgcgtgtgtttgatattgtgatgtatacggagtttggcaccacctataattcctatgtgatgaaaacaggggataaggtggtgttgtttgagacggcaaaggccaggttttttgacgattatctggaaaaattaaaagaggtcatagatgtcacgaagattgattatctggtgaccagccacacggagccggaccatgcggggagtgtggagcggctgctggattatagtccccagatgaagatactggccactccctgtgccattagtttcttaaaagaaatcgtgaaccgggactttgtcagcattgcggtgaaggacgaccagcggatgaccattggcaagcggacactgcattttatgctggttcccaatctgcactggccggataccatgtacacatttatcgaggaggagcagattctggtgacctgtgattccttcggctcccactactgcctgaaagaggtggtgtcggataagattcagaaagaggacgattatttaaaggcgctgcgctactattttgactgtattatcgggccgtataaaccctttatgctaaaggccctggaccgggtggagtctctggatatcagcatggtgtgcacgggccacggcccggtgctggtgggggacagaattaagcaggtgatggccctttaccgggaatggtccacagtggtgaatccgaacaggaagaagaccgttatcatcccctacgtaagcgcctacgggtatacaggaatgctggcggagaagattgcacagggaattgccgacagcggtgatattgacgtgcgcagctacgatatggtgacggccgacgcggcgaaagtgcaggaggagttgcagtttgcagacggaatgctgtttggcacgcccaccatcattgccgaggcgctgcgtcctatatgggatttgacgctgggcatgttcagcgtgacccacggcggaaaatatgcgggagcgttcggcagctacggctggagcggcgagggcgtaccccatatcacggagcgcctgaaacagttgaaaatgaaggtggtagacggatttaaggtgaggtttaaaccctcggatgcagatttggtgggtgcctatgagttcggatatcagttcgggtgtctggtgcagtccaagaagccggggacagcggcggcaaagggcggcaggaggctggttaaatgcctggtttgcggggagatttttgattcctccatcgagatttgtcctgtctgcggcgtgggccgggagaactttgtgccggtggaggatgcggcaaatgattttaccaataacacggcaaacgactatctgattctcggtaacggcgcagccggatttaatgccgccaaggccatccgggaaagggatgccacaggacggattactatggtatccgaggagccctatccgtcctacaaccgtcccatgctgaccaaatccctggtcgcaggcctggagccggagcagatagctatggtggatgccccatggtatgaggaaaatcaggtgcaccagatgctgggaaaacgggtggagagcgttgatacggatgccaggcaagcgcttcttgacgacggaacaaagctgcgtttcacgaagctgatatacgcgctgggaagtgaatgctttattccgccgatggaaggaagcgggttaccggaggtggcggcaatcagacggctttctgatgtcagaagggtggaggctctgatgaagagcacggagaaggccgtggtcatcggaggcggtgttctgggactggaagcagcatgggagcttaagaaggcaggcattgaggtgacggtgcttgaaatggctccatccctgatgggacgtcagatggatgagagctccggggagcagttgaagataatagcatccaaagccggggtggtgatccgcaccggcgtcaatgtggaagccatcgagggagacggccatgtgagcggtgtccgcctgaaaacaggggaagtggtggaagccgggatggtgattgtgtccgcaggcatccgcgccaacatagagctggcaaagaagatgggattggagacaaagaagggagtagttgtcaacgagcgcatggagacctcggtttccggcatctatgcctgcggcgactgtgcacagtaccatgatgggaattacggcatctggcccgaagcggtggaacagggcaagactgcgggcgccaacgcggccggggacagtctggaatacacgcctgtacctgcggccctgaccttccacggcatgaataccgctctgtttgccgcgggcgacaacggaagaaacccgaacctctattataagacagtggaattcagggatatgggtaaggaacagtaccggaaatactatttcctgaataaccggatgagcggtgtgattctaatgggtgatttatcacggatggcggccatgactgaggcgctggagaaccatgccacgtatcaggaggtgatggagaattaggcagatgtatgttggacacagagcaacatgagaaccaccagaaaagggaatagcagttatataaaaatagcactgggagttttccagtgctattttctatgataaaaacagttattgcgccttgccctccttctctgccgccacaaccggatcctttggaaacaccagattgagaataatcgcaagcaaagatgtgagaataacgctgttctcctccagcattgcagcgattccggcagggaactgggcgctggcgcctttgcagaactgggtgcccaggccgaatgccagggatacgcctataatcaggcagttccggttggagtatccggccttggcaagaagcttcatgcctgaggtggcaatcattgcaaatacaaccacggtaccgccgccaatcacacagttggggatggtggacagcacggctcctaccttgggacagagaccggccaggaaaaggattccgcagccaaccagaattacaaaacgggagcacactttggtcagagccacgataccggagttctggctgtaggtggcggtggggaagctgttaagtacggctgatataatggaagtgattccgtttgcggtggctcctcctccgatttcatccggggtgggctcgcggtccagtccgcccatgcatgatacgttgaaatcgcctatcatctgtacggcaacaatgaagtaaagcagtacaaacatcagaatatatcctaaatcaaattttacgccaaatgcaaaaggctttggaacagcaaaccaggcagcctctccaatgcctgagaaacttaccagtcccagaatgaccgataaaatgtagcctgccgtcataccgataaggatggctgcaaccttgggaaggcctttgccgaacacattgaatcccagtacaaccagcaccacgaatacgccgactgcccagttgatgggggcaccgaaatcaggtgatgatgtaccgcccgcaatattgccgatggcaagattaaagatggaaacgcccacagtcatgacaatggtccccgttaccacaggaggaaagaaggatgacattttcttaaggagtgttccgtagctgatggcaatgacacccgccgcaatctgggcgccgaagatatagggaattcctttgctgccggcaatggaaagacaggccggcaggaatacgtatgtaagtcccatcatgcagggaaggccggagccaatctgtatgcttccgattcgtatgggatagagctggattgcggttgagatggcagctcccagcatgcagcactggagcagcatgttggcgtcctgaacagacaggttggctactgacgcgactaaaatcataggaacgatgttccctacaaacatggccagtacatgctgcaggcctaaaggcactgcctccttcatactgggcctgccgtcaagctggaattttgaagtgctggttgctgtgttcttttgtgacattgttgttttccctcctgattttctttgatatttaaaaacgctttcatgaaagcttcaacactttgtgaaaggttgccaaactcctggagatttaatgctctgatgtctgcacaaataaaaaaacaagagccgcagctctttgtaaaaggctgccaaactctcgttccaagtctgtgaattataaaattgtaacaaaatcacctgataatatcagctgttaaatatttgtcttataacggtatttagtc

SEQ ID NO: 3284 - DNA, 25644 bp, Unknown
  gut microbiota DNA sequence
caaactatgtcaaactgccacagaccaaaacgaggggacaaagggctgaaaagcgaccccaaaacacccccaaaaatcggctctcggttaaccactttgggcaccacttgaccctctttttgccctcttttgggccggttaaccacttgcggaccactaaaaattgggtgaaaacggctctcgttttgttaaattaggtcaaactatatcagcccgtttagatacagtaaaaccccggaaaaccttgattttccggggtttttgacccattttgatacggtttgaacagcagattatctcttgctgaactgaggtgctctacgggctgccttgagaccgtacttctttctctctttcattcttgggtctcttgttaagaaaccagctttcttcagggctggtctgtaatcagcgtctacctgaaggagagctctggagatgccgtgacggattgcgccggcctgtcctgttgtgccgccgccgcgaacgttaaccattacatcgaatttatcagtagtctcagtagctactaatggctggcgaacaataacctttaaagtctcaagaccaagatactcattgatatctctcttgttgatggtgatgttgccggtacctggtactaaatatactctggcgatggatttttttcttctgcctgttccgtaaaattttgcgttagccatgatactttcttcctccaatcctcattaaaatgttaaaacttctggtttctgtgctgcctgctcatggtctgggcctgcatatacatgaagcttgccaaacatgcttcttcccagaggtccctttggaagcatacccttaactgctaactcgataaccttctcaggcttcttagccatcaattcacgcagggttgtctctctcataccgcctacgtaatcagagtgattgtaataaatcttctgatccaacttcttgccggttactttaatcttctcagcgttcacaacgattacataatcgccgcaatccatatgaggtgtgaaaatcggcttgttctttcctcttaaaacctttgctatctctgaagacagacgtcctaatgtatatcctgtagcatcaactacataccattttctttcaattgtcgctggactagccataaaactcttcattggttaacctcctgttaatctcaaccttgttatacacctgacatccaacggatgcccgctatatgcctgataaatatgggaagtatttatcaatcaaagtgctcactccggggctttggatgagcattctttgctaatgtcacagttttatattatataataccaaacactccctgtcaaccactttacaaagaaaaaatgccgaataatcaaagataatccggcatttacagctcatatttcatttctatcagggtaagccccctggcaggcgccgtggggcctgctgccctccggtcctttgcctccagaatggagggcacatcctctgcctgtatatggcctgttcccacagccatcagggtcccggcaatgatgcgcaccatattatacagaaaaccgttgccggtcacgcgtatggtaataatatcatccgcatttctcgtaacatcaatcctatagacggtccttactgtatccgtcacctgggtgcggacactgcagaagcttttaaaatcatgttccccttccagcatatttgcagcagcctgcatcctgtccacatccagcttataataacagaaatgggagtacaggcgctccatgggcatgttgattctccggtttaaaatcctgtattcatatgtcttgatgcaggtgcattttctgggatgccagtcagagggcacttcctcggatacctgaacccggatgtcctcaggaagcctctggtttaaggccatgcaaatcttatccggcggcatctggctttctgtgtcaaagacagccacattcccccttgcatggactcctgaatctgtcctgctggcacctataacctggatgggctccctcataagctgggtaagggcttcattcaaaacagattctatggtcactgcccccggctgtatctgccagccgtgatattgggtgccgtcataggcaaccacaagccgtattcgtttcattgatcctaccttcctgtatatgcagcgcagtgctcattttagagataaaccctggacgctatgatgaccacaaaatacagggcatatatcatataggcgtcatggtccgcctggcggtactgcaggggtttcatctttgtgcggccgtcgccgccgcggtaacagcgggcttccatggccatggccaggtctgtggccctgcggaaggcggaaataaataacggcaccagaagaggcaccatggcctttgccttctgtatcagattgccggtctcaaagtcagctcccctggccatctgggccttcatgattttatcggtttcctccaccagaataggaatgaatctcagggcaatggacatcatcatggcaacctcatggaccggcaccctgaaccgtttcagaaagcccaggcccttttccagaccgtctgtcagctggttcggcgtggtggtcagcgtcatgatggatgagcctatcaccagatagataagcctcagccccataaaaaaggccatacgcacgccctcaaaggttatcttgaaaatccagaactttaccagtatgcgtccgtctgtcaggaacagattgaagctgacactgattaacagcagaatcatgatagccttcagccccctgagaatgaaacgcaccggcaccctggtcagcttaatcacagctgccagcaccactgtggcaatgacataaccccatatattgtcagcaacaaacaaggaggctatgaataccatagttccaaaaagctttgtcctggggtccagtctgtgaacggcggagtccaccggatagtactggcccaacgtaatctctctaaacatttttatccctgctgctttctgtcagtttattcctcagcgccagaatagcctccctggcctccgccactgtggtaatatcatcatcaatatcaatgccttgggccttcaggtcatggaccagataagttatctggggcgcagccagtcccatggtctccagttccctgtaatggcaaaaaacctcctttggcgccccgtcaaacaccttctgcccatggttcatcacaatcagacggtccgcatacctggccacatcctccatgctgtgggaaaccagtatgatggtcatatggcgctccctgtggagcctgtcaatctggtccagaatctcatcccttccccttggatccaggccggctgtcggctcgtccagtataaggacctccggttccatggccagcacgccagctatggccacccgccgtttctggccgccggacagctcaaagggagactgtttataataagaagggtccaggcccacctgttccagggctttttttgccctggcttcggcctcctccctgctcaatccctgattcttaggtccgaagcatacatctgtcagcacatccacttcaaagagctggtgctccggatactggaataccaggcccaccttgctcctcagctgcttcatgtcatagccctggctgtagatattctccccgttgtagtagagttcgcctgcgctggcttttatcagcccgtttaaatgctgaatcagggtggactttcccgagcccgtatgtccaatcagacccacaaattccccgtcctcaatctccagattcacgtcaaacagggcatgctgctcaaaggccgtgccgccgccatatacaaaattcaaatcaactgcttttattgacatcctctatctccttctccctatctcagaaggggtaccagctgttccaccagctcttccctgctaaggattccatccgtaaggggcattcctgcctccttaagctcccaggccagctctgtgacctggggcacgtccagtccatggctcttcagttctttgaccctggagaaaatttcccttggctgtccgtccatgacaatcctgccgtcgtccatgacaatgattctgtcagcctcaatggcttcctccatatagtgggtaatcagcaggacggtgatgccttctgccctgtttaactcatgaatggtccgtataacctccttgcggccgttagggtccagcatggctgtgggctcgtccagaataatgcactccggcttcatggccataacgcctgctatggccaccctctgcttctgtcctcctgaaagcttattgggtgactggagccggtaggcggtcattccaacagccttcaggctctcctccacacgcttccatatctcttctgtgggcacgcctatattctccggtccaaagcccacatcctcctccacaatattgccgatgatctggttatccggattctggaacaccatgccggctgtcttgcggacatcccagatatgttcctcatccctggtatccatatcccccacccatacggttccttccgtgggcagcagaagaccgttgacatgcttggccagagttgacttgccggaaccattatggcccagcacagccacaaaatcacccttttttatatccacatccacaccgtcaatagcccggttcacttcttctatattttcttcctcatcgcgtcttatatactcatataccagttttgccgctttaacgattcccatatgcgtcctttcaaaaccttcgttctgctacgtttctcaattttagttgaaattactatataagtcaagagcagcggcgcaataatcccgttacaggcgccatggctgcattccgaccgctcaccaggcactctaaagggcttctgtcatgagataccccctgctgcgcccattggtttctgcttacagtttcattatatttttttcccatgccaaaggcaactgttttcctgtgacctgccccgggacggaatggaatatctgatggcgcaatgcagtacataacatctattatcatttctgttccggccggtgtgatttgctaatacatcagcaaatgccgtgcagaaagtaatgatcaacagacagcctgggatatacctccttaaaaggaaaacgaatccccgaagagctgcctctcttcggggattcgtttgtgttgtaatacacaataacatcttttcttatctgacaattcactgcacccaggccccgtcatcccccacataatacccgtccggtgtagtggtattgtaatacatggctccgtcgtctccgcagtaataccatctgccgccccagtcaatccagcccgtcaccatgtatccggcggcattaaaaaaataccacctgtcatcaatatactgccagttatttaccgtatagctcttatccgcattgcagtaccaccagcccaccgaatctctgagccaggcgcctttgtaactggatgaggaggaaccgtatgtccttctgccgtcactgatttcatccgcctcctccgatgaaacataccaggaatcagattcctcccagcttcccttgtcggaggagctgtacacggcccttaccttaaacagatagtcaccgctttttgtaatataaccggaaaaatcataattggtatccgaggttgtaagtacggaggtaacggaattatcattgcggtaaagccttacctcgtatttcctcgcgtccccgctgtcctcccacgaggccatgccgtcggattcatcccattccagcccgtagacatccaaatcatatccgctgtcactgccgtccagggaatccagagtaatgtatacgatcagggtgctgctctttctggtgaccgatgtaactttaccgtccgcccctcttaaatccacatcacttttagacagaccggaagaaaaatagtaatcatcctccgcctccaccgtaaccttcagctttggcttatcgccgtcatcccatccatttttaggttcattggttatctctatatcatccacgtaatagtcgccggaatcacaggtcacatccacgtctccggaactgtcgcccgcctcaatattggactccacatccagggatatactgtctatctctgtccttgtggatgccatggccgtcccgcacgtaagcatcagcagcgcccctgacatccaaatgactgcctgctgtttcagtctccccatatcacactctccctttcactgcaaaccataaactgtgcctctgcgtcaatgaatccaggccccgctgtcatctacctgaaagccgtccggtgtggtaactcccgccgccatagcgccgtcttcatacatgtaataccatgtattctgaatctggttccatccggttacagcataaccttccgggttaaaatagtaccatttgcccatgatacgctcccacctgtctgctgctgcggtcccatcctcataggtaaaacgcctgccctcctggtaatcaccccaggtgccgtctgtaatgcccggtgtattggccccggaggtaagggaacttacagcttcaccatcctcaagataatcctgctggtttccgtttcttgcaatggcctggacctcaaaataatactgaaccccctcctttgtcataaatggtgaaaaatcgtactcggtactgccctccacaagctggctcaccacagacccctggtcatcatagagaacaacccggtaggtgttggcgtacttaacggcattccatctggcaagactgggggttgcactgtcccagccggcccaggcagtctctcccagctgcgccgcaacctggtacttaaatttcacctgatatacatttcccaaatctgattcatagtcctctcccgtatacttttttacggaggaaacctttgcttcatttcttccattggtcacacgaagctccagactgtccctgcccaggctccccgtgcagcccagatacagggttcctgtcacctcattgcctgcactccagttcaggggatccttggaccactccacatcggatgccagctccatcccatccgaggagccttcagacacttccacatccggttccaggggatgtaccctgtctttgtcattgtcgtccctgctggtgccgtctgtgtcgtactggttggtaatctccagcctatatgtggttttagcctgagcacttatgctcaggccaaataccatcaaacaaacggcagcagctgtaaaacaaaacctgcctcttttcatagtgtctcctttcaactatccttcctttatctatgaaaaatgccgtcatacttctttttcccgcaaatcactcacaaacctctttatcctaatgctgccatactccattggcgtctaactggaaaccgctgatggatgtgtttacagccttctgtccctgtcccggatagaagtagtaccaattatcctggaccttgtaccacccttccaccatggcgccgctttcgttcatgaaatacgtctttccgtcaatggtgagccagctgttcttgaccatggcgccttccggtccgtcctggttggggttcatatagtaccaaatattattggactttacccagcctgtcttcatatcgccgctttcacccagatagtaccatccgctgttggtctgcttccatcccgtcaccatcttgcctgtctcgtcgaacagataccatttatcattccatctcagccagccgtttttctggtagttgccgtcgggatatttaaaataccatgtgtcgccttccttgcgccatccaacgtccgtgtttcctccgctgggagtactgccgttgccgtcctcctgtccggtgccgtcagaaacctcgtcctcagcgatatataagtctcctgcttcggtccattcgctcttcttgccgcgcttcttttcctcctctgtgtggggaacggtccttaccttaaaggaataatcaccttccttggtcatgtaaggataaaaattataggatgttcccttatactcctccagcttcttaaccacggatgatccacggtacaaatacacgtcgtaatatccggaaccgccgttttccggttcctcccacctggctcttccccgggtgctgccccattccgcgtcttccggcgggtcgtaggtccccttgattccgtttgccctgattaccaccttaaggtcacttccgcttttggaagcagacacaaaagttccgccgctgacactgacgctgcctgaactgtagctgctgcggaaacggtaatcataattgctgttgctggaactctccggctccagccacacagttatctttggcgtatcgccaatggtcacttccttatcattggaccactctgctgactgaaccctgtatttgttcgatgaagtgtataccttgttcccgctgtcgctggaatctgttcccaggctgtcaccatcattgatttcatcccctgaatccaggtctatatccaccttcaaagagatgttcgtgatatacttataatcagatgatgccatggactggatgggcatagctgtaatcagcgtacccgtggccagggccagacataacaatcgcttcatgcttctcatgaaattcaacctcctccaaggattcccccttgctgcactttccttgtttcttcttttcctggttctattatagaccaggggacagttttgcgtcaacttacgatattcttgcgatattttcacgattatttcaggaactaaaaaaactgcagacacgattaccgtatctgcagccttctgcacgattcaatggaattatactaactcaatcagaacttccatagcgccatcacccttacgctggccaatcttaacgattctggtgtaaccaccattacggcctacgtactttggagcaacgtcgtcaaaaatcttagctaccaggtcaacagacttggtatttctcttctttcctgctgcggcagccggaacttcggtcactccgtagagaacctttaacatctgccttctggcatgcagtctggaaggcatatctttcttgatttccttctctacttcatcgtatacggtaaccttcttgccgtctacaacttccttaaccctcttgccgtctttgtccttgcgggcaaccttagcggtaacctttacagtctcgaagttatccttctccttaactgccatggcaatcagaccttctgcaaccttgcggatttcctttgcacgggtctcagttgtcctgatgtgtccatgatataacagtgctgttacctggcttctgattaaagcctttctctgatcggaagttcttcctaattttctatatcctgccattgtattttcctccattatcgtggaacaccttcaccatgcttctttggacttactggtattggcgttttcgcccacttattctatttggctctctcagtcatgcttctttggacttactgaccgggagtaaagctccctcacttcgttcggtctgtgcgggaaacgcaaactccgcttcacttcgtctgcgcagcgctccctcactgtgttcggtcgcttagttgtcgtcgcttggatttagctgtaagcctaattcctttaacttggccagtacttcctctaaggacttgcggcctaagttacgaaccttcatcatgtcctcagaagtcctgttgcacagctcttccactgtgttgatgccggctctcttcagacagttgtaggaacgaacggaaagctccagttcgtcgatattcatctcaagcactttctctttctcattgtcttccttctctaccatgatctcagcggtcttggcattctcggaaaggtcaatgaacagattcaggtgctcgcttaatacctttgcggccaggctgacagcctcatcgggagccagggtgccgttggtataaatctcaagtgtaagcttatcgtagtccgtctgctgccccacacgtgtattggctactgccatgttcacgcgctccacaggagtgtagatggaatcaactgctatgaccccgattggtaaatcgtcgttcttattcttatcggcgctgatatagccgcggcccttggtgatggtaagttccatatagaacttgctgtccgtgccgccgcttaaggtggcgataatctgatccggattcatgatctcgatatcagcatctgcctggatatcagctgcagtaattacaccttcgccttcaaattcaatgtatgcaaccttgggctcatcggtatcgctgttgttcttaatcgctaagcttttgatgttcataataatttcagtcacatcttccttaactccgggaatagaactgaactcatgcaaaacgccatcgatttttacctgactcactgcggctccgggtaaagaagaaagcataattcttcttaaggaattgcccagcgtagtgccgtaacctctctcaagtggttcaactacaaacttgccgtatctcttgtcttctgaaatctctgcgatttcaatgtttggtttttcaaaatcgaacactaatagcccctcctttttgggtttctatcaaatctcgagggaaataaagcactgcaaagcagtgcactgcccaaacacagcccaaggcgtaagttcgggtttttcatcctgcaaagtacgcctgccctataaaggacaggcataccttgtacaatttataatcaattgtaggattacttggagtacaactcgacgataagcatttcgtttactggaacatcaatctcatccctggttggcatttccttaacagtaccgcgcaggttctcctggtctacatccagccaagccggaaccatacgtccgccggttacttccaggacgtctttgtatctctgtgcggatttgtatttctccttcacttcgatgacatccccagccttaacacggtaggatggaatgttcactggcttgccgttaaccagaatgtgcttatggtcaacaatctgtcttgcttccttgcgtgtacggcccagacccatgcggaacagaacgttgtccagtctgcactctaacaggatcatcaggttagtacctaccataccgttcatcttggatgccttagcatagtaattacggaaaggtttctctaatacaccgtaaatgaatttggctttctgcttttctcttaactgcatgccgtattcacttaactttttgtttgttctcttggattctctgttggactttttatcaattcctaaatagattggatccagaccaagggatctacatcttttaagaacaggaactctatctactgccactttaattacctcctaattaaaatcaatcagactcttctacgttttggcggacggcatccgttatgtggaactggtgtcacgtccttaatgctggttacttccaatccacatgcctgaagggcacggattgctgcttcacgtcctgaaccaggaccctttaccataacgtctacggattttaagccatgtacgagagctgccttagtagcagtttctgccgccatctgggctgcatatggagtagattttcttgaacctctaaatccaagaccaccggcactagcccatgaaagagcgttaccctgcgcatcagttaatgtaacaattgtgttattaaaagatgactggatatgtgcctgtccgcgttcaacgtttttctttacacgcttttttgtcacttttttagctgtagtggacacttttttagccattttaaactaacctactttctcattttcttgaattcgctcttcctgtttttaaaacatgtaaatcgaattcggttacaatgttgctaatgaaattcttacttcttcttgtttgctactgtcttcctcggacccttgcaagttctggcgttggtctttgtcttctggccacgaaccggcaggctctttctatgacggattcctctgtagcatccaatttcctgaagtctcttgatgttcatagcaatctctctacgaagatcaccttcaacagtctgagtctcagcaattgtgttagccagcttttttacctcatcatcggttaaatccttaacgcgagtgtctgggttaacgccagctgccgttaagatgcggttggagcttgctctaccgataccgtagatgtaagtaagaccgatctcaacacgtttttctcttggtaagtcaacacctgaaatacgagccatgtgtgtagtacacctcctaattttaattaaccttgtctctgtttatgctttggattttcacaaattactctgatactgccttttctctttatgatcttgcatttttcgcagatcggctttacggatgatctaaccttcacagtaattctcctttctatagaccaacaaagttgctaaagcattatatcaaacatttgccaataatgcaagcacttttttatctatggtgttttatgttcttttccggggcaggcggtgtttgacatcactggcctgctggaaaacggaactctttctttactctgtctttattctgtcaccagacagcctgtttaccttatttatctctccagatgattcttcccttggataaatcatagggtgacagctcaatggtcactttatctcctggcaggatgcggatatagttcatacgaagctttccgctgatgtgtgccagtacctgatggccgttctccagttcaacctggaacatggcgttgggtaatttctcaattacggttccctcaatttcaattacgtctgcttttgacattctattttacctcctactgcctgcggctgcggatgaagcctgctatctcctcatccctcaccgccgcgccttctgtaagcttcttccttaaggtttcatcgtgctcatgtatgagctgcaagtgtttcctgttcttgcgtttctgtttacttaaagggtgtttcctgccgtctgacagataaacatattccccttggacactgattatgatatacagttcatttttgtcgtggcctgctaaactctttaccaggccggcttccttaaactctaccatagggccacctcaaactacagcgataaaatctcaggttcgccatccgtaatcaggatggtgttctcataatgggatgccagagagccgtcctctgtcacaacggtccagccgtcatcctcccatactacatcatagcgccctgcagtaatcataggttcaattgcgagtgtcattccggcagccagcctgatgcctttgcggcgctgggcgaaattgggaatctccggtgcttcatgcatctccgtaccgataccgtgacctaccaggtcccggaccactccgaagccaaagctttctgcatattcctgaatggctttggaaatatcattgagatgattgccagcttttgcatactttataccttcaaaaaagctctgctgcgtcacctctaccagtttcctggcctccccgctcacttctccaatcatatgggttctggctgcatcggactgatatcccttccatataacacctgtatccaggctgacgatatctccttcttccagatagcggtgcttatccggaatgccgtgaaccacctcatcgttaatagatatacacacagatgccggaaaaccctgataattcagaaaggatggaacacatccatgacttcttatcatatcttcacacatccggtcgatttctttggtagacattcccggtaccagggtcctgccaagctcctcatgaaccttggcaagtatacgccctgcttcccgcattaattcaatttcccgttctgatttaatcgttaccattctttatgctcctaaaatcctgacaatggcctggaatacttcttccatatccaatgtgccatctacctcggctaaaacgcctgcctttttataatactctatgagaggctgagtctggtcatgatagacatcaagacgcttcttaacagtttcaggtttatcatcatccctaagtaccagctgctggccgcatacatcacagattccttcctttttaggaggattgtatacgatatgatatgttgccccgcaggaaaggcatgcgcggcgtccggacatacggtttatgatgttctcatccggaacatccacgttgattgcatagtcaatggcctcacccatgtcgcccagagcttttgtaaggctctctgcctggggaatagtccttgggaatccgtccagcacatatccgtttttgcagtcctcctcatggatgcggtccagcagcatgccgatggtgatttcatccggcacaagaccgcctgcatccatataggacttggctttcatgcccagctccgtgccgtttttaatgttggcccggaaaatgtccccggtagagatatggggaatctgatattttgctgcaatcttttttgcctgagtacccttgccggcaccaggtgcgcctaacatgataatcttcataaacccagtcctcctcgttatgagcacttagtggccgtattttggccgcttacgtgcgatacatgtcacctccacttggtgaggtcttccacgagcctagtggagtggctcgttatgagcacttagccgccgtattccggccgcttgcgtgcaatacatgccactggcacttggcgaggtcccctcacgagcttagtgcagcggcgcgttataagctataaatacaacaaatccgcccctgtggaataccacaaaggcagattgattgattcaactgtggttgttaatcgttcaaaaatcccttataataacgcacaagcatctgagattctactgctttgattgtctcaagcacaacgccaacgataataatcagggacgttccggaaaatgagattcggctgacgttgagtaaaccggacgcaagaatcggaacaatcgcaatcactatcaggccgcatgcaccaataaaaacaatataattcaatatcttattcaaataatcgctggttggcttgccaggacgaatgcccgggataaagccaccctgcttcttcatgttattggccacttccaacgggttaaacgtaatggacgtatagaagtaagcgaacataatcagcaatgcaatataaatcaccagaccgatggagtatataggatactcaggcctgcaccatgaacccgaattgagcaccatcagaatcttactgccgatggagtttggatcaatcgtaaagaactgagaaatcaccaccgggaaggacatgatggaagaagcaaagattaccggcataacgcctgcggtatttatcttcagtgggatgttggaagcctgtccgccaaccatcttacggccaaccatcttcttggaatactggaccggaattctcctctcggcatcgttcagcacgataacgaaaactaccatagccaggataatcagggcaatcactacaacgctgaaaatcatctttgtaaccgtctgtccgaagataaagcggtaataaagagttttcatatcatccggcacactggacaggatgttgaataacagtacgattgagataccgtttccaacgcccttttccgtaatctgctcgccgatccacatgagcagggcactgcccgttgtcatggtgacgatggcgatgatgatgttccatgcgttataatctatcagaagtccctgacgtccgaagccgatggccatggcacttgattcaatcagtgccaggcccacggtggtatagcgggtgtattcctgaatcttctttcttccgtcctcgccatccttctgcagctcttccagttttggaattgcaatggtcagaagctggatgatgatggaagatgtgatgtatggcgtaatgctcagggcaaagatggacatggatgaaaatgaaccacctgtcatggcattaaagaagccaaacacatccgttgtctgtttcgcaaaccaattcgcaaagaacgatgtctcgattcccggaatcggcagctggctgccaaaacggatgactaccagcatcatgaaggtatagagaatcttagtgcgaagctcttttaccttgaatgcatttctgatcgttttaaacattagatcacctcgcaggttccacctaaagcttcgattttagattttgcaccttcactgaatgcattaaccttaacggtcagctttttggttaattctccatttccaaggatctttacaccatctcttgggttcttaacgattcctgcctcgattaaggtctcaaccgtaacctcagcatcattatcgaacctttccagagcgcttacgttaataccaataatggtcttagaattcatattagtgaaaccacgctttggcagacgtctgtataaaggcatctgtccgccttcaaagccaggccttgttgctccggaacgagctttctgacccttatggcccttacctgcggtcttaccattacctgaaccatggccacggccttttctaaaattatcgctatgctttgaacctgcagcaggctgtaaatttgacaactccatgactgcacctccttactctatatgattagacttcttcaacttttactaaatgccgcactgctgcgaccatgcctctgacagcgccattatctggcatttcaaccgtcttgtgcatcttggtcagtccaagagccttaaccgttgctttctgctttggaacagcaccgataggggacttgactaatgtgatttttaatttctctgccatgtctttctcctcctattagcctacgatttcttccacagatttgccgcgcagtcttgcgaattcttccggagtctttaaggaagtaaggcctgcaagagttgccagaactacatttgtcttgttgttggatcctaaggattttgtacggatgttcttgattcctgccatctccagtacggaacgtgccggaccgccggcgataacaccagtaccttcaggagctctctttaacagaacagctgcacttccgaatttaccgataaaatcatgtgggatactcttattctcatctacaggaatctctaccagattcttaattgcggcttctttacctttgcggatggcctccggaacctcgccggcctttcctaaacctgcgccaacgtggccgttgccatcgcctactactaccagagcggaaaatctcatggtacgtccacctttaacagtcttggatactctcttgattgccactaccttgtcattcagctccatctgactggcgtcaataattgtacgcttcatgcttgttctcctctctattagaaatccagaccagcctcgcgggctgcgtctgctaatgcctgaactttgccctgatatataaagccgcctctatcgaaaacaacttccttgatacctttttcaagggctctctttgcaataactgtacctacatatgctgcagctgccttatcgttggtcttctccagttcagcatttacttctttctcaactgtggaagcagcaaccagggtgttaccaaccgtatcgtcgataatttgagcatacatatgattattacttctaaacactgccagacgcggtctctctgctgtgccagcaaaacggttacgcattctgttgtgtttctttacgcgaatttcgcttcttgactgtttgttaaccatttttacactctccttaattatttcttaccagtcttaccaactttacgtctgataacctcgtcagcatacttgatacccttgcccttgtatggctcaggtcttctcttgtctctgatttcagcagcgtattggccaactttttctttactgatacctttaacgataatcttgttctgaccttccataacggtctcgatgccctctggatcttccatctctaccggatgggagtagcccaggttcagggtaagcttcttgccctgcttagcggccctgtaaccaacgccgtttacttcaagaaccttctcatacccttctgtaacaccatgaatcatgttgttaaccagggttctggtcagaccatgtaaagatttcatcttctttaaatcgtttggtctgcttactataatctgtccatctttctgctcgatggtcatttctacggggagctctctctctaatgttccctttggaccttttacagtcactttgtttccttctgcgattgtaacagtaactcctgccggaaccgcaactggcattctaccgatacgtgacatgcctttacctcctacttaaattctcggaaggaactgtgcgttccttctgttttcagtttcctctatctcatcattaccaaacaaatgccaatacttcgccgccaacacctaactgacgtgcttctttatctgtaatcacgccctggttggtggagatgatagcggtaccaagtccgcccagtaccttgggaagctcttccttgttagcgtatacacgcagacccggtttggagattctcttgataccggaaatgattttctcgttcttgtctttgccgtactttaaggtgattctgatggtctggaaaccgccgtcctctaccatgtcgtactttgcaacataaccctcttttaccaggatgtcagcgatagctattttcatcttggatgaaggtacgtctactgtatcatgttttgcagtgtttgcattacgaattcttgtaagcatatctgcaatcggatcgctcattgtcattttaaaatgcctccttcctaattctctctattttaccagctagctttcttaacgccaggaatctgacccttgtatgctaactcgcggaaacagatacggcagataccgtactttcttaaataagcatgtggacggccacagattctgcagcggttgtactctctggtggagaatttagccggacgctgctgtttaatcttcattgaagtcttagccatgaaagtttcctcctaactattttgcaaacggcatattgaataatgtcaaaagttcacgagcttcttcgtcagtcttagcggtggtaacgaagatgatatccatacctcttaccttgtcaactttgtcgtactcaatctcagggaagatcagctgctctttgataccgagcgcatagtttcctctgccatcaaatgcgttagggttaacacctctaaagtcacgtacacggggcagtgccaggtttaccagacggtcaaggaattcatacattctctcgccgcgcagtgttaccttgcagccgattgccatgccttcacggagcttaaagttagcaatggacttctttgccttggtggttatagccttctgtccggagatgatttccaaatcccttacagcagaatccagaaccttggcattttcctttgcttcgcctacgcccatgttgataacgatcttatcaagcttcggcacctgcataacgttcttatatccaaattttttcatcagagcgtctaccatctcgttctgatactgttcttttaatctagccaacgtttttttcctcctctcctgaattagtcgattactttgccggttgtcttagccacgcgaaccttcttgccgtctttttcttcaaatccgaccctggttgccttgccgtctactaccagcattacattggagatatcaataggagcttcctggttaacaatgccgccctgtgggttgcccggagcctgctttgtgtgcttggtaaccatgttgcagccctgaaccagaactttgttcttctttgtatcaacagagataacctttccctgcttatctttatctttacctgcgattacgactactaagtcgtccttcttaatcttattcacagtaacacctccttataatacttcgggagctaaggagacaatcttcatgaactgtttgtctcttaattctcttgctacaggcccaaagatacgagttcctcttggagtcttgtcatccttaataattactgctgcgttctcatcaaatctgatgtaagaaccgtctttacggcgtgcgcccttaacggtacgtaccactacagcctttacaacatcgcccttctttacaacaccgcctggtgttgcatctttaacggaagcaacgatgatatcaccgatatttgcatatcttctggttgaaccacctaatacacggatgcagagaagttcttttgcaccggtattgtcggcaactttaagtcttgtttcctgctgaaccatacctgttactccttcctcatctcattatctagctttctcgataatctcaacaagtctccatctcttatccttggacagtggtcttgtttccattacttttactgtatcaccgatggtgcactcattcttttcatcatgagcttttaacttcacggttttcttaacgatcttaccgattacaggatgttttacatggtcctcgatagcaactacgattgtcttatccatcttgttgctgaccactttaccggtacgggtctttctcaaatttctttccacggtaaatgtctcctttcgcattatgcgttagccttctcagtgataacagtctggatcctggcaatgttcttgcgaacttccttaatcctggatgtgttatccagctgattggttgcattctggaatcttaaattgaacagttccttcttcgcagctactaactcttcattcagctcatttgctgacttattctttaactcttctacaaatttattagttttcactgttatcaccgccttctaaatctgctttagaaacaatcttacacttgcatggcagcttgtgcatagcaagacgcagagcttctctagctgtttcctctggtacaccagcgatttcgaataatacacggcctggctttacaactgctacccagtactccagagcgcctttaccggaacccatacgggtttctgctggctttgctgttacaggtttatccgggaaaatcttaatccagactttaccgccacgcttgatgtaacgggtcatggccacacgggcagcctcaatctggtttgatttgatccaacatggttcagtggagactaaaccgtactcgccgttagaaatcgtgttgcctcttaatgccttgccggccatggaaccacggaactgcttacgacgcttaactctcttaggcattaacattatttatcgctcccttccttgtttcctttagtaggaagaacttcgcccttgtagatccatacctttacgccaatcttgccgtaggttgtatctgcttctgcgaaaccatagtcaatatctgctcttaatgtctgaagcgggatggtaccttcgctgtagaattcagtacgtgccatatcagctccacccaggcggcctgcaacagcagtcttgatgcccttaacgccagccttcatggttcttcccatggtggacttcattgcacggcggaaggaaacacggttttccagctgctgagcgatggactctgcaaccagctgtgcatccctgtccggacgcttgatttccttgatgtcgatgaacagcttcttatcagtcagcttctgaacttccttcttcagcttctcaatttcagaaccacccttaccgataaccacacctggcttagcggtataaatgataatcttaaccctgtcagatgcacgctcaatttcaatcttggaaatgccggcactgaacagtctcttcttgaggaactttctcatattgtaatcttcaaccaggcagtcagcaaaatcagcttctgcataccacttggaatcccagtctttaataacaccgactcttaagccgtgtggattaactttctgtcccatatttgcctcctatctctcattcagaacaacagtgatgtggctcattctcttctcgatcctgtaagcacgtccctgagctctcggtctgactctcttcatggtcgggccctggttagcgtagcactcttcaacataaagttttgccgggtccattccgttattgttctcagcatttgctgctgctgattccagtaactttttgattaagctggaagcgtatctgggattgtaagttacaataccaagtgcggtctgtaaatctttgcctctgatggcatctaatacaaagcaagccttctggacagacactcttgcgtaagacagtgttgcgcttggtcttgtgtccttctgggcatttctttctctcttgacttgggatctatgtccttttgccattggtaaaacctcctttcaatttaccgtgaattactttctcacgccggacttcttctcgtctttaccgtgacctctataggttctggttgctacgaattcgcccagcttatgtcctaccatatcttcggttacatataccggaacgtgtttcctgccgtcatgaactgcaattgtgtgaccaaccatctgtgggaagattgtagaacggcgggaccaggttttgattacctgcttctgtcctgctgcattcatagcgtctactttctttaacagatgcgcgtctgcaaatggtccttttttcagtgaacgagccatgtgttcttaacctcctttaactatttgatggttctgccatcacgtcttcttacgatcaacttgttagactgcttgtttttctttctggtcttcagacccagagcaggcttgccccatggtgtgcacggacctggacggccgataccacacttgccttcaccaccaccgtgtggatggtcgttggggttcattacggaaccgcggactgtaggtctgatacccatgttgcgcttcctaccagctttaccaatgttgatcagggagtgttcgccattgcccacaacaccgattgttgcgcggcagatgattggaaccattctcatttcgcctgaaggtaaacgtaaggttgcatacttgccttccttagccatcaactgtgctgaattaccggctgaacggactaactggccgcccttgccaggatataactcaatgttgtgtacctgagtaccaaccgggatgtgatacagtggcatgcagttgccaagctttgcctctgctgtatcgccgctcataaccttcattccgtcggttaagccctgtggtgccaggatatatgccttctcgccgtctgcatagcagataagagcgatgttggcagttctgtttggatcgtactcaattccgataacggttgccggaataccatccttgctgtttctcttgaagtcgatgattctgtattttcttctgctgctgccgcctctgtgacgaacagtgattttaccctgattgttacgaccagcgttcttgttcagggatactaccagagatttctccggagtgtcctttgtgatttccttgaaatcagaaccggtcatatgtcttctggaaggtgtataagcattatacttcttaattcccatgacattttactccttttctttttcttttcacggcgtatgactttggtagggatatctgggatatcccggatgccgtataagttctccgtccgggtgtgtccggcgggtgtgagattttcttacagtccctggaaaatctctatctctttgctgtcttctgtcagctttacgattgctttcttggaagcagctgtcttgccgaaggtcattccccttctcttggtcttgccttcacagttcatggtgttcacgctggcaaccttggtgcctgggaacatcttctcaacagcctctttaatcatagacttgttagcgtctacatgtaccatgaaagtatactttctatcgcccatggcattcatgctcttctcagtgatgactggttttaaaatgacgtcatagtacttgatatctgccattatgcgtacacctcctcgatggatgcaacagcagccttggtagccactactgtgttgtacttcagaatgtcgtatacgttgatggagccgacctgagaggtcttaacgcctgcaatgttccttgcagataatactgtattctgatcattgtcagccagaaccaccagtgccttggataccttcaggttatccataacattctggaacttcttggtcttaatctcgtcaaacttaagctcatctactacgataaacttgttatcctgaacacggctggtcagagcagacctaagagcagctctcttttccttcttgttcagtctgatggtgtaatctcttggtgttggagcgaataccacgccgccgcccttccactgaggagacctggttgaaccctgtcttgcatgaccggttcctttctgtctccacggctttctgccgccgccggaaacctcagaacgtgtctttgctttctgtgttccctgacgtttatttgcaagctgtgcaacaactgcaagatgtaccagatgctcgttaacttctacaccgaacacggcatcgttcagttctaatgcgccaacttctttaccttccatattgtaaacagatacgtttgccatttgtgtgttcctcctttcctataaaagcttacctttcaaccttaacggtttctttaattgttaccaggctcttctttggtcctggtactgcgcccttaaccagaatcaggttattgtcaacgtcaaccttgacaacctccagattctgaacggtaatctgcttgctgcccatgtggcctggcattcccttgcccttgaatacgcggcctggggttgtagcggaaccgttggaaccctgatgacgatggaacttggaaccatgtgccataggtcctctgtgctgtccgtatctcttgatggcgccctggaagcctttacccttggaaatagcggttgcatcaatcttatcgcctgctgcgaagatgtctgccttaatctcatcttttacggaatactcttccgcattctcaaacttgaattctcttacatatctcttgtaagaaacaccggccttgtcaaaatggcctttctgcggcttgctgaccagtttgtccctcttgtcaacaaaaccaacctgtactgctttgtaaccatcgttctcagctgtcttaacctgtgttaccacacaaggtcctgcctgaagtacggttaccggaactaaagcaccattctcattgaagatctgggtcattccgacttttgttgctaaaatcgctttcttcattgtcttacctcctgtttcatgatctacagcggaatgctttcgcattcatcctagaacagcctaatatacgtggaacactatgaaccgcctggcggtatgttgattcctcaacaggaaatgcagtgttgcttctatatttaaacccttcaggatataaacatttttatcgcatccccatcctattcaaacgggaaccgcgaacccagctgcgctgcgcttgcgcagcatgaaaacgaatctgtcttcgattatttcgttttcatcttgatgtcgatgtacacaccagctggcatttccagtctggacagcgcatcaactgttttctggcttggagctgtgatgtcgatgagtctcttgtgagttctctgctcgaactgctctctggaatctttgtacttatgaaccgcacgcagaatagttactacctctttcttggttggtaacggcaccggtccgctcacctgtgatcctgtcttctttacagtctcgatgatttttccggcggactgatctaccaactgatgatcataagcctttaaagtgattctcattacttgacttgccataaaaaaagtcgcctccttttcgcactttcaaaccaagtacgacaagcggtgactgtacacgtttccgtgtgtgtcctaacagaactccacactgattctgcgttctaacattgcagtttctttaattggtacagtgacttgtcgccagtttcctaacttgacattcgctccacggaaaacctg

SEQ ID NO: 3285 - DNA, 405 bp, Unknown
  gut microbiota DNA sequence
gactcctttgtggaggaggatatccgggccgtggtaaaagcctctgcaggcgcagtggtaaaggtcatcatagagacctgcctcctgacggatgaggaaaaggtaagggcctgccagctggcagtgaaagcgggggctgatttcgtgaaaacttctaccggattcagcacaggcggagctacggcagctgacgttgccctgatgcgcagaaccgttggagacagtgccagagtaaaggccagcggcggcatccgaacaccggaagacgctgcggctatgattaaggcaggggcggacagaatcggagccggcaacgggattgtactgatttagattgtctgccggtggaaatatgttaatggaaaaatgtcgataggaaactgccggcgcagaattgccgatggg

SEQ ID NO: 3286 - DNA, 15250 bp, Unknown
  gut microbiota DNA sequence
tgtcaattgaccaggaggaagaaaacttcttaaacggggtaaaggaagatatcctccgggctgccaaggttgttggaggagcgtgcacggaggaagagattgataaaaccatagaggaactgcgagaccagcttatggactatgtgggcatggcagccagggaacatggtggtgagaactggtacagcgaccgaatgcgaaagctgggattacagataagcgaattaaaaaggaggagagaaagcatacgagagcaggaaaaaataagggacgagtatgagtatctggaccaggaaatcagccgaatcataggtgagacaggcggggccacaggagccgaatttgataatatcttcatacggcagattgttcgggagatacgtgtgatatcgaaaaacaaacttcaaattcagctaaggacaggcatggtattggatgtgaatctgtgattaaaagtaaagaggatgttcgtattaataatagagaaattaaaataaaagaacaaagggaggccatgtatagatgccgaaaattgagttgagctttgatatagataggctggggcaggatgtcttgaaaagattatatgccatgacggacgaaatatttgagtctgagggtttgaaatgtgtagacaggggagtggtccgggtctatgaggatagagggagaaagaaggattatggacgtttttgggcggcgatttttgcgctaaaggaatcaccagagctttctgcgaatttaaaggaatgtatatggtacaatggttcagtaaaggaaaacctgattacaggcttcctaagaaattagtgcatggatagcaggcagaagaaagggataaattttgacctggatatggaagcgctgaaagaacatgatacaaaaaggggactgacatcatgcatgctatgatgtcaagaacttttggtagttttatatttcccattcatttatcagggaggcagagcggttgaataagccatgacagttacgatgccgggaagtgattctttatacatgtaggtatcttcggccccaaaataatgaatcgcataggttcgcagataaccgaataaaagaagagaaaggaacgtattgaggaacagaaaaggaaggaggaaaagtattaatacctggactgtgagaagattgcggacaggtatggattaacgggttatactcatcttatgaataagttattgaaaaggaattctggttttgatgtacgatattcttgacagaccatggctattttgttatagtcggatacgaacataaccgtatcaggtcacctttgggtttaacagctgcaaagggtgaaaagggaatcaggtgaaaatcctgagcgaaccggtcactgtaaatgtggagaaacctccggacagaccattgcatatatttgcgagaaggtggggggattgaagatgcataagccaggagacctgcctgataggaaaaacggcggcgctccagggtaagcggagccggattggggagtttcttcatggaaactctttgtttttgtattgtcatttgccctgaacagggctttttttgtacaaaaaattcgcctcgttcaactgagacggtgaagatgacaaatgccccaaataatcttaaaagaggagaaaaaggaatgaggaaaagaaacatgctgataccagctgtgatactgatggcgacactgctgtccgctggctgtacagccgggagtacgcaaggagtaacggagacagctgttcaggcagaaagcgcggtagaggagaatacagacgaaaatgcggaaacaaaagcattgcagtcagaggagaagtctacactggttctggcttatcccaaggaccttggggatatgaatcctcacaccatgtcttcacccatgtatgctcaggattgggtatatgatggactaactgcattggtaaacggtaaaattgtaccggagctggcagagaactgggagatttcagaggatggaaaaacatatacattccatttgaggaaaaacgtgaagttcagcgatggatctgacctgaatgcggagctggtaaaggaaaatatccaggatgtaattgataataaggatgggtactccttccttcagtgcctggaggagattgataccatggatacgccggacgacacgaccctgattatgaatttaaaaaatccctgcaactcattgttgtcggatatgagttttaataggccgctgacggttgcgggcagggcagcctttccggagtcagggaatatttataaggatggcgtaaagaagccagtgggtacaggtatgtggacagtaaaagagtatgtccaggaccagtatacaatttttgagagaaatgaatattactggggtgagaagccgtcattcaaatatgtaaaggtagaagtaatcccggatatggacacggttgtaaacgccttgaaagctggcgaaatcgatatgtatattgatgtaaatgatggtctttctgcggatgcgtattatgaactgggaaaattgggattcggtacccagatggcagagggcacgcaggtgacaagtctgagcctgaatacagcaggtgatatgctgggagatgtgagcgtgcgtcaggctttggaatatgcaaccgataatactgtgatttctgagtatgtctatggcagtctgcaaaaaccggcatcatcttattttgcggacagcgtaacacttacacagaccggtaccgatgggtatccatatcaaccggaaaaagcagcagaaatcctggagcttgcaggctggaatctggaatcaggcagcgattaccggacaaaggatggagttaccctggaagtggatatgctgtatgatactgtttttaaaaatggaaaaaatatcgggctggtgcttcaggaacagtataaaaaagtgggggtcaaactgaatatctgcgaggaggattctcaggtgttcaggaagaagtggaaagaaggggattttgatatgattctctacagttcctggggtggttcctacgaacctttcgccacactggccgccatgagaagcgatggagataagttcagtacggtacagaagggaatggacaataaggcagagctcaataaggttatgaacgaggcactgagtgagattgatgaggataagctgaaggaggattttacatatatcatggaatcctttaaggaacaggctgtctatataccgctgactgtgtcctccaccctggcggtatatgatagcagtcttaagggacttgacctgaccgatggcaaggatgtgatgccagtggggagcgtggtgagagaatagatatggccatttaaggtggaagaaatatggggaaatatatacagaaacgactggttggtatgatagtgcttttattcctggtttccattgcagcctttgccctggtgcggctgatgccaggagatgcagcgtttgcttacctgaattctatcaatgctccggtaacagatgcggctctggcaaaagttcgggcggaattagggctggaccggccggtcatattccaatatactgcctggctaaggcgggtggtgtgtctggatttaggtgtatcatttatgactaaaaagcctgtgtccggacagctgctaatcagtttccgatatacaatgatcctgacagccatgtccgctgtctggatagcggtactgtcccttccgttggggattatggcgggaaagcggccaggcagcgcgggagatcagcttataagagggattacgtttctcggaagttccatgccgtccttctggctggggttccttctggttgaattgtttgcgctgaaacttaagctgcttcctgtgcagggagcagagactttcagccatctggtgttaccttcagctacccttgcctgttcttatatcgccatgtatacaaagatgattagaggtgggattgtagagaatatgggcaggcggtatgcggtctatggcagggcaaggggcctgaagaagaatacagttttgtggagacatgtactcccaaacgcattaaatcctgtattcacaaccctgggattaagtcttggaagtatgctgtccggagctgtaattgtagagaatgtgtttgcctggccgggaatggggaggctgattgtcagcgctgttgctggaagggactatccggtcatccagggatatatactggtgattgcggtggtatatacactgcttaatttaggcatggatatattgtgtgcggcgatgaatccccagatccgttttgagggggaggagaggtgaggtggatttatgttccggaaattaataaaggacagggtatgtcttttctgcctgttcatgctgattctgtttgcaatagcggctgtattggccccatgtctgtccccaaatgatcccaacgagatccattatacagccaggtttgcaggaatatcaagcatgtttccgctggggacggaccatatgggccggtgtatattgtcgcgaatactctacggttccagactgtctcttggttatgccgttctgattactgtcatatcatctgtgacagggaccatgctcggcatgctatccgggtatacgggtgggctgccggaccggatttttatgggaatatgtgacgctgtgcgggcttttcccggtattgtcattgtattggtggtggtaagtcttctgggaactggactctttgaactgtgcctgggaatgctggctaccagatgggtctggtatgccagggtcgcaaggaatctgacaaaggcagagcgtgaaaaggaggctgtactggcttccaggatggcaggaagcagtttgttttctataatcacaacgttgatttttcctgctatccgtatgcagatgctgtctgtgacgaccattaattttggaactgccctgactgccctagcgggatattccttcctgggattcggggcggcgcctcccagcccggaatgggggatgatgattcaggacggacgttccttcataagcacggatccctccatgatgttctggcctggtctctgcattttggcagtggtgatatttacaaatggtttgggtgacagaattcaggagattgccggaaagatgaggagataagggcatgcatttacacaatcagacagagcttttgcggctggatgatatcagggtggcgttaaaggagggaaagagacgttttaccgcagtgaatggggtttctgtttctatatgtgcgggaagaaacctggggattattggagaaagcggctgcgggaaaacactcctatgccactgtatacttggacttttagatcaagacgagtgggaaacagaagggagcatactatttgaagggcacaggattatcgcgggaaaggatggcgtacgtccgggattttgcggtactgcagcgggttttatagcacaggatccggctggtgcatttgatccgcggatgacattgaggggacattttctggaaatggcaggtgtcttttcacagaaccgtcaggagatattggagcggacagcagcccttttaatcaggatgggaatccgggagccagagcgggtactgaaaagctatgcattccagttaagcggaggtatgctgcagcgggtcatgattgcccttgcacttttaggaaaaccgcgtcttttgattgctgatgaaccgaccactgcattggatatcaccactcaatgggaaattttaggcttgttgggagagctgaaaagggagcaggggctgacggtacttatggtatcccatgatttaagggtaatccagagtatctcagatgatctttgtgtcatgtatgcggggtatgtgatagagcagggcccggtatcagaggtgctggaaaatcctttgcacccttatacgaaagggcttttggcctcaaggcccgtattttcaaaagaagcagtccgggttatggagggatatccgccgggaatcaaagaaaaagtcccaggatgtcctttcgctgaccggtgtaaagatgctctgaaattatgcaggcaatcgtgtccaaaacttttaaaacatggtccggtgaatcatcaggttcgttgttttcgggccggggagggatgaggatgatacataagcataccatgctggaagctgatatgataagccgcagataccgatgtgcaggaaaaggacaagtgtatgctgttaataacctgtcacttaagattcatacaggagagtgccacgggattgtgggggaaagcggttgcggtaaaagtaccttaatgcgtatgcttgccgggatggaaacgccgagcagcggacagattctttacaagggggagcctgtagcattgcagatgaaaaggaagcggaatgaaatacagatgatatttcagaacagtatgaatgcagtgaatcagtatgcaacggccgaagagattattggcgaaccacttagaaattttacccatatgaacaaggtggagcgcagacagcagacagccgcactcataaaacaggttggtctgtccgctgcggaccttttaaaatatccggcccagttcagcggaggacagcttcagcggatctgcattgcaagagcgctggctgcggagccgaagattcttttgctagatgagcctttaagcagcctggatgtatcagtgcaggcacaaatcatgaaactgctggaaatgctcggaagggaaaatggacttacccaggtactggtttcccatgatttggaagcaatttattatctttcggacagcctttctgttatgtatggcggatggattgtggaagatattgaacatattgatatgtttagtacgctctgtcatccatatacaaaaaggctatttaaagcatgcggggccaagtactcagaatacattccggagaaatccggttacggaggaactgttggtggatgcccctatgaggaactatgcccggactgtgtggatgtatgccggagcaggacgccggagatgaaagaaatccaagaaggtcattgggtgagatgtcacaaagtgggctgactggcagatagaatataatattgaatttataataaagtatggaggtatgagatgttaaatattaaatacgatattgtggggtcatttttaagacctgggaagattaagaaggcgagacaaaaatatgcagacggcaatctgtccttggaagagttgagaaaaattgaagatgaggctattagagaactggtttcgacggaggtttcccatggccttgaatttgtgacagatggtgaattcagacgaaggtggtggcatctggactggcttaaggaatttgacggttttaccacaaagcatttggacaaggaacgcaacggtgtggtgaatcatatagaacttggatatattaccggaaaaatttcttatagtcaggaacgtgtgcatccggagattgaggcgtttgattttcttctctgcgaggctgaaaaatatccgggtgtgacagcaaaaaaatgtatttccggtcccaatatgatgctggtagataattatcttcagatggggattaaagaggtaccatattacggcagcaatataaatgcattgattgaagacatcgctcttgcatatcaggatgccataaaagatttgtatgaacatggatgcaggtaccttcagattgacgatacttcctggacctacatgattgatgaaaaatttttgaagaaggttgaatcccttggatataaaaaatcagaagtgctggagtggttcaagcgtgtttccaccagggctttggaagacaggccggcggatatggtgattgcaacacatttctgtaagggtaattttaaagggaatccacttttttccggtttttatgattccgtggcaccgattatcagccagattccttatgacggattctttgtggaatatgacgatgaacgttcgggttcctttgaaccctggtccatattaaaagggactggagcaacctttgttgcaggacttatttcaaccaaaaaccccgtattggaaagctacgatgagattaaacgaagatacatgaaggcgaaagaagttgtgggcgccaatatcgccttgtcaccacagtgcggatttgcttctgttgaggagggcaattgtattgatgaggatactcaatggaaaaagattgatctgctggttagatgcaaagatttcctgtaatgctgttatttttctattttgcaatataactgcgatttggggatgctgcccgcatccctgttgagaacatggggagcgccgctgggattttatatctgagcaggcgctttcagtgattatataaaaatttatacggaaaaagattgaagaatgtgtccggcttcaggaagaaatcggcctggatatactggtacatgggaaatatgagcgcaatgacatggtggaatattttggtgagtgtctggatgaattcctgttcgcggaaaagcatgggtacagtcctaggggacatgatttataaagccttctattgtctgggagatgtatccagaagccggcccatgacagtagaatacactgtatatactcagagtctgacagaaaaaccggttaaaggtatgctgacaggtcctgttacaatatttaactggtccttcccacggtgctggaatagacttggatgtggcatttattctatcaaagttgtttattatgcttaggtagtttaggtgccatttatgatttctcctgcatatagaaaaacatataccgttatatgggttttagatgtgaataaaaaaagatataatgttaaaatataacaaaagatatcatggacaaacataaaaaaatagcaatattcacaaaaggaggtagtacatgttaggggaatcattttacaaaaaggcggatgaaatcattgagatgcatacgcgggaggagcggtcgctgataccaatcattcaggacattcaggaggaataccggtatctgcccccggaactgctgacatatgtggcgaaagagattggcataacagaggcaaaagcttacagtgtagccagtttttatgaaaatttttcatttgaggagaaagggaaatacattatcaaaatatgtgatggcacagcctgtcatgtaagaaagtcaatgcctatcttggattatctatataagacgttaaaactaaatgcgaaaaagcataccacggaggatgcactttttacggtggagaccgtttcttgtctgggagcctgcggtctggctccagcgatcaccgtaaatgagaaggtttatcctaaaatgtcacctgagaaaatgaagaagctgctggaagaaatcaaacggggggagccagatgcgggttgaggacagaacacaattagaaatgctgcagagacagtgcagggacagaaaggatgggtatacttgcaggattctggtgtgcgcaggaaccggctgtgttgccactggttctctggatgtgtatagtcaactgcgggaactgtgcaaagaggacgagggcatacgcgtggagctggaaaaggacgttcctcatatcggtatcgtgaaaagcgggtgccagggtttctgtgaattaggtccccttgtgaggatagagccgcagcactgtcagtatgttaaagtgcagcctgaggactgtgaggaaattgttgagaaaacggtaaaacagggaatacctgtagagcgcctgttctacaaaaaagaggggatttcttacggagcagtggatgaaatcccatattttgcccgtcagaccagaatcgtgctggaacaatgcggaaatattgatgcagaatccgtggaggagtatatggctgcaggcggatttagcgcgttgaaaaaagcattgtttgccatgacgccggaagctgtgattgcagaagtagagttttcagggcttcggggacgcggcggcggcggatttccagcaggccggaaatggagacaagtggctgcccacaaagaggagccccttaagtatattgtgtgcaatggcgatgaaggggatccgggagccttcatggacggaagcgttatggagggagacccctgtcgccttatcgaaggcatgatgctggcaggatatgcagttggtgcatcggaaggcttcatctatgtacgtgctgagtacccattgtccgtggcaagattgaggcaggccatagggcagatggaggaaagaggactgcttggagattccattttaggcactggtttttcattccatctgcacatcaacagaggggcaggcgcgtttgtatgcggggaaggcagcgccctgaccgcatctattgaagggcacagaggtatgcccagggttaagccgcccaggacggtggaccagggtctgtggggaaagcctaccgtgctcaataacgtggagacgtacgctaatctgccgggcattattgtcaacggagggaaatggtttcgcactataggcacaggaaacagcaccggaacaaagactttttctgtcactggatgtattgagaacacgggcctggtggaggtccctatggggacgaccctgcggacaatcatttatgatatctgcggagggctgaaagagggaagtgaattcaaggcagtacagattggcggaccgtcaggtgggtgtcttacggaagaacatttagatgaacccctggattttgattctgtccagaaattcaatgtaattataggatccggtggtttggtggtcatggataagaatacttgtatggtggaagtggcaagatttttcatgaattttacccaaagggaaagctgcggcaaatgtgtaccgtgccgggaaggaacaaagcggatgctggagatacttgaacgaattgtggaagggaaaggggagccagatgatattgaacggttggaacaactggcggatatgatatccaacactgcgttgtgtggacttggaaagagtgctcctcttcctgttatcagtaccataaaagcattccggaaagagtatttggaacatattaatgagaaaaagtgcagggcaggagtctgtcagagcatgaagacgtatataattgatgaggaaacatgcaggggatgttctaaatgcgcaaagggatgtccggcaggggcgattgcaggagagttaaagcatgtatttacaatccggcagcagcagtgcattaagtgcggggcctgtgcggaggcatgcccatttggtgcagttcatatccaatcatagagcataggggggcagaaaaaattatgggatttatgacaatagacagaatacgggttgaatttacggatgaacccaatgttttatctgtgattcgaaaggcagatattgatattccaacgctgtgttatcattcggagttatccatttatggagcctgcaggctgtgtacggtggagaatgaacgagggaagacatttgcatcatgttccgaacctccaagggatggaatggtcatttataccaatacgccgcgtctcatgaaataccggaagatgatactggagctattacttgcagctcattgcagggattgcaccacctgtatcaagagcggggaatgccatttgcaggaattggcccaccgtatgggagtgactcatgtaggttatgaaaatacaaaaacgcagtatcccatcgatatgagttctccggctattgtgagagacccaaataaatgcatactctgcggcgactgcgtccgcatgtgcgacaatgtacagtccgtcaatgcaatcgattttgcctatcggggaacggaagccctggtgacacctgcctttaacaaaaacattgcagagacggattgtgtgaattgcggacaatgcagggcagtctgtcccacaggcgcaatcagcatcaatactaatattgaagtcatatgggaggcattggctgacccaaatacaaaggtggtggctcaggtggctccagcggtaagggtggcagtaggagacttttttggtatggcgcggggagagaacgtgatggggaagattgtaaatgtgctccatcgtatgggatttgatgaggtgtttgatacggcctatggtgcggatctgacagtaattgaggaatccaaagaatttctggaacggttggtttcgggaaaaaaccttccactctttacttcctgttgtccggcatgggtaagcttttgtgaaaaccggtatcctgagttcaaacaaaatctgtccacttgcaggtcaccccagcagatgttcggtgcggtcatacaggagtattacaggaatccccagaaaagtggtggaaagaaactactgtcagtatccattatgccgtgtacagcaaaaaaggcagaaatactgcaggaggaatccaagacaaacggaaaggcagacgtggactatgtgctgaccactacagaactggttacgatgattagaaagtcgggcatcagatttgaaaacatagacattgaatcttcggacatgcccttcgggattggatccggggcaggtgtcattttcggaaacacaggcggagtaatggaagccgttttgcgccggttatgtgaagggcatgacaggacagagatggaccagattcggtacagtggtgtaagaggggaagagggattgaaagagattacttatgattacaacggaaggaaaatacgggcagccattgtaagtggtcttgcaaatgcagacatgctgatgaagcgtatcgggaacaaagaagcggagtatgattttgtggaggtcatggcttgcagaaggggatgcatcatgggcggcggtcagccggttccggccggtccaaggaccaaggcggcgagggcaaaggggctgtatgacactgatatcaatacacagataaagaaatccaatgagaatccccttgtgctttccttgtatgagaatatcctgaagggaagggaacataagctgctgcatcgcaatatggcaatgggagacattcagggctagaaggattctgtcacatttaaaccggattaggtggctgcaggtggaaaaaaggtgcggaatgtgttatgcttgtaaaaagcattggagggagttatgaatctgacagacttagaatttgtgattgcagtggaacggcatggttccatctcaaaggcggccaaggagttgtttgtggcccagcccaatttgagtaaggtaatcagaaccttggaaaaagaattcgggattgtcatctttgaacggacctcaaaaggagtggttaccaccagcgaggggcaggcattcattcaaaaagctaagaatatcatgaaagatgtggcctccttgaagggcgagtttgaggatacggcggtaaagcaggaaaagctgaggatatcggtaccaagagccagttatattacatatgcatttacaaaatatgtaaattcaatcccccatgagagccagctgtccatttcctttgtggagtgtaattccactacggccattaataatatattgtcgtccaaatatgggttggggattatacggtatgagatgacatacgaggattatttccttatgttcctgcagttaaaagggcttcagcacgaaacggttatggagttcgattaccagattctcctgtcagcggacagtcccctggcattgtatccggtcattgcggagaaggacctggatggttatattgaaatagtccacggggatacccagctccccagcggtgaatatctggagctgccgccggacggtggccgggggagccaggccgaccggatttacgtgtgcgagcggggaagccagttcgaccttctggccatggtgccccatacatatatgtgggtatcccccatgccaaagcagacattggagcggtatggcctggtccagagaagcagcgcaggcaggcccaggaagatgaaggaccttttggtgtaccagatggaacacagaaagaaccgaagcgagaaggcgtttattgagatgctgaaaggtaccagggatgaaattatgacacctgcaaagctataagggaaaatatataaaaaaagagtgaaatggatagaaaaaaaagaaacagtatggtgattgtgctgtttcttttttgttgtaattgtgtaaatggcacaaaaaatagagaatatctatacataaaatatataggtcgcatataatttataaatgtgaaataaataacaaaccgtgttatagttaagatatcaatagtgataaatgaaaggagacatctgaatggaacggaaaacagcgctttacgattgtcatgtggcttgcggagggaaaatggttccctttgccggttattcactgcctgttcagtataagactggggtcattaaggagcatatggcagtcaggacacaggcgggattattcgatgtgtcacatatgggagaggtattgtttgaggggccggatgcactaaagaatatcaactacatactgaccaatgatttcacaaacatgtatgatggtcaggtccgctacagcgtaatgtgctacgaggacggcggagtggtggacgacctgattgtataccgttatagccaggagaaatatctggtggttgtgaatgcggcaaatcgtgaaaaagatgtcaattggatgaaggaccatctgaatggggacgtggtatttacagatatctcggacgaattatcccagctggcaatccagggtcctaatgcagatgccatcctgagaaaacttacaaaagatgaagatattcctgaaaaatactacagctttgttccggaaggcattgtaggcggcatcaagtgcatcgtatcccagactggctatacaggtgaaagcggctacgagctgtacgtgaacaatgaggatgcacctaaattatggaacatgcttctggaagcaggggaagcagagggcctgattccatgcggactgggagccagagatactcttcgtctggaggcagccatgccattatatggtcatgagatggatgccgccattcacccattggagacaggacttaagtttgcagtgaagatgcagaaggatgatttcatcggaaagaaagcactggaagagaagtccgtcctcacacgcaagcgcgtaggccttaggatgattggaaggggcattgccagggagaatgagaaggtatgcgcaggtgacagggaagtgggatggacaacatcggggacccattgcccattcctgggttatgccatagcaatggccattctggatttggattgtacggaaatagggacaaaggtggaagtggaggtccgcgggcgccgcattgaggccgaggtggtggccttgccattctacaaaaaagcaaaataatata

SEQ ID NO: 3287 - DNA, 1112 bp, Unknown
  gut microbiota DNA sequence
agatgagtcatcccgagaaattcggaagctgcgggtagcggcatactgccgcgtcagcacggagctggaacatcagcagtccagttatgacatacagattgagtattataccaggcacatcatgcagaaccccaactggatattcgtcggtgtctttgcagatgatggacgcagcgcgaccaatacctttcgtaggtatgattttaatcagctgatggaccagtgtctgaaggggaaggtggacatgatcattacgaaatccatcagccggtttgccaggaatacggtggactgcatctcctgggtgaggaagcttaaggaaaagaacgtggccgtgtacttcgagaaggaaaaccttaacaccctggatgactcaactgaaatgatactgaccatcctgagcagccaggcacaggaggaaagccgtgccatcagcaccaacgtcaagtgggggtatgcgagaaagtttgaaaagggggaatccataagacagagaagttatggattcaggaaggcgccaaccggagagatgtgcatcatggaggaggaagcggctgtgatccgaaacatggcccggtggtttctggacggggacagcctggaacgaatcaagcacagactggaggacgcagggatagagaccaccacaggtaagaaaacatggagtacgggtaccatctacaacatactgaccaatgaaaaaatcatgggggatgtgctgttacaaaagacgttcacagcggactacctgaccaaacggagggtgaagaactcgggccagcagaagcagtactatgtgaagaatcatcatgaggcaatcatcccgaagaccgtctattataagatacaggaggagattgcccgacgctcctcgttaaaaaaagccggaaccaggaaagggaagacggcccagggcgtatatagttctaaatatgcactgaccggaatcatggtgtgcaatgaatgcggagcccattaccgcaggacaacctgggcaaaaaatgggaagaaggtaatcgtatggcgctgcatcaaccgtctggagcatgggacgaagcggtgccatgaatcccctacgttaaaagaggaggtcatccaggaagcaatcatgg

SEQ ID NO: 3288 - DNA, 2761 bp, Unknown
  gut microbiota DNA sequence
gcaggacgataccggctggtggtatcagaatgaggatggcacgtatgtaaaaagcgaatggtcctggatagaaggaagatgctactattttaatgaggatggctactgtctccaaaacacccaaacaccagatgggtacagcgttgacatgcagggggcctggattgaggacggagtggtgcagatgcagcaagaggttcagacgcagatgcaggaacaggcagaggtgccccaacaggagccgacaggtgtgcaggagcagggccaggacagcggcgcaataaaacagattggcaatgtgcttctcacagttcccgaagaatttgtatttcattcctctgatgagaggggaatatatatgaccagtgtggacggcagcagccttatctgcatcatgtcagaatccctcgcggactttggcggatatgcagacctggtatacacctaccaggaaagtgtactggatgcagctgtggaagcagagttggggacaccccagaccaagacaaccaggcagctttcaaacggactctggtacagttatcattatatggatgcatcttccctgggcatccccggatttttgaaggtttatgccagaatcaatggagacagactgcagatggttatgttcggcggttctatatcgtccctggatacggaggaaataatgaacagcttgacctttttgtgacaggaagccttgacagggagaagggattattgtatgatgcaagtgtacacttgcgctttggggagggtgatatggaccagacaggacagaatattatagatgcagccatggaacttgtagtggagagaggatatacagctaccactacaaaggatatcgcaaaacgtgccggggtgaacgagtgtactatcttcagaaaatttaaggggaagaaggaaattgtgcttcaggccatgggacagaaaaggtggcatccggatttggaaccggatgattttatgattgagacgggtaatctgacagaggacctgtgccaatttgcccgtatttacatgaaaaaagttacgccggaatttgttaagctctccctgggactgcgtacaccagagctggcggaggatacaagggaagggattttagccattccccaggtctttaaaaccggtgttacggcatatttcaggaaaatgtatgagaagggaaagctcatatcggatgattacgagagtatggccatgatgtttttgtcgttgaattttggatttgtattttttaaggcctcttttggcagcggcctgactgagatgaaagcagatgagtatattattaaaatggtagatgcgtttgtccatggagtggccaagtgaatgcataaatatatggtaccatacggtgccatttatttttaacagttatgcaagtggatacttgcgtcgaaaggagaagatatgagctgttactttattatttctgttttcctggagccaggaaaggaccgggcagattatgacgattacataaaacgggtcaggcctattgtggaagaacacggaggaaggtatgtggtgaggagcgaagggattgaatatatagggaaagactggcatccggaccgcttcattatgatatggtttccggacagggagagcatagaccggtgtttttcctcagagaaatacagaaaaatcatgagtaaaagggaaaatacagtggacagccaggccattattgtcacggcaggggagaggtatggggataacagtggtaagagagagaggagaatggaatgaagataaatgacagagttcatcagctgcgcgttcagtttaatattacacctgaaatcacaagatatgtctatgtgtatatcataacaggaaagaaaggatgttacctggttgacgcaggggtaaaaggatgtgataaaaaaattgaggaatatatacataaaattggaaaaaacagagaaaatataaatgctgtactgttgacccattcccatccggaccatattggtgccctaaaaaccataaaggaaatgtattcctgctacgtatatgccagcaggggagagcgggattggattgaggatatagatcttcaatatgagaaacggccgataccgggcttttatagtctggtggatggttctgttacggtggaccgtatcttgtctgacggggatctgctgtgcctggaacctgggattaccattcaggtaataggcgcacccggccattccagagagtcattgtgtttttattacagggagcagaaaatactttttaccggagattccataccggagccatcagacgctttgatttatgatgactctcatgccagtgaggaaacattaaagcgtctggaacgattggaggaagttgatatgtattgtccagcgtgggataaggtttatgacaaaagaacagggatagccatgattcatgaaggactctcaaggatatccaagatcaggaggtgtacagaaggatacagaggaggtatggggaaagaaagtactcagaggctgtttgagctgatatgcgaggcatgtaatatggctgaatataaaaagaatcccttgtttatgcgttctgtcatgtcggatttaagccggttaaaccaggggaatcatagggattgaaacaggttggatatagaaaaatgcaaaaaatgaaaaaagttgaaaaaacctgttgacatttgttgaagcatctggtaagatatctcttgcgctgcggtgagtaccaaaagcgcaagagaataagaaataaaaaaatgaaa

SEQ ID NO: 3289 - DNA, 9827 bp, Unknown
  gut microbiota DNA sequence
gctgcacagcctgtcaattgaccaggaggaagaaaacttcttaaacggggtaaaggaagatatcctccgggcggccaaggttgtaggaggagcgtgtacagaggaagagattgataaaaccatagaggaactgcgtgaccagcttatggactatgtgggcatggcagccagggaacatggtggtgagaactggtacagcggccgaatgcgaaagctgggattacagataagcgaattaaaaaagaggagagaaagcatacgagagcaggaaaagataagggacgagtatgagtatctggaccaggaaatcagccgaattataggtgagacaggcgggacctcaggagccgaatttgataatatcttcatacggcagatcgtccaggagatacgtgtgatatcgaaaaacaaacttcaaatccagctaaggacaggtatgatgttggacgtgaatctgtaaacgagagaaggattagaagatatactgttattaaaatggaaatcgtttgacaggtgtttgacaggccctggaggctaatattgctaatgggtacccggaatcataaaatataagaacaaccgtaggctataaagaagaattaaaaacaataaggtttttgtaaatgataaatggaattgacagtatcaggaagggaggacataaagatgttcaaagttaagttgagctttgatacagataggctggaacaggatatcctggaacagctttatgataaagtggacgaaatatttgagtctgaggatttaaactgcgtggacagagcgttggtccgagtctatgaagataaagggagggatgaggattacggacgtttttgggcggcaatttttgcactgaagcaaacaccagagcttgctgagaatttaaaggagtgtatatggtataatggttcagcaaaagaaaacctgcttacagggtttctaaggaattagtatatgaatagtgggcaaaagaaagggataaattttgacttggatacaaacgcattgaaaataactatacagaaggggactggcgtaatgcataccatgatgtcaggaacttttttaagaaaaatggcttggaacatatccagggctcaggatatcatacccttatgccgatgtcagaacctgatgtaatgaccatcgtgtatcggatgacaaaaagatttccatggattaattactgtgtaagtgtttgtacacttgcagatgttccggaagcgtttgatatttcgcatgtctttgtccgggaggcagagaggctggacgaggctatgacgtctacgacgcagggaattgatactttaagcatgtaggtaatgatgtccctcaatgatgaagcacatagtatcttggattaatttggttaagaattatatcatccatacaatagggaatatgcggatggtgtcagctatccatcgttttgacggctatttttttgcttttttaaccattttgccagcttcttcagattcatgcacgcaaacatcagccctgctttcatctccatccgggccttccctatcatctgcgtataccggaagcaatgattctcttttgctgttccaaacaatctctctatggtttatccgcagcgcatatagttcgttcattcctgtggaatgacgaatatcttcgcacatctccatgtatggtacccagatgtggcgcgtcaccgtttttacatggtcgcggctccctgtattgggaaagataagggcagctttcacacacatgcccacagcttttgtactcccgatactcctcacagtatgttgctctgtattccaacacttcgttattcggacaaatattacagttggccgtcctgcatccagagagtatttattccggatcagaccgtagatgaaactccaatcagttgctttatcaatcaatcgaagcggatgatccggagaaaaccaagtcgtccacaaaaaacttttgaactgtcttccatgttttatttaccacaaaaaatcaaagaaacaccataaatgaacctattacaaacctggcgccaaaggattagaataagcatacaaggaaaagaaaatgaacgaaaggagaggagtgtatatggctgcacaaacactttatctgggtacggtgctgacggcgggactgctgtcattcttttcaccctgtatcgtcccgctgcttcctgtatatatttccgttttttccgcgggcagcggggcggcacaggaggatatttttcagagaaggatacggacattgtttaagagctgcctgtttgtagcaggtatttccacctgttttatcattctcggtttcggggccggggcattgggatccatcataggaagcagtttttttatgattgcgataggattgattgtgattgtcctggggcttcatcagacaggactgattcatatcaaatggctctcctatgagaaaaaagtgaatttaaagcgttctcatcgaagcgattactttggtgtgttccttctgggactgacattcagctttggctggacaccctgtatcggtcctgtgctgggtgcaatcctcgtactttcggccacaagcagccggccgttctatggcggttttctgatggctgtttattccctgggcttcctgattccatttctgatactggcatttttttcagatgtgctgctgcagagaataaaaaagctcaataagcacttgggcaaaatcaaagctgcagggggaattgtcattatcatgatggggatactcctgatgactgataatctggataagatattaatgctgattaattaaagaagaaagggcggatgatactatgaaacgaaaacacttcatcataccggttctgtgcctcgcgttttttgcatttgccgcgtatggcgccaggaaaccgcgaaatgcattccctatggtaaatagtgaagagatgggcagcggggtggataggaacatggatacaaaaaaaatgaataagggtaatccggcgcccgattttgagatgatggatttaaatggaaatacggtaaaactgtctgactttgccggtgagaaggtctatatcaagtattgggcctcctggtgtccaatctgtctgggcgggctggaagacatcaacactctttccgcagaggacaacgggtttaaggtactgaccattgtagctccgggcagcaaaggggagaagaacgatgaggactttaaaacctggtttgccggtgtcgaacatacggagaacatcacggtattgctggatatcgatggcatatatacaaacagggcaggcgtccggggattccctacctccgagtatatcggttcggacggtgttctcataagcctggctccgggccacgctgataacgaaaccattaagagtacatttgaggcaataaactgattaaaaacagcggatcgacgcgaaaggagcagatcatgaagaagaattcagtaagatcagccggagtgtttcttttggctgcggccatcctcacattggccgggtgttccgcctctgccgccgaggcaggaatggcggccggcgccaaaagagaaacggaaagtctgtccatggatgatagcgtgatgaacagcggaaaggagaaaaaaatgacagcagaacaggaggacatgatgataagtggggaggatttacacacgatttatttggcgggaggatgcttttgggggattgaagcttatgtaaagaagctccccggtgtgagcagcaccgatgtggggtatgccaacggaaacacggaaaatccgtcctacaaggaggtgtgctacaacaacaccggccacgccgagacggtgaaggtggtttatgatacctcccgcatctcaacggatcagctgttggatggctttttcaaggtggtggatcccaccagcgtaaatcggcagggaaatgaccgggggagccagtaccgtaccggcatctactacgtggatgaagccgaccaggcaatcgccaaagccgccgtggccagacaggaggaaagatacagttcccccatcgccacagaggtactgccgctgagcaacttctatatggcagaggactatcatcaggactacctggataaaaacccgggcggctactgtcacatcgatttaaatgacgccgacgagttcatcagggaaagcggacttgatatggctgatgtggccagcctcataaaagtggaggattatcctgtaccgagcgatgccaaactgaaagaaatgctcactgatattcagtacagggtgacacagatgggagatacagagcgtccttatacgaacgagtatagcagtacttttgaaaaagggctttatgtggatgttgtgaccggagagccgctgttcagttctgttgataagtttgaatccggctgcggatggcccagcttttccaaacctattatagctgatgtggtaaaggagaaccaggacaccagctttaacatggtgcgcactgaggtacgcagccgggccggggatacccatttaggccacgtctttgacgacggtcccagggagttaggagggcttcgctattgtatcaacagcgcttcaatccggttcattccatatggggacttggaggcggagggatatggatttttaaaatccattttcgactgatacggtacgatgacctgagaattcacgattataaagactttgaaatgtttgacaccggggctggcggtcttgtaccgttggtcccggcgttgtataatagacttaaaaacagctgttaaaaacagttataaacgtgccatgaaggaggaatcggtatgtataacctgctggttgtggacgacgagagcattctccgccgtggaatccgggcgttcatcgactttgacggtcttggaataggagaatattttgaggcggaaaatggtgaaggtgctttgaaaatcatagaaaccagccaggttgatctcattctggccgatatcaatatgcccaaaatgaacggtcttgagttctgcagacaggcaaaggagcgggaccctgcggtaaaaatagccatacttacgggttatgactatctcgattacgcaatccgggccattaaaattggtgtggatgactatgcgttaaagcccctttcccgtaacgatgtgcagaaactgcttttccgcctgattgaaaagaaaaaggatgcggaaggttttgccgctgtgcgccaggcggttggacagttggcccggattgcaggcagtgacagcgatgcgggggtaaaaggtcagttggccgatgtgctggaacagcatctggccgatcccggcttctcccttggtgcgatggctgagcagctgggctacagtctcagctatttaagtacgctgtttaaaaagacttttggagagaatttcagggattatctgcttgatctccggttggaacgggcaaaaatcctcctcctgtccacagagatgaaaaactatgagatatccgcggcggttggaattgaggatcccaactatttcagcgtctgtttccgtcgtaagtttcagaaaacgcctaaagagttcagaatgggggcgggacatggcaggtaaagcaaaaaaaatcagcattaagagctggttccgcaggttcggtgtgcagatatccatgttttatctggctgccggtctgatgattgtgatggtgctcagcggggctatctacttttttgcggccaatctgatgatggatgaaacggttttaaagacacgtgatcagctggagatgagcggtgccaatatttctacctacattgcccgaataaaaggggagtccaatgtctttgcggcggatcccatgctccggcaatatctctccggaaaggaagatgctccggagccagatctgatggggcagattatgacgattcttagtaatgatgcttacatcaagtcgctcgtggtggtgtccaaggatgggcgcatcctttctaatgaggaaaatctggatatgtcggtctctgaagatatgatgaaggaaggttggtacacggatgcaatccataataccatgccggtgctcaccggcgccagaatgcagagtttttccgccgacaaggacaattgggtaatctccgtgagtacggaaatcacggacagctccggtgaaaaccttggcgtcctcctgatggatatgaggtacagcgtcattgaggaccatttgcgcagattaaatcttggaaaagaagggtatgtttttcttttaaacgataagggggagccggtttatcacaaagacaccagctacttttctgatcccgaaaagaagcggcagcttttggaaatcctgaaagcagaggacgtttataataagaggcagaatcaactgacttaccggaccaacattgaaaatgccggctggaccatggttggcgtggtttccctggataatctgaaaatgctggagcagcagctgtttgaggcattacttttaaccggcggtctgctttttctggccgtgctgttcattggaattctttttacacggcgattagccgctcccatggctgatttagagcgtgggatgagtgaaatagaaaaactcacggagatttccgtgcacaggaacagcttttatgaagtggaacttctggcgggaaattataaccgtatgatacgccgtatccgggctttgatggatgagattaaggagaaagaagagacgctgcgccattccgaattaaacgtcctggtcagccagattaatccccatttcctttacaataccctggacacgattgtctggatggctgagtttaatgacagcgaaagagtgatagcccttacaaaatccctggctgctttcttccgcctctccttaaacggtgggagagaactggtctccgtggccgatgaactggatcatatgcggcagtacctctatatccaaaaggagcggtatggagataagttaaactatgagattggcgaagcagatgagctgtcggattatacggttccaaagattattcttcagccggttgtggagaacagtatttaccatggcatcaaaccattggacggtcccggctatgttacagtgacagtgaaggagatgggtgaaaggctcatattcacggtggcggataacggggtgggatttgatcctgaagagccgcagaccggtaagaggaaagggaaaggcagtgtgggcctgaaaaatgtggacgaacgccttaaactttattatggtccggattatggcctccagattgattccagccccgggaagggctgtaccgtctatctcattgttggaaaaaagatactgggtgcaggtgtctgcatatctggtgcagaggatgctgagggttatataaaataggaaaactgcaaaaaagtccgtcacacgggcaaaaaataaaataataaaagctatcacatgacaggaaacgccgcccaatggagagaaggggcggcgttttccgttgtgaggcggaaagaaggatcactcttccgccctgccggtaaaccctgattcctgttgtggttacaacgcagggcagcagcgaggcggacgaggtggcggcgctgtcctatagcgctgccgacttcgtgtcaaagccctaccggccggaaatcatcctgcaccgggttgcgaatatcatcaacctgagggagaccgcagccatggtcaacgagctgcaatacgaccggctgaccgggctcttcagcaaggaatacttttaccgctgcgtcagggaccagctggacgctgcgcccggaaagatgtacgatatcatctgctccaacatcgagaacttttactggcaggcagtatttttttgaggtgaaccatgggaaaccgtgcaatctattaaattattgaaaatagtgggagccatatctttaccgcccacaacagcgcaaacgccctgttcccgttgttgcggctggcacaggcaattaacaggccttagtggctgatattgctaataggtacccggaatgataaaatataagaacaacagtaggctataaaaaatagtgtcggattcagtttgtacgatcgggttcatgtaaagacaacggggctggaaaggctgatgattagggcgtttgacggctcttaccagcttgcattgtaaaatatttacagatcataatataaccaaaatcccgcccgattcccaccctgatttcataaggactcagggcacaatataaaaattgatgaagcaacttgacagatttgatattaaaatttagggtataggaaacaagaatattcgccttaggcggaaaaggcgaactcgacaaatcggaagctatggaggggaattcgtatggaggatgtttataaaaattgtcctatctatgaagataaggattacactttaagattggttcggctggaggataaagtagatttactaaaagtttattctgatgaaaaggctgtaccattttttaatggtgataattgtggcggtgacgattttcattatacaactgaaaatagaatggaacaggcaattgaatattggctttgggagtacagcagacaaggatttgtacgttggacaatcgtttcaaaagcagcacatgaagcaatcggaacgatagagcttttccacagagaagggggtgattatttcacaaattgtggtttgcttagactggatattcggagcgaccacgaaattcaaagtgagattatacaaatcctagcgttgataattgaacccacatataccttgttccattgtaataaaattgcgacaaaagcgattgcgttagcgacagaacgtatcaaggcattacatattttggggtttgaacctacggatgaaaaattggtagggcatgacggaacaaagtatgattcatattttgtagtgaaaaagaattagtaggactttaaatccgagtgtgtgaataaaaggacctattgacaaataaattcttttaaatgttttccggattttttgatatttaatttaaatcaaaggatgataaatgggctccttaagccacctttatcatcctttttaggttcaatgacgcagcagaaagcaggcattcttcacctgttttatgaatgcctctcttttttattgtcttcaggttgtgctctcgctttaaaaccgcaaaagtaccctctgaccaaatttttctaagcctcatcatacacagatattcagctgtttcatatttctgcttgtttcgataaaaagcaggataattagcactggcgttgctccgtatacttcccttatctatctcacgatgcgatagcttaggacactcaatgtatattttgcgtggacacatatataaacaatagtggttctgagtttcaggtgggctgctttatggactgtgtgccagaggcgtctcttatggcagagaagctgaccgggggactccgccggctggtgattgagaaatgtctgggaccgggaggtatacaaatgaaggcatctgtaaggggggaaatccaacggggtaagatttgcggaaaacccttaacaggcggggaaaaacggggacggttccgcgcttaaatgtacccagggagggagtgaaccgggtagggaaaagagaaagatggaaaactgggaaaagaaagaccggacatttgcggaagccgataagctcttgattaaccagagtctggaaaccattgacgggaattttgataacctgcccaccacgcacccggctaagaggccgtaccagaagtatggcagcaattacaatcgtaaaatcaataaccagaaaaaagtcgttaagaatccggtgtggatgacaaatctcagaaaaagagcctgcagttattgcaacgagcttgcagcagtatacggtgatggatacagccctgcggtg

SEQ ID NO: 3290 - DNA, 265 bp, Unknown
  gut microbiota DNA sequence
acctggatgccatcctgcagcggttgggagatctggaagcccagatggaggatttggaggcagggcgcatggtcatccccatggcagctgtttatcaggaggcaggcagcgcgcctgccggaccggcgccccggaccggagccggaccgggggcggatggggcaacagtaccccaggcagctgcgccgtatgatccgggacttcaggcagatcccggggctgcacccgaaaaggtggctcttccccaggcccagctggaagacct

SEQ ID NO: 3291 - DNA, 5744 bp, Unknown
  gut microbiota DNA sequence
tccgggacttcaggcagatcccggggctgcacccgaaaaggtggctcttccccaggcccagctggaagacctgaagctggtgagaaacgaatgggccaagatagtccgcagcatgggaggcggcgccaggtcgtatctgcgggacactgtggtggagcctgggggagaaggctgcctgaccatcgtgtttatggatcccatgaactacgatatgggtaagcggcccactgtgataggggaactggagcgctatgtggaagctaatttcggcaggtccatttactttaagacaaggttggccggccgtggggagcgccttaatacgatttatgtgacccaggaagaattggaagaaaagattcatatggatattacatatgaagatgaataatataaagatgaataagtggaaataataggaggataatacaccatggcaaaacgtggcggatttccaggcggaatgcctggcaacatgaataatcttatgaagcaggcgcagcgtatgcagcgccagatggaggagaccaccaaggagcttgaaaataaagaatacacggctgcttccggcggcggtgcggtcagtgtgaccgtgtccggcaaaaaagaagtggtatctgttaagctgtctcccgacgtggtggacccggacgatatcgagatgttagaggacctgattgtggcagccaccaatgaggcattccgccagatggaggctgagagcagcgaggccatgtccaagctgacaggcggcttaggcggagcactgggcggaggttttcccttctaatggattattacagcagtcagattaccaagttaatagaggaactgtccaagctccccggagttggggccaagtcggcccagcgcctggcatttcacattatcaacatgccgaaggagcaggtggaggagctggcgggagccatgacaggcgccaggaataacgtgcgctattgtaaggaatgcttcaccttgacggacaaggaattgtgccctatctgcagcagtgacaggcggaatcataagaccattatggtggtggagaataccagggatttggctgcttatgagaaaactggcaaatacgatggggtttatcatgtgctgcatggcgccatttctcctatgctggggattggcccgggggatataaagctgaaggaattgatgcagaggctccagtcggatgtagaggaagtcatcattgcgaccaattccagcctggaaggcgagaccacagctatgtacataagcaagctgataaagcctacagggattaaagtgaccagaattgccagcggagtacccgttggcggagatttggaatacatagacgaagtaacacttcttcgggcattggaaggcaggacggaactttagacagcagatttccataccgggaactagcgatagggagatgcaaaagatggataaatacgagtttaacataaaagttgagcagattaagaagatggtaagccgcggggactatgaaacggccatgaagatagccgataccatagactggcgcagagtgaggaatgtaaacattctgtccatggtggcaaccatctatgagaagaacgaagagtaccaggaggccaaggatattctgctgctggcatttgagcgggcgcccataggaaagcgcttgctgttcaagctggcggagctggctatcaaggagggcagtttccaggaggcagaggattactacagggagttttgtgatctggcgccggatgatcccagacagtatatcctgcgctacctgattctgggagctaagggagcgcccgcggagcagttgattcataccctggaacagtactgcaacattgaactggatgaaaaatggatctatgagctggcagagctgtatgcggaggctggtatgggagaactctgcatcatgacctgcgataagattatgcttatgttcggccttgggaaatatgtggagaaggccatggagcttaagatacagtttgcgcctctgacaaagtaccagatggatctggtggaaaacagggataagtatgaggcccgtctcaaggcagtggagcaggagtaccgcgccggaaaaaggcctgcggattatgaacccgtgcccgagaagaaaacggaagtctctccccagtcctacatggcccgccaggaggctgcttttgcagcggagcccgaagcggagtacccggaggacggatattcggaaagtggatacgcagaaggcgggtatcaggaggacggatacgcagaagacggatacgcggaagacggatacccaaatgatgggtatgcagaggacggatatccggaaagcgggtatgcggaagacggatatacggaggagagatacacagaacgcgggtatcggaatgaccggtatgcccagaatgaatatcagaatgacagatatacagaagcaggatacccggaggacgattattcagagcgtgattatcagaaaagcggatatcaggcagaggcatatcaggaagattcctatacggatgaagatggttctgaggaggtatatgcacggcagggccgttacggaaatgaatatccggaccagaatgtgcaggaagatacgcaggacggcgccgaggccgggtatccggaggaacaccacgggattgctgttggggcagaggaaccatatgaggatgagggcgcacacacccgggttaccatagagtctgaggattcggatgaaggagaggaaccgctaaaggagccacagtcccagtggatgccggataagccccggattctgtcagatgaagccgtgcgggcgagaatgcatgaggcggaggttcaggcaaatctggcaaaggagatgtccaggatatcagacggacgtcacaggccggagacaacatctgcccagacacgtgtattgaccgatataaaggatttggggagagagtcatctgtccaggaatcccatcatttcatgatagaagccgagtattccagttcaggtctggaccaggccattgaacttcttaagaagattcataaggagacaggggctaagaaccaggccgccaagataacaggggaaaagcttaacagcaaaggtgtatttgccattgcggacaagttaacaggcaaggacctgattattgaacaggcgggcgccatggaggaatccaccctccaggagctgaaccagctgatggccagggatgagaccggtatgaatgtagtccttatagacgtggcgggtaacctggcccgtatccataaggtatatccaggattggccaaacggtttgaatatgtagggaagatggggccggaagaggttgcttatgtggcgccggaaggagatgaccgccctgtacgtcctgtgcagcttcggaagacggaagaggcggctgcgcccaggacagctctgagacggacagaagaaccggctgcgggcaaggttcagccggtagcggaaccagctgccatcaggagccttccaaaaccagagacagagcagaagccggccgcagaacgtaaagcaggaacagaacagaaaccaaagccggagcgcaggaaaatggaagagagccgcccggagccggctgcccccagggaagaacataaagaagtctcccttaaggcggcggaaaccccgccggttctgcctcagccggaagaaccggattatgatgaccagcaggagatggatattgatgaatttgcccagtatgcatgccaatatgccagcgatattgactgcagcatatcaggaaagagcatgctggccctctatgagcgcattgaaattatggaggaagacggcgtaccccttacaaaggtaaatgctgaggacctgatagaggaagctgctgataaagcggagaatccatccttcataaagcggataacaggaatattctcgtccaagtatgacagggacggtcttctgatattgaaagaggagcattttatatgatgaccataggtttgattgcactggatcttgacggcaccctgctggacagccagaaaaacctgtcagagcgcaaccgcagggcactggagcgctgcgcccgtatgggcatacagattgtaccgaccacaggcagggcagtggatggtatcacgcaggaagtacggtctctgccgggagtcaactatgccatatccaccaacggcggaacagtagcggaccttgttaagggaaccagtctgaagcggtgtacactatccaatgcaaaggcattggaagtcatggacatcgttaaaaggtacagggcgatgtatgatccgtatatagacggaagagggatttcccagcctgagttcatcggacatatggaagacttcggcctgagtcctgtgattcagaagatggtgctctctaccagggatgttgttcccaatatcctgaattacgtaacagaatgtaagaaggatgtggagaaagtcaacgtatatctggctgatgtgaatgacatagttccgctgcgaaaagagctatcagctgtagaaggcattgtcatcagttcatccctgtataataatctggaaatcaatgctctgggagccacaaagggtattgcgcttatgtggctggcagattatcttgggattgcccctgaggccaccatggcatttggcgatggggaaaatgatctctccatgctggaagcagccggagtgggcattgccatgggaaatggactggacatagctaaaaacgccgcagatcagattacgctgacaaatgatgaggatggagttgcggacgccatagaacgcctgatattcaactaaaagaaagactgaaattatatggacatgatattagaacattggctgtctgccggtgcaggagtttttctcattggtatggtgctgtatggacattacaggggagcgctgaagcagtgcgtatccctgggagcgctgatacttaccattgtgttggtgaagattgccactccgtatatgacggattttatcaaggataatccgtccatacgccagagcgcggcagaggccatactggatgcagctggctgggaggaaccatccgcggaaaacacggagcttccggcagcgcagcgcattgccattgagaacctgaatcttccccaatccgttaaggaaacactgcttgaaaacaataacagcgagttttatcatatgctgggagtggaccagtttgctgaatatgtcagcacatatttggccgacattctcatcaatgcagttagttccatcatcctgtttgcagtggtctatattctgattcatctggtggtgcggtggctggatcttatagcgcggctgcctatattgtatggattgaatcatatagcaggtgcagtactgggattaatccagggacttctgtttctctggattggctgttttttggtgggaattttttccgccacacctttgggaatgacattggaggaacagatcaacgcaagtacctggctgcggtttttatatcagtacaatctgattaatattgtactgggcggtattatccggggtattctatagaagaaaaaatataattgttcctttaatatatataattaaaacaaatcgctgggaggggatggaaacatctgtaagcagcgatttttttattaaccacaaaatatagaaatatacagaaaaaataagcacatttagtggtgcgaaaataaagttgaaaattgtataaaaaaatggaacaaattcccttgacaagttgataaagtagtgatatattaaag

SEQ ID NO: 3292 - DNA, 113 bp, Unknown
  gut microbiota DNA sequence
tcattgagaacctgaatcttccccaatccgttaaggaaacgctgcttgaaaacaataacagcgagttttatcatatgctgggagtggaccagtttgctgaatatgtcagcaca

SEQ ID NO: 3293 - DNA, 182 bp, Unknown
  gut microbiota DNA sequence
ctggcaaatgcatactggcggttggtcagcagcagttcctggtaacggcccgtgtgaagcggctcctgctggctgtgaatctgtcccagctgtgcaatcaggtctgtaagttcgcagtgaagttcaccttcctgctctatggagatggcgggacgcagcgcttcatcgctggtgttggtgcg

SEQ ID NO: 3294 - DNA, 4195 bp, Unknown
  gut microbiota DNA sequence
aaactttacaatattgtatataatagaagcaatgcatagaagtaatgcaatgcaaccatttatattttaagcgattgatgcggtctgttccggcgtttggtccccacaggggacaagcatggaggccaccagtgtgtgcttccggtccggctcagttagcgaggaggaactatctatatgttttcgatgatgtccaatgatattggaattgacttaggaactgccagcatccttgtatatatcaagggtaaaggcgttgtgttaaaagaaccgtccgttgtggccattgaccgcgataccaacaaaatcatggccatcggtgaggaagcccgtcttatgattggacgtaccccgggcaacattgttgctgtccgtcctctgcgccagggcgttatttcagattataccattacagagaagatgcttaaatatttcatcagcaaggcagtgggcaagaaaacactgcgcaagcccagaatcagcgtatgtatccccagcggagccactgaggttgagaaaaaggcagtggaggacgccacctaccaggcaggcgccagggaagtggctattatcgaagagccggttgctgcggccattggcgccggtattgatatcggaaaggcctgcggtaatatgattgtggatatcggaggcggtacagccgacattgcggtcatttccctggggggcccggttgtcagcacatccatcaagattgcaggcgatgactttgacgaggcactggtgcgctatatgaggaagaagcacaaccttctgattggcgagcgcacggctgaggagataaagattaacatcggagcagcataccgcaggccggaagtcctgaccatggaagtcagaggacgcaacctggtgaccggtcttccaaagaccatcgtggttacctcagacgagacgctggaggcactcagggagcctgctctgcagattgtggatgctgtccacaatgtattggagcgcaccccgccggaactggcagccgatatttttgacagaggcatcgtgatgacaggaggaggttccctgctcagcggcctggatgccctgattgaggaaaagacgggcattacgaccatgattgcagaggacccgctgactgcagtggccatcggtaccggcaagtttatagagtttgcccatggcatgaacatggctatggaggcatctatgggagtaggcggcggaagagaagattactagaaatctagaacccggcacagcgtgatggactggagtattccggacatgccctggcaccgggttcttttaaccttttgatgaaacgatggcgacaataacaggatttatagagcggattaagttccgcaacgaagaaaacggctatacagtaatgagcgtcacggatcagagcgacggggaagaagtcatcatggtaggcaatctggcttatgcggcagaaggcgacatgatagaggccagcggccatatgacccagcacccggtgtatggagagcagcttcagatagaaagctatgagatgaaaacaccccaggatgaactgtccatggaacgctatcttggctccggggccatcaaaggcatcggggccgctttggctgcccgaatcgtgcgccatttcaaggcagacaccttccggatcatggaggaggagccggagcgcctgtccgaggtaaagggtgtcagtgagaaaatggccatggccatagctgagcaggtggaggacaaaaaggatatgcgccaggccatgatgttccttcagaattacggcattaccatgaacctggcggccaagatataccaggagtacggtcccacgttatacgggattatccgggaaaatccctaccgtctggcagatgatattccgggggtgggctttaagatggctgacgagatagccgagcgggtgggaatctttacggattccgattaccgcattaaggccggtattctgtacacccttctccaggctactgccaacggccatacctatcttccccagaccgaactgtttgcccaggcatctgagcttttaaaggtagagccgtctgccatggagaagcatctgatggatatgcagatagaccgcaaggtggtggtaaagccgtctgcccagggcgcactggtctactcctcccattactattatctggagctcaatgcagcccgtatgctgcatgacctgaacattaagggagacattccacaggccgaaatcaaggccaatctcctaaagatacagcagcaggagtccatacacctggatgaactgcaggaaaaggcagtatacgaagccgtaaacagcggactgttagttatcaccggaggccccggtaccggtaagacaaccaccatcaatacaatcatccggtactttgagatggaggggatggaaatacttctggcagcgcccacgggccgggcggccaagcggatgacggaggcaacaggatatgaggccaggaccatccaccgcatgctggaactggtcccggtgggaatgcccggcaatgacgcccctgtgatccccggcgcgccaaggtctggaaagggagcccagagcatgggaatgcattttgacagaaatgaagaaaatcctctggatgccgatgtcatcattatagatgaaatgtccatggtggacatcagccttatgcattccctgctgcgggcagtaaacgtgggcacccggcttatcctggtgggggatgtggaccagctccccagcgtgggtccggggaatgtactgcgggatattatcgagtccggcagctttaatgtggtaaagctgacccacatcttccgccaggccgcccaaagcgatatagtagtcaatgcccacaaaatcaatgccggagagccggttgacctggcaaaacgcagccaggatttcctctttatccgaagggacaacccggatgcggtcataagcgcggccatcaccctgatccagaagaagctgccagactatgtacacgccaatgcctttgatatccaggtcatgacgcccatgcgaaaaggcgccctgggggtggagcgtttgaaccagatcatgcagaactacctgaatccgccggacaagtccaagaaggaaaaagagtcgggcggaatcatttaccgggtaggcgataaagtcatgcagataaagaacaactaccagatggagtgggaggtccgcaacaagtacggcatacctgtggacaagggagcaggaatctttaacggcgacgttggaatcatccgggagatcaatgattttgcggaactgctcaccgttgaattcgatgagggcaagatgatagagtacagcttcaagcagctggaggagctggaattggcctatgccatcaccatccacaagtcccagggaagcgaatacccggcagtcatcatccccatgtacaatggtccccgcatgcttatgacccgcaatctcatatacacggccgtgacccgcgcccgctcatgcgtgtgtctggtgggacagccggacgcattttacaccatggcgtcaaactgtgtggagcagaaacggtattccgggcttaaaagcagaatcggggagatatatgcgcagccggattccattggctgagagggtacaggagaaaaagctgatgaagataattccgcaaggcattgattttatgacagatattctgtttccgcgccgctgtcctgtatgcggcggtattgtcctgcccaaaggagacctcatatgtccgggctgcatgacaaagctgtcatgggtacgccgccctgtctgcaagaagtgcggaaaggaagttctggatgagactatcgaatactgctatgactgtaccagacataagcgcagctttgattacggactgagccttatcaattacgatgaaacagccagccattccatggcccggattaagtataataatagaagggaatatctggatttctacagcgaggccatggtcaggaaaatgggaaaacgcatccgcttcatggacggagatgcccttatccctgtgccggtccatccgtcccggcgccgggaaagaggatttaaccaggcagaggaattagcccggcgcctttccggtcccctggaaattcccgtaaatacttctattctgaaacgaacacgaaagacagctccccagaaatccctggactccggcggccggttaaagaacctggagcaggctttcacggc

SEQ ID NO: 3295 - DNA, 1553 bp, Unknown
  gut microbiota DNA sequence
cagttatgacatacagattgaatattataccaggcacatcatgcagaatcccaactggatattcgccggtgttttcgcagatgatggacgcagcgcgaccaataccttccgtagggatgattttaatcagctgatggaccagtgtctgaaggggaaggtggacatggtcattacgaaatccatcagccggtttgccaggaatacggtggactgcatctcctgggtgaggaagctcaaggaaaagaacgtggccgtgtatttcgagaaggaaaacctcaacaccctggatgactcaaccgaaatgatactgaccatcctgagcagccaggcacaggaggagagccgtgccatcagcaccaacgtcaagtgggggtatgcgagaaagtttgaaaagggggaatccacaagacagagaagctatggattcaggaaagcgccaaccggagagatgtgcatcgtggaggaggaagccgctgttatccgaaacatggccctgtggtttctggacggggacagcctggaacgaatcaagcacagactggaggacgcagggatagaaaccactaccggtaagaaaacatggagtacgggtaccatctacaacatactgatcaatgaaaaaatcatgggggatgtgcttctgcagaagacattcacgtcagattatctaaccaaacggagagtaaagaactcgggccagcagaagcagtactatgtgaagaatcatcatgaggcaatcatcccgaagaccgtctattacaagatacaggaggagattgccagacgctcctcgttaaaaaaagccgggaccaggaaagggaagacggcccagggcgtatatagttctaaatatgcactgaccggaatcatggtgtgcaatgaatgcggagcccattaccgcaggacaacctgggcaaaaaatgggaagaaggtaatcgtatggcgctgcatcaaccgtctggagcatgggacgaagcggtgccatgaatcccctacgttaaaagaggaggtcatccaggaagcaatcatgggaaagctgcacagcctgtcaattgaccaggaggaagaaaacttcttaaacggggtaaaggaagatatcctccgggctgccaaggttgtaggaggagcgtgcacagaggaagagattgataaaaccatggaggaactgcgagaccagcttatggactatgtgggcatggcagccagggaacatggtggtgagaactggtacagcgaccgaatgcgaaagctgggattacagataagcgaattaaaaaagaggagggaaagcatacgagagcaggagaaaataagggacgagtatgagtatctggaccaggaaatcagccgaatcataggtgagacaggcgggacctcaggagccgaatttgataatatcttcatacggcagatcgtccgggagatacgtgtgatatcgaaaaacaaacttcaaatccagctaaggacaggtatgatgttggatgtgaatctgtaaaccagagtaggatgagaagcaatactgtatcaaagtggaaatcgttttccgggtctct

SEQ ID NO: 3296 - DNA, 2740 bp, Unknown
  gut microbiota DNA sequence
ataataaaattgtgcaaatcatacaaaagtaaaatggcaaggaggtataggagtgaaaataacaaaggtagaggcgataccagtacgccaaaaaggggaaattaaaaagattaatgacagcgcacaggacggaattatcattaaagtttatacggatgaaggaatcattggatatggtgaagtggattcagctccatgggttgtaaaatcaattatagattcaccggtctcccatagaatctgtcagggcctgggacaggctattataggtgaggacccttttgaaactgaaaaaatatgggaaaagatgtatctttccagtatgttctatggacgcaggggagtagtcatccatgcgatgagtggaattgatatcgccctttgggatataaagggaaaagctttaaacatgccgatttgtaaactgcttggcggagttcagagagacaaggtaagagcatatggcagtaccctgatgccatatactccccaggaggcagctgaggaagcacttaggtggaaagagcaagggttcagtgcagtcaaaatggggtggggaggttttgagcttccgcagtctgagtgtgtaaaattggttgaagctaccagaaatgcgataggtgatgatatggatatgatgcttgatataggcttcattccttctggtgacttcaatgttaccgctgcatcaaggctgcttctaataaatgaaatacgggaatttaagccgtattggatcgaagaggctgtttatcctgatgattatgaaggatataaaatgcttgtggagagcacagatgtaagaattgccggcggagagaatgaaacaacaagatatggatttaaacaactgatagaggtatgcaaattggatattcttcagccggatatcacacggtgtggtgggttgacggaggctaagaggataggtgcgatggcgacagcccataataccactgtgattccacatgcctggagcagtggaattgtaattgcagcatctttgcattttattgccactcagtcaaattccaatttgctggaatattgtgtttgggatacaccgattcggaaagaaatgcttaaacaggattttaaactcagagatggctatgtggatgtcccaatggggcccggattgggaattgagattgatgatgaagcgattcaaaaataccgttgtgatatcatttagggaacaataatacaatcacatacaaaggaggtaagttatgaaaagaacagtttctatcgtgttggcggtaactcttgcagctacgtctgctgttggatgcggaaaaaaggagaacgtacaaaccgatgctgtggttggcagttcgactgaggctgccacaacagaggccggagagagaacgaaaatccagcttatgggtccgtgggtggtggaaagtccggaagaccaggtgctggctggggtggtaaaaggatttgaggaggcacatccagagtatgaagtggaactaataggaactccctcagcagatctcctgacaaccgtacagtctatggcagcatccagtactttgccggatttggtaattaccaatggagctaataatgctgcatggaaagagatgggaattgtggaagatatcaggggagaattcgatcagaaattcctggaaggcttttatccggaaatgttgaaagaatttacatataatgatgaactttttggcctgcccatgtgtgcggctccgttcgttttactgctgcgtaatgacttgcttcaagaagctggactcgatgtaccagagagctttgatgaaattgtagagactgctaaaaagttgacagtggatacaaatggcgatggaaagattgaccgatatggtatgagcctgatgggatttccagatggaaacaacgcacttcgttttacactggctctgtttgctgcggatgcacctgatatttataaagatgaaagtggtaaatgggcaactaaaattggttctgaggatggtgtccgggcatttgagttttattacaatttggctatccgggatggatctgtaccccaaggctctacggaggtagattataaaaccatggttaatttactggcaacagatcaggtggccatggcaataagcggtccccatacgattgggaatattgttgtacaaaatccggatatggatggaaagtttatcgcagtaccgctgaaggataaggagacagtggcgtaccttaatccctatggtatgattatgtttaaggatgctcctaatagagagggcgcaatcgaatttttaaaatatgcagcagctaattttgtagagatgacacgtgttactaaacgtccgcccgcattgatagaactcgaagatgtggcccgtgaggcagctcctgaagtggaggcaattctggactgcgctcaatataatattgattacgtggcagtaccattccgcggagaggaagccaatattgtggcagagaatgtaaatgccatgttggcaggtagtatcaagtcgcctgaggaggccgcgaaaattacagcagaggccgtacaggctgttttggacgctaataattaaatagatacagactgggcgggatgatcccgcccaggtttcctgtacaattcttggcgtctgaagaggaggtggaagtttgggcaaatttctggaaaggcatttttcattggtattttttcttccggttgcagtcctgtcagttctgttgattatttatccaatgctttatggtatat

SEQ ID NO: 3297 - DNA, 12942 bp, Unknown
  gut microbiota DNA sequence
atggaattttgttggcacaaaaaactatcaggccttaatatcaaatgcggcatttcgtaacagcctgtccgtgaattttaaattcatattaattgttgttgcaggtcatttcgtaataggtacaattttggcgacaattctcaataaaaatatacgaggccgtgtattttttcgttgtattctgatgctgccgtggttaattccggaagttgtatttgcagtattgtttaagtggattcttaatccgcaatatggaattattaattatacactgatgaatttaggggttttatcagatcctatttcctggctgggtagtgttaatacagctttgcccattgtagctattatatgtattattaaaggttatccgtttgtgatgattatggttttgtctgctttgcaaaccgtaccgcaggatatctatgaggcatctcaggtagatgggtgcagcaggattaaggcgttttggcatataacagttccatctattcttccggttttggcagtggcttttattctggatacagtgaactggtttaaacattataccatggtaaatcttttgacaggcggggggcctgcaaattcaacaagtcttgtaagcgttacaatctataaaactgcatttggttcatttaaatttggtctggccggagcaatggcagtagtggtatttataatatgctacattatgagttggatctacaggaggttgacagatgaaaaaagttaaaagacataatcaggcaggaatcctttcttatgcagtgttgctttttttttcattgattgttctatatcctctggcctggatggtactgacatctcttaaaactttggaagaaacctttgtcattcctccggtatggatgccaaaatccccttcattacagacatattcagacatttttgtaaaatatccgattgcttcatattttagaaacagcatcattgtggtagtggttaccaccgtcgtatctgttatagtttcctgtttagctggttacgcggcatctcgcagccgttcaaggtttaagaagccatttatgacatttttgttggtactccagatgttcccagcagtcatgcttttggtcccttactataaaatgctgactatatatggcctggttgatacactcgtaggtctaatcctacctaacattgcatttactatgccattctgtacgtggatgatgatgggatattttaatacaataccgtcagaattagagcaggctgcacaaattgatggctgcaacaaatatcagagctttgccagagttatttgtccattaactttacctggtatggctgcaacagcaatttattcttttattcaggtttggaatgaatatatgttttcacaaactttgatgaaatcggagacctctaaaacgctgactgtcggaattgcgcagatggtgggtgagtaccgcacattatggaatgatatgatggcagccagtgttctgacaagcctcccacttattatcatttttatttttctgcaaaaatactttatttctacgcttactgccggtgcagtaaaggggtgaagaaacttggaaacaattgaagttagatacagatggaggtagttaaatgttagatattctgattcgcggaggatgggtaatagacggcacaggaaatccgcggcggcgcctggatgtgggaatcaggggaaagtgtattgcttgtatggagcgtaatattaccgaggaggcgcggcatgtcatcaatgcagacgggctgattgtgagtccgggatttattgacgcacatagccattcggatgtgacgattgaaagtaatcctttttgcgagagtacgatacgccagggaattactacagaaattgtagggaactgcggagacagtacggccccgtttccaccggtggggaatggtacggctggaggatttggccgtttcgataatgggcctgtaccctatggccgcacactgggagagcacatgtgcgaattagaacatatgggtatatctggtaatttagcatggctggtgggacacaattccttgcgaactctggccggtgtcaaaggaccggaggtaacagagcaacagtataaaataatggagaatgccctcagacaggcatttgaggatggagccatcgggcttagcagcggtctggaattcgagccaggacgtacaagctgtccggaggaattaatgcgtcttgcaggtgttgtaaaggaatatgatgccatttataccagtcatattcggaacagagatgcccatgtgctggaggcattggaggaatttttagcggtaatccgtcaccatcgtattcgaggtgaagtatctcacatgaatatacgctacaatacgcatgcacctgaagatgcagtgcgcaggtgtatggagaaaattagtcaggcaagggatgagggatttgaggttctgacagatatgacccccttaaattatggtatcggtcagatggcgggtatattacctgagtggctgacctcattgccaggccaacagatgaaagatgcgcttatggatccggaaatcaggactaggcttaaacatgactgtgaccggtactggaggtttattgccggcggtgagtgggaacgggtgcgtatgcagaacaataatgcatttccggacattaatgggatgacatttccggaaatatcacatctatggaataaagaaccttgggattgctacttcgatattctggccgctgttgcgccagatattgacagtgttgttcttgtgtcacggctgtttacagatgaacatcttgtagagacaatatcgaatccactctatatgcttgtggtagatggatatagtacatctgttgaaggcgaggtggccagacacacacagttcccgcttcattacatcggaatggactggttcctgacgcatcatgtgcggcagaatcatattctcagtctggaagaagcggttcgcaagatgacaagcatgccggcctcccatttcaacctgaaaggacgggggctattatatgagggggcagttgcggatgttatagtgtttgattatgaacatatggatacaccattcgatttgcggcagcctgcgcaatatgcccgcggagtgacacatgttatagtaaacggtttacaggtgttacgtgacggggaacatttacatacgacaccgggaattaatattcgtcagaacgctaaataagatttagtcaaaaaaggatgcgtcttaaagcagttgcgagctaatggctatacaattgctttaatggcgtgtcttttgtgttataagaaaaatgtattgccgggacaaatatttgggaaagattatagcttgcattttcacactcctgtgatataatgttcatatatttttcaaaagcgatagatttgaacataaaacaggcagggaagcgaggattacacaatggacagacatggacttgtatgcagggcagtactggagcagccggatattacccagagagagctggccggaaagctggatgtctccctgggcacggccaatggtttgattaaggaatgtctggcaaagggatatataggggaggaaagcagccaaaagggcaaggcccgatggaggcttatgccggatggccggaagctattagaccaatataaggtggacggggcccttattattgcagcgggcttcggttcacgttttgtccccctgacctttgagacgcccaaggggcttctggaggtctttggggagcgtatgattgaacgtcagattaagcagctccatgaagcgggcataaggaacataaccatagcagtggggtatctgaaggagaagtttgaataccttattgataaatacggtgtggagcttctgtacaatcctgagtataccagcaaaaacaccctgaccaccatttaccgggccaggaaggtgctggaggggcgcaatatgtacgtcctgtcatcggataactggatgcgtgagaatatgtatcatgcctatgaatgcggggcctggtacagctctgcctttcagaggggagagaccagggaatggtgcctttattttaataaaaaggggaggatcaccggcgtaaaagtaggcggtcgggaccagtgggtcatgtatggtccggcttatttttcccgggaattttcccggcagttccttccggtgctggaagcttactataagacgccggggacagagcagttttactgggaacaggtctatgtggacatgctggagggagaggccagacggcggcttgaggaggaaggcggcggactgctggaagcagcccaggaagccggcggcctggcggcctcccggtgggatgaaatagagatggatgtgaaccgtcagccggatgagcaggtatatgaatttgagaacctggaggagctgcgcctgtttgacccccgctatcagaatcattctgacaatgcggccatgaagctggtcgcagaggtattcaaggtaccggaatccagcattaaggatatccgctgcctgaaagcaggcatgaccaacaagtcctttctgtttaaggtggaggaccgccactgcatctgccgcataccgggtccgggaacagaacttctgattaacagggaacaggaaaaaacagtctacgatgccgttgcctcactggaaatcaccgagcatgtgctgtacatgaatgaaaagaccgggtataagatagcggattactatgaaggtaccagaaatgcggattccgcagattgggccgatatggagaaatgcatgtccatggtgcgccgccttcaccagtcaggcatcacggtggcccattcctttgatatccgggagaggatcagcttttacgaaaagctgtgcaggagccatggcgcccttttgtttgaggattacgaggaggtaaaggggtggatggactggcttatggatacccttgactcaatggaacgcccaaaatgcctgtgtcatattgatgcaaatgtggataactttctcttttttgaggacggcagtgtaaaacttctggattgggagtatgctggcatgtgcgatccggtgatggatgtgtccatgtgcgctatttattcctattacaaggaagaggacatggagcggcttttcaggctttatctcaggcgggagccctcggaagacgaactgtttgcgctctatgccaatgctgccctgggcggattcctgtggtgcctgtgggctgtatataaaagtattctgggagatgagttcggagaatacaccatcatcatgtaccggtatgcaaaaaaatattataggaaattacggaaattgtaataaatttgttaccaaatgaatatgggtttgtgctataatcggagatatgtaaacggttggggattcgtatgccccggccagatataccaggcgaggaggatgacaaatgggatataaaaagtactgggcggcaatggcggcagccggtatgattggggccatgtcattggggtctgtatttaccagctatgcggcggacggatggagtaaatccaatgatagttggacttatatctataacggacagacacatacaggatggcttcagaccagcgagggctggtattacatggacttatccacgggacatatgtccacgggttttaagcagattgacggcaagtggtatttcttcaggccgaatggtcttatggccatgggctggattaatcctgaggacggcaagtggtattatatgctgaacgacggcagcatggttacaggctggctgaagattggcaatgactactacttcatgcggggcaacggtaccatggcaaccggctggcgtgagatggacggggcctggtattatttccagagcaacggaaagtgcgtggttaattcctgggcacagattaaggacaactggtatctctttggcacggacggcaagatgatgacgggctgggctaaagtggataatgattatttctacctgaatacggacggccggatgctgatcggctggctgagcgacagcgaaggcaacaaatattatatggatacaagcaacggcaagatgtccacgggctggaagcagattgataattcctggcattacttcaacagcaacggacatatgatgacgggatggattcagctggatggcaagtattattatctgaaccctgccaacgagggcaagatgattgcaggcaccacagccaccatcaacggtgtacagtataactttgacggcagcggcgtatgccagaatgccaacggcgtatcggcccagacaccgggaactgtgaacaataattccggcagttccggcggcagcggcggacctggagtgtccggttcttccggctccggtatcagcagcggcacaccgggcggctccggaaacagttcaaacggcccgaccagcggcaattccaataacagcccatccggctcatcaactgcgcttgaaccaggacggacagacggaccaggttgattgacagcggtttaataaggggggatgtgacagcggatggctggacatcccctcttttttgaaaaatacaaaggtatgaggagaatactatgaaaaatacgacgcagataatgaggcgctgccacgcacttgccctggcaggactcatcggagcagggacaattgtacctgccggtacatccctggccgtgggaccgggggagacccagtccgccacggtcatatctcccgtaggaccggggcagagctccgccggcagcacagggactgcttccggaacaggaagcacctcaggacagtctgcttccactgcaaatcccaatgcgtggaagaaggtaaacggcgtatatcagatgccggacggctcagctatcaataatgtgctgttccggggaattgacgtgtccaggtggcagggggatattaactggagccaggtagctgcggacgacgtgtccttcgtcatgctgggcacccgttcaaagggcgcagtagacccttatttccacaggaatatccagcaggccagcgcggcaggcgtcaaggtgggtgtatacatctattctctggccatgacgccggagatggcagtggaggaggcgaattttgttctcaacctgattcacgattatccggtctcctatccggtggcctttgacatggaggattccacccagggaaccctttccaaggatgagctggcagccatcgccaacgcgttctgcgggcggatttcagaggcaggctattatccggttatctatgccaatgacaactggcttgccaataagctggatatgagcaagatgaattatcctgtatgggtggcgcgctattccgccaaaccggcctatcagaatcccgttatgtggcaggcaaccagcaccggcgctgtaaacggtataagcggcaatgtagatattgatttccagttcaaggatttcacctctgtgattccggcgaatacgtggagaaccatcaatggccagacctactattaccagaactatgcaaagcagaagaacaactggattcaggatgacggcacatggtactatatgaacggggacggtttggtgtccaagggctggcttaaccagtccggcaagtcctactatctggatgacactaccggtaagatgataaccggctggaaatccgacagcgggaaatggtattacttcggcagctcaggcgccctttccaagggctggattaatgacaacggaacctggtattacagcaaccaggaaggcgtgatgcagacaggctggctggacgacggcgggcgcagatacttcctggagggaaatggggccatggcaaaaggctggaccagccagaacgggaagtggtactatctggacagctcaggagctctttccaggggctggatcaatgacaatggaacctggtattacagcagccaggatggcgtgatgcagacaggctggctggatgacggcggtgagcggtattacctgaaggggtccggcgccatggctacaggctggcgtgagatggatggggcctggtattattttgagggctcaggacgtatggccaaaggtgtgatagacgtgggcggcctccactactatatggacccatccacaggccggatggcggcaggcaccaccgtggatataggcggcgtggcctatactgctgacggaagcggagtgctcagccaggttgtgcaggaagcgggaaatgagaccggagacagccagacaggaaatgtacagacccaggcgccggacggcagccagggaggacaggcgccacagccttcacagaacggcggggtatctaaccaggcaccgggtttgggccaggctgtcaccggttcatccggcggaccgggtgtggtggtcacgccattagggccgtgacagcagccgctgggtttaatgtaatggacaataagctcaatcatggtatcatttttatcaggatataactttaatatgatgtaaaatcagccatgcggcgccgggagcagtcccggcgctgttttcttcttcccgcacatattatgaagtctgtaaagggagaaaaaggtaaaagcatttttatattgcccctgcacatatactggatagataaggatgcgaaataagagaggaaaacagggtgaagctgataaataagtcaaagctcctggcagctgtctgcatagcggaccttttgctgctgggcagccttatccatacggtcaggggggagatgccggcccatgtgtccgccgatgagggctcctgggtcagggagggaggggataccctggaccgggccaagggactggaagggaaatgtgtggctctgacctttgacgacggaccaaatgaggattgcacggaaaaactgctggacgggctgaaagagcggaatgtccgggcaaccttttttctgatgggacagaacatagagggaaacgaggagattgtaaagcgcatgaaggcagagggccatttgattggaaaccacagttacagccatgtgcagcttacaaaggccggttcagacgcagtctgccaggccgtggacagaaccagccggatgatagaagagattacaggtgagaggccccaatacatgcgcccgccctatggggactggaatgaagagctggagtgcagggtgggcatgaccactgtcctgtggtctgtggactccctggactggaaactgcgcaataccaaccgtgtggtgaaacgggtgcttaaggatgtggaggacggggatatcatattaatgcatgatattttccccacttctgtggaagcagccctggaaatcgttgacacgctcacgaagcggggctatacttttgttacggtggatgaactgctgattgactgaggagaatacagatatggatttatttgattatatgagagaaaaggatatggagaaggagtcgcctctggcttccaggctccgtccgaggaccctggatgaggtggtggggcagcagcatattgtgggaaaggataagctgctgtaccgggccatacaggcggataagctgggatccattattttttacggacctccgggaaccggtaagaccaccctggccaaggtcattgccaataccaccagtgcggatttccggcagattaacgccacagtggcaggaaaaaaggacatggaggaagtggtgaaggaggccaaggacaacattggcatgtatggaaggaaaaccatcttgtttgtggatgagatccaccgcttcaataaaggacagcaggattaccttctgccctttgtggaggacgggaccctgatactgattggagctactacggaaaatccgtactttgaggtaaatggggctcttctttcccggtccaggatatttgagcttaagcccctggaaaaggaggatgtcaaggagctgatccgcagggcagtttatgacaaggaacggggaatgggcatttacgatgccgacattgacgaggatgcagctgattttctggcagacacggccaacggggatgccagggccgcgctgaatgctgtggagctgggggtactgaccactgcaaagggagcggacgggcggattcacattgatatggcagtggcccaggaatgtattcagaaaagggctgtccggtatgacaagaacggggacaaccactatgacactatatccgcgtttattaaaagcatgcgggggtcggacccggacgcggccgtgtattatctggcgcggatgctgtacgcgggagaggacatcaagttcatagccagaagaattatgatatgtgctgcggaggatgtgggaaatgcggaccctcaggcccttgtggtggcggtaaacgcagcccaggccgcagagcgcatcggaattcccgaggccaatatcatcctctcccaggcagtgacctatgtggccacagctccaaagagcaacgctgcctgtatggcggtacagaaggccatggaagcggtgaggaacgaacggaccatgccagtgccggtccatctgcaggacaagcattataagggagcggaaaagctgggacacggggcaggttatctctatgctcatgactatcccaagcattatgtacagcagcagtatctgcccgaaggtatggagggaaccgtattttatgaaccttctgacaatggctatgagaagcagataaatgcgcatatgaaatggcttaaaagctgattttctcaaattttaactttacaatccctgatattcgtgtatataatagggctatacatagattagctggcagttttcttgatactgccggcagtctgttagtccctgagcaattcccaaatctggaataaaccccgaatttgaatgaacagaagataatttgaatatagacagaaggcgtacaccggctttttttgcgggtgaagaattgaatttaataaggagaaatactatgcgtgaaaaactgcagaccctgcctctttcagaactaaaggaaatggccaagagccgtggaattaagggcatcagttcattaggaaaggcagaaattattgatttgctctgcgatgaggcagagaaaaacccggatataaagccggcggaaataaaacgggaagtaaaaacggaaacatcccggagccaggaaacgcctcggagtcaggagatatcccggagccaggaaacgccccggagtcaggagatatcccggagccaggaaacaccccggagccaggaccagccccatgcttttgagcgtaaccagtcaaggagccaggattatcaggaaaaccggaatgacagcaggggaacggataaccgccgccctgtttcaagagggtacgacagcaagtatacacagaacaggacccagactccccaaacacatggaaacagcagtatgaataacagaatgagccagaacagcgcgccttcccagaacgatggagagcgttttgccagagcggacaatagaagtgacgcaatcggcctttccagccaggatatggctgagttagacagcgggattgaggcaaacggcatactggaagtcatgcccgacggatttggattcatccgctgtgaaaattttcttcccggtgaaaatgatgtgtatgtggcgccttcccagattcgccgttttaatctgaaaacaggagatattatagtgggaaaccgcagggtgaagtctgcaacagagaagtttgcggcccttctctacatcaagacggtaaacggctatcccctaagcgccacggagacaaggcccaactttgaggacctgacacccatcttccctaacaggcggcttcatatggaaacacctggtgagaggaatacggtggccatgcgtgtcctggaccttctggcacctattggaaagggacagcgtggtatgattgtatcccctccaaaggcaggaaagaccacactgttaaagcaggtagcaaaggcagttacaaccaataatccggatatgcatctgatgatccttctgattgacgagcgccctgaggaggttacggatataagagaggccattgtgggtccaaatgtggaagtaatctactcaacctttgatgagctgcctgaccgtcataagagggtatccgagatggtgattgagcgggccaagcgtctggtggagcacggacgtgacgttatcatcctgctggacagcattaccaggctggccagggcatacaacctgacggttgcgcccagcggccgtacattatccggcggtctggatccggcagcccttcatatgccgaagcgttttttcggcgctgccagaaatatgcgcgagggcggaagcctgaccgtactggccactgccctggtggagacgggaagccgcatggatgatgttgtgtatgaggaatttaaaggcaccggcaacatggagctggtgctcgacaggaaactgtctgagaaacgtatcttcccggccatcgacatattgaagtccggcaccagaagggatgacctcctgctgtccagggaggaagcagaggcagtggatattatccgcaaggccaccaattccctgaaacccgaggatgcagtggaaaagatacttgaccttttcgcaagaaccaggaataacagggaatttgtggagaatgccaagcggattcggtttttctaggaatatcaggctatgtcctttcgttcctttaaaaggtcgcggatttcagccagaagctcttcctgtgtgggaccagccggtgccggtgcttcttccttggcatcttcttcatggcgtaaccggctgctgatgacggcaaccgtcttaatcataaagaacatgcacacgccgataatgagaaaatccaatatattttgtaggaagctgccatagagtatggcggcttcttctacttctaccccgtttatagtggccgcgggatggatgacatattggctctttgtcaatagttggggtgggatttgttaaaatcccgccccaattctatgaaaagggcccttttta

SEQ ID NO: 3298 - DNA, 265 bp, Unknown
  gut microbiota DNA sequence
tccatcataatcgttgttgctgaatatctcatgggcaatggagctgttcagttcagacagctggtccaatttcgtgttgatatcctcaacagccaccgacaggtcatttttagtctgttccatcagggtctttaaattggcgtcatactcattgaggacctgggtcacacccttaaatgcgttcatgactatattggcattggtctcctgataaggggactggctgaaatccgccagtgcctgggataaggtggtcaatgctgcc

SEQ ID NO: 3299 - DNA, 188 bp, Unknown
  gut microbiota DNA sequence
taggtgcaccctgtaggtggttctgacgtatttggagcagaatctttatgacatgtggatatggacttccgccgggatattcgatatggtgttggcggaaggaggagtgtccatgaagaaaactacgagggaacaatgtgaggaagtcatagcagccagggtagaatggctggtaacccgatggcagg

SEQ ID NO: 3300 - DNA, 7212 bp, Unknown
  gut microbiota DNA sequence
atcaagattctgatggcagttgtcattggtgcccttctgttggcagggctgtataagttattcgcggatacggtactcccaaccctgacccagagggttgcggaaatgttcaactattcaggttaaggaaggaggcatgttaagaaatgaaaacacaacaagtacaacccaaaacacagccagagggacacgcaggtaataagatgggtattgatgtaaagattaattccatcagcatggaagggaacattcttgccacagcgtccatcaatttgaaccagtgtctggctatacggaatatacgtctgatgaacggtgagaaaggcatgtttctgtccatgccatcctatcgtaccggaaatggggaatttagggatatctgttttccaatcacagcagagttccggacacagatgacggaagccctgacgtctgcttataaggaggctcttacgatacagcagggcaagatggcacaaatggcagaatcacctgtcccgcagatagccccggcaggactgtccatgtgagaaggcaaggatgtacagaaaccttgaactgaccttgtggattggtcttatgctgggcgcttcctataccgaccttcgtcaccggatggtaccggactggctgaatctttgtattgcagcctgttccctgttggggcaccagagcggctcaccggcagggattctgtgcgccatcccttttctttttgcagcagtatgctggggaggaatcggtggaggggatatcaagtttatggcagcatgcggtatgcacttaggtgtgtatggcggactggaggcggcggtattagggacggtatccctgcttgtgtatcatatgggacatcttttttggtgtttatggaaggtcgtccagcctcctaagtcataccccatggtcccattcctaacaatgggctgcctggctgtggtgtgtgcaggaggataggacgcagctgctagaatgaatgggcggaggtcagatatgaataaaaagacgttatgcatcttactaagcatggctatgttatcccatcaggtgacatatgcttcagaccagtccctttccggggatgtaggaccatcaggtcagagtgaagttgtaatagacatgccgatccaggaggaggaagtagcacataccaatgaagaaacaatggatgccaacatggaaggaaacggtgcttcgtgttccgatgtaacggtattggaagcaaccgcatctgaagcagcacccatgaaggatacgaaaacaggagaatgtgattcagaagcaggggaactaaaagaagaccaaggagcgtatgccggcccacgtagtctgtttcggactgcttatggtgcggagtattatcagggtgattgggatccggatgccaatcgaaatgcaattcgcatcccaaacgtatatccggtgcagtccgccaattacctgccgtctcttccggccgcagcagttaccagcagcctatataagacatatggcccaaatgggtgtgcagacgtgcagattcaggtcagttccggaagtaatggttccctgaaccggacagaggtgacggtcaacttaaagactgggcagctccttatcctgaggccaatgggtgcaagcaaacattcctattttcatataagttacatcaacgataataaaggccgcagattcagtgactttgcaaaactgtaccatccatctgattcgtactattccagatacgaatatgcctggctcatgcgtgttacctgtgatatggcgggaaactgggatgcccatgccgacggatggaacacagtgaacaatgagggggaccgggtctattacggaccggctcactggaccatgcatctcaatgtggcacacgattatggaccatggaccactgcatccgagccgtcctgtgcggtgcagggaacccagagacggacctgccgggattgtggttcggtccagacccaatccaccagtgtcctgggacatgcgttcagtgacggttattacatgggtgccaatgatggtacctactttaaacggtgtacccgtccggggtgtgatgccaggacagatgtgaaatacaatccgtatacggtcgtatttgatgccaatggaggctccggaaacatgaacagtcagccgttcgtctatcagacgccagtcgcattattcatcaaccagtacaccagggcttaccatacattccagggatggaacatccaaccggacggtggtggtgccgcttatgaggatggccagtccgtacttaacctgacgaaaatctatggtgatacggtcacactgtatgctcaatggctcccgaacacatacatcataacatttgcggacgggatggatgggaggcagaatgaacagaaggggcttctatatacggggatgctcgggacgcttccggaatttatccggaagggatataccctcctgggtttttatacggaaccagacggagggacccggattacggaagaaactgatgtaccacatgaggatacgacctatcacgctcattggtccgccaatgagtaccgcattatgttccataccaagaatgcccattgcgatatagatgggaaagtggtcacatatgataaacccatcggaatcctcccggtccctgacctggaggattatgcttttctgggatggtatgcccagccttatggggaagagaaaacggaaagaatcatgtatggggaggcacttccagaaccggggcagaagattgtacccgcatatgagtatacggtagaccgggatatggatgcatacgcttatttcaccctggtattccgggacctgggagatggaacgaataaacggccaggcaaggatggagccatcgggacggaggatgataacctgtatctgaatggcacggatggagtggcaggtacccgtgatgaccggaaaatatacgaaggagaggatggtcagtacgggacggaagatgatttctatctggatgatgaggggcgtaaacatttcccgggtccagaccgaacctttggcacggaggatgattaccgggatgatggaaatgggtggaatacacggcccggaccggattgcatctttgaaacccaggatgatattaccgtctccaatggatgggatagaatccccggtaccgcagatgactggatggataacggtgaaacctatccatccaccagccgcaggccggggaatgacgggatttttggaacggaagatgatgagatatggtccaatgggcctgacggcgctcccggtacagaagacgatgtacggatttatcccggactggatggtatttatgggaccggggatgactggtatgacaaccaggatttttactcatctaccaatgtccgtccgggacctgatggtgaattctggacggaggatgatgagatatggtttaatggtccggatagtattccagggaatgaggatgacctgcttttgatacctggccccgatggaatatatggtacggaagacgactgctatgacaaccgtaaggagcaagaagggaccaatatccgtcctggtaaggacggaatcttcggaacagaggatgatgagctctggctcaatggaccggatcgcattcctggaacggaagatgatgagaagtatgtaccacgccgtccgggaggaggaacaggcggcagccatgcaacgggaaagagggcatatagaccataccatccgttgcaggatgtagctatactgactattttggaagcaccaataatggaaatcccagctgaaatatctggcttacctgtattattggagcagaagacagaagatgatgtaaggcaaacccaggttcagccggagtgtgatatgccagctgtatccatccctgatgtgacaaactgggaagtggaatccgtgaaaacagagaaagccagtgcaagtgaggtagaaaaggagaagggagacaaagaagcagcacaaggtaaggccattctgacagccatcttgttgctcgttattatcatgttggtaatatttcttatccgcaggctatcctcccatgcacagaaacaagaatgatcggaaagagagtgaagatatgaaattgaagatatgtaaaaagacccgatttacattttcaataccagttctggttttgaaaagcgtcaggaaagggaacagaaggaagcatcatgtaagacgattatcccggatgggagaataaggagggctcaatgaaattgcttaagaacaggacggtccttggtatcctctgtattgtattatcgttggccatctgtttcctggttacccctttatttaatcaggccatctcgcaaaagacagaaatcgtgcgggtccagaaatccattaaggctggagatgaaatcacaaaggataacgtacagatggtggaggtgggtggctataatcttcccggggatgtaatgaaggagttagggagtgttgtaggcgcctatgccacagccgatcttttgccaggcgattatgttcttcattccaagatttcagaacagccaccaggcgcagacacttacctgtatcagctggatggaaataaacaagccatatccgtgaccgtcaaatcctttgctgcgggattatccggtaagatacggagcggtgatatcgtgtccatccttgcaccggattacctcaagatgggggaaaccgttataccacaggagctgcagtatgtccaggtcattgcagtgacagacagtacgggtgtggacgccaatacagacaccggagataaggagaaagaaaaatcccttccggcgactttgacattactggctacccccattcagtgtaaggtcctggcagagcttgagacggaaggaaatctgcatgcggcccttgtgtaccgggggaaggctgagactgccgggcaatttattgcggcacaggagcagttactggaacgtttgtatcctccggaagaagccgcagatgagaaagcaggggaaacacaagcacaggacggcaaaaatacagaaggggaagagataacagaaacagaagggacaaaggaggaacagaatgcttaatatcaagaaacacagcattttttccagggaagagaagagggactgtgaggaataccaggataagggaggcgtactggcagtgtgggggagtcctggaagcggaaagacaaccgtggctgtaaagctggccaaatacttggcggaccggaaaaggaatgtgtctctcctgttatgtgacatgacagctcccatgctgccctgcatctgtccgccgggggatttagagtccgaacattcgctggggagcattttggccgcgactcatgtgacgcagaatctggtacgtcagaactgcgtggtgcacaaacatctggactatctgatgattctggggatgcagaaaggggagaatgaatatacctatccgccccataatgccagccaggccacggaactgattgactgcctgcgggaactgacaccctatgttatcattgactgcagcagctatatagtcaatgatatcctgtctgcaattgcacttatggaggcagattccgtgctgcgcctggtggggtgtgacctaaaatctatcagctacctgtccagccagctcccactcctgcaggaccatgaatgggatgcggataagcagtaccgggtagccagcaacatccggccaaatgaggcgagtgaacatgtggaacgggtgttaggaaatgtaacattcaggattcctcactctgctgaagtggaggaacaggtgctggccgggaacctgttcaaggagctgtctttaaaggacagccggggattccgcaaggaaatagaacagattaccagggaggtatttggatgttaggagagaaacgaggtgagtcactgttctttcagacagaaaaggccgcggagccaaagcctgtggtaatggagctgcagatggtagaaaggggagtacaggctgtagagtctcatcaaccggaccacaacagaatatctgccacagggacattaaatcatccccaaaaagagaataaaaggccggggatgccgactgaccggaaggatgatggaatggaagtacaggaggaagaatgggaagaggacatcactgtgggatttgtacctggaaatgggggacccaggaatcaggacctgtttttttctgccagggaaggacgagaattcactcaggtgctgcaggaggtacaggaatacgtgtccagtaagtatgccactctgctgacaggccatgatgacgcggatgtgaaagcccagatcaagcgttatatcacaaaatacattcaggattaccggattgctgttcagggaatgaccatggttcagctggtggatacactgtatactgagatggcagagttctcattcttaaccaaatatatctttggtaccggcattgaggaagtggatgtaaacagctggaatgatattgaggtacagtacagcaatggaaggaatgagaagctggaggaacattttgacagcccggaacatgccatcaatgtcatccggcgcatgctgcatgtaagcgggatggtccttgacaatgcaagccctgcggtgttgggacatctatcgaaaaacattcgtattgctgttcttaagactccccttgtggatgaggatgtaggaatctgcgccagtatccgtattgtcaatccgcagagtatgacccaggcggatttcgtgaaagggggaactgcaaccggagaaatgcttgactttttggcagaatgtatccgttatggaatctccgtgtgtgtggcaggggctactagctccggaaagaccacattggccggctgggtccttaccacggttccggacagcaagcgaatatttacaattgagaatggttcaagggagctggaccttgtacgagtgaaggaagggaaggtcatgaaccgtgttattcacacactgaccagggattccgagaatgagaaacagaccgtagaccaggatgaccttcttgacatggcccttcgatttaatccggatattgtatgtgtaggtgagatgcgcagttcagaggcttactctgcacaggaggcggccaggaccggtcacactgtgcttacgaccattcattccaacagctgcgagtcaacctaccggaggatggtgacgctgtgcaagcgcaaatatgatatctcagatgagactctgatgtccttagtaacggaag

SEQ ID NO: 3301 - DNA, 4857 bp, Unknown
  gut microbiota DNA sequence
atcaccaccatacaaaaccggatgatggacaaacaaaaataacgtaaggaggctatattgtgaaaactggtaaatctgccgctgccgcctggatgctctatttgcttatggtcatcatgctgttcctgttcctggcgccctttggcattgtattcttcaattccctgaaacccttaaatgagatacttctcgatcccttaagcctgccggaccagctgcactttgagaatttcacccaggcatggactatcttaaatgtcccaaaagcccttggcaataccgtgctcatcacagccgtatccgtgttcttcctggtattcctcaccgccatgtcctcctactggatatcacgccaccatgacgcatggtccgggctgatggaaaagatcatcatcggctctgccctgattcccttttccaccctgatgcttcccctgatcatggtactgagaaaaggcggcatgataaatacttacacaggcggaatcctgacttatgtcggcataggctttccgctggcttacctgataatgaagggggctgccgtgggcataccgctggagatggatgaggctgccatgatggacgggtgcaggccgtcccagacctttttcaaggtcattttccctcttatgaagcccacggtagcgaccgtcgtcatatccgacgtgttctggatctggaatgagttccagattgcactgatacttttaaatacccagaagctgcagacattgcagcttgccatcaactccatgttcggggcttattccacaaaatgggacattgccctgcccggactcatcatcagcgtagtcccaatcattgtcgtatttttactgcttcaaaaacatatcatcgccggaatgataaacggcgctgttaaaagttaaagaaaaggagataacacactatgaaaaaattgctttgcctctctgtggccgctgccatggcctgtactatgactgcctgttccggcagttcatccccctctccctccccttcctcccggaaccaggatgccggtaatccgggcagccaggaaaacacaaatcaggaggcaggaaacgctgtgaacctggtcctctacaacaacaagatagagacagttgaagcactgcaaaagacagcggacgcctttcaccaatcccatccggatgtcagcataaccattgaaaccacccaatccgagcagtactccacctccttaaaaacccggtatgccagcggggaagcccctgatatcttcatggtaacaggaaaagaagacatgcttctgtggctggataacctggaggatctctccgaccagaagtggacggcggacatggtggacatctccaaacccgacattacccatgaagggcgcatatacggcttcccggtgggcattgaggggtacggttatatgtaccgggccgacctgttcaaacaggccggaatcgagacagcacccaaaaacctggatgaactgagaaactgcgccgggcggcttaaggacatgggagtgacgccctttgtaaacacatggggcgcctggtaccaggccggaatgttctatatgaacgcggccattgcgcagcaggaggatccctatgcctttattgagggcctcaacgcaggtgaaaacctgatagagggaaacgaagcctttatccgcctggcagaaatgataaagctggactttgacaactgcgactctcctttaaacacagacttcgcggcccaggtgtcaaagttcggaagcggtacggcagccatggcctgcggcggcacatggaaccagccctccctggatgacgtggaccctgacatggaagccggccttattcccatgcccttcatggaaaaggatgaggacaatgacgttctctatgccggcgtcaccacctactgggtcatcaataaagattcggctgtaaaggatgctgccaaggagttcttaaactggctggtatatgatgaggagggacagtccttcctggtgacagagctaaaaaacatccccgcgttttccaatatcaccaccggcaccgactccatcggcccccttgggcagaccctgctctcctatctggaggaaggcaaggtaaagggaatctataactcccgctatcccgcaggcactgtgcaggcattcggcaccagcatacagaaatttgccgcaggcaacatctcacaggaacagcttctaaaagagctgcaggatacctggacaagcagcagacgttaaaaccaaagctgtgctgcataccggaatgccgtctccggcggtaaaacgagagaaatgagaggtaaccatggatatccaaagtataatacataaaatgacactggaacagaaaataagcctgtgcaccggcgcggacagctggcataccactgccatcgaagagctcgccgtaccgtccctgaccatgagcgacggcacaaacggcgtcaggttccaaaagccgcgcaggcttactgccccgtgcaatctctacgatgcaaccgtcaacttcagctttgacaatgaagctgctcttaagaacacctatgaggccacctgctatccttcgggctccgcccttgcatgcagctggtctcctgccctggcccgtgaaatcggcgcggcggttgccgtggaatgcagagcccggggcatcggccttttgctgggacccggaatgaacatccggcgccaccccctcactgcccgcaactttgaatattattccgaggacccctgtctctcaggagaaatggccgcaggcatgataaagggcatccagggagaaggcgtgggagcctgcgtcaagcattttgcctgcaataactcggatacgcgcagaacccgtttaaactgtatggtggatcccagggctcttcacgaaatatatctggccggttttgagagggctatcaaaaaagccgcaccggccgctgttatgggatcatataaccaaatcaacggggaacaggcctgcgagagcccctggcttctgagccatgtgctgcgggatctctggggctttaagggggccgttctctcggactggggagctgtaaaggactctgtaaaggcagtgaaggccggcctggacctccagatgccccacagcatccaatacatggattctgttaaaaaagcgctggaaacaggcgaactgtcaagccaggacctggatgaacactgtgagcggatactgtcgctggtattcacctactccatggagggcagggaacggccaaaggtggactgggaatcccaccacaggctggcccggcgggctgcctgcgaatgcgcggtcctcctgaaaaaccaggactccatactgcccctaaacccggatacaggccaaacgattgcggtactgggacagatagctgagtccccgctgttccaggggaccggctgtgccattgtcaatgcacggcaggccgacattcccctgaaggaaatcaggaaaatcggagggaaatccgtcctctacgccaaaggctgtctggacgggcagactaccacggaggaacttctgtcagaagccggccggaccgcaaaaaaggcggaccttgcagtggtcctgatgggcacctatcttcccggtgaatccgatgattatgaccataaaaacatggacgctgcccctgcccacagaaagcttctggaacgtgtgctggaggtgcaggacaataccattgtcattctctttaacggcaatacagtggcaatgccatgggccggacgcgtgaaagccatcctgcagatgggctatgcaggtgaaggcgccggaaaggcgctggcggatctgctgttcggaaccgcctgccccggcgggaagctggccgccaccattcctgaatccctgaaggacacaccggcttacctggacttcccccacgaaggcgatgtctgccgttacagggaaggcatatttgcaggataccgctattatgacaaacgaggccgcagggtgctgtttccctttggatacggtctcagctatactacatttacatgttccgacctggaagccagccgccagattgacgccgggacctacacggtttccctgaccgtcactaatacgggaggcagggagggcagccaggtaatccagctctatgtctgccctcctgccggccctctgttccgtccggtaaaggagctgaaatcctttgcaaaggttatgcttaaacccaatgagaagcgcaagatcattttcatcctggatgacagggacctggcctgttatgacgagcgcctggaccggtgggttactcttcccggaatctatacaatcaaaatcggtttcgactccgggaacctgccgcaatccatagagctgtccgtggaaggcagcgtggatgacagcccgcgcagccgggagctgcttaaactggattcccattacagcgatatctttgaaaaccaggctgctgcagaggaattcttctgttttcttgtggagcagggccttctggaaccggaacaggccggcagtcccctcctcataaaagagcttaaaaagacattttggggatttgcccagcacctggatatgaacggttccggacgaatcacgccaaaactgtcacaggaactgctggatcgcatgaatcaggccatcctaaggagcacacccggaccggaaacaacacaaaaaacaccataaccacacatcaaaggctgccgctttcaatttctgatagcggcagcctcattgttttaccccgatgatatgctatttccccctggtcccggaaaacaggaatcccagtacggccgccatggccatggtacacacgataagcccggaaaacctgagaaaataaaagttcgtcagacgtataatccccgacaggccatggtcc

SEQ ID NO: 3302 - DNA, 964 bp, Unknown
  gut microbiota DNA sequence
ccgatacatatataatagaaagaaggtactctttatcattccgatagatgataactgtaggattcagattaacgctttcccatgtgccgacaatggaaaataggttgaaggacggataatcttttttagttcttttcataagacgtggggtgtttgggtgattgatttttcgtttcactgtctgcaataattctttcaatatcggaagtcttataataaatcttactaccaatttgagaataagccaatcttccgctacttctgtaatactgcaaagttcgcttactaacgcctaacaacaggcatacttcctgactatccagccagttttcgactttctgggtatgagtgctgcacaaactttctatccgtttggcaaactccgtgaacctctcgcagacatacgaaaaagttctcttttcaatagttactacttccatactttcaattttaaaaggtttataaaacgtgtcgattttattttcatcggcaaataaaagaagaatcatgagccgttctcaaaactgtccgaaagtggcgaagtaaagttcttaatgacttaatatgtacttatcgtggcaacataatacaatgatttatagaccaaatactcattgatttaggcagatcatatagaaacaaagaaaaataaaccgatatttctttgtcaattcaaaaataacgcttatgtttgcagtgaccaataataacaaaacagtcacacggtatggcaaaagcatttgatgacaacgaaagaaagcttataaaggataaactcaaagaaggagctttgctatttatccagcaacaaggggtacgtaaaacttctgtagatgagcttgttaaatatgccaatatttctaaaggagcattttatctattctatacatcaaaagaacttctttttttcgatacaataatagactatcataagaaattggaaaaagaatttcttaatgccata

SEQ ID NO: 3303 - DNA, 13321 bp, Unknown
  gut microbiota DNA sequence
ccctaaattctctaaaatcaatcccaaatccccacttcagcgttaagattgtgtgaaaatttagcaataaatatacagttttttaacactttatatataccatgcccttaaaatacttgtcaggcgaaactatccttttaaaacatgcatcctgcaatgtccctgtaatgtaccagaatggacaggaacggtctttcgcggcaagctccaacccattgaacattttatagtcccctcccccgcccgacgaaaagcgttccggtccctcgtctgacatccggttatccgtctgcctttccagtagtagtgaaagttcaaacctatatgttgtgaaataacatcaaacgttgtataatcagcctataagctgattcgcttttacaactatatgaagctcttactattgcaatggacattacatttgccggcagatagttttgtataaaaatatataaaaaggggggacgcgggatatagattgaacacatacccggataaattatgaaacaatgcccatactgcggaagcgatcttccgaatgacaaagaaatattctgtgtcaaatgcagccatataatcgacgatgatttcctcctacgaaaagaaatcaaaaaagaactggaatcaatgagtccgaccaaaaagaaagcaaagagtaaaaagaatcatacacaaccatctgtatccaacaaacgtaaaaatgacggttatgtttctgtaaaatatgatgaaaaaaagtcatatgccaatgtagttttaatcgtcattgtagggattctccttttatatttgtttttaaaataattatctgagatgctttgctgtggcgctcagttgatttttgacacactaaaataagcccgtgaatatgcaatgcagctgcatattcatggacttattcagatgtccgaatatttagttttctatcttacacccttcccataatcgcctactcctctgcatctaacagataaggcgtcacctggtacacataatagttcagccagttggtatacagcgtattggatgtattccgccacgtcagcggcggcgctgaaaacggatcgttgtcctcgtaataattatatgggacctccggattcaatcccttattcaagtccctgtggtactcattatttaacgtcatcctgtcatattcgggatggccctggacaaatatctgccttccgtcccggctcattaccaggaacacccctgcctcatcggattccgccagaatggccagctccggatgctttaagatatccgcctttctcacctgcgtatatctggagtggggagccaggaaaaagtcattgaggcttctcaccagcggaaccttccggtccaggaccctgtggttataaatacctgacagtttcttctccatagggtatttggggataccgtagtggtaataaagccctgcctgggccccccagcatatatgtatggtggaggtcacatgtgtcttgctccactccatcatcatggacagctccggccagtaattcacttcctcgtactccagattctccaccggagccccggttataatcatcccgtcaaactttttcttctttatatcatcgaatgtaacataaaatttgttgagatggctggctgacgtgttttttgacacatgggtggacagcatcaggaaggtacagtccacctggaggggtgtattggacaatgcccgcataagctgggtctctgtttcttccttgagaggcatcagattcagaatcaggatttccaacggacgtatatcctggctcatggccctgtcctcatccataatgaatatgttttcttcctccagaatcgcttttgctggcagatctctctgtacttttataggcatgttcgctctctcctttcaaatgttggctgaattccacacggaaaccgcacagcgtctgccaaagccggcagatactgtgctacaacattcgcaggaactcctcctccgagattatgggaacccctaattcctttgcctttttattcttggacgaattggacgctgcatcgttattaatcagatacgctgtctttgctgtaacggagccagtgaccttgccgcccttgctttcaatcagctcctgaagttcctttcggtttgcaaaatgctccacggacccggttatcacaaagttcattccctcaaagactgcctccccggctgtctccggctgttccttttcaatgttcagctccgccagcagacggtccaccatctggttgtttctccctaaagcaaagtagtccatccaggcctgggccagaacaccgccgataccatccactgccaccagttcttcctctccggcatggcgcattttatcaaaatcatacttgaactcgcggcacagcatttttgcgttagccagtccgattcccgcgattcccaggccgtacaccatcctgggaagggtggtgttggacgcggtctttatggatgcaatgaggttatcgtaagacttctgtcccagaccctccatctccacgattgcatccctgtgttcttccaaatggaatatatccgcatattcgtgaataaaacctgcctggatgaatttttccagggtggcctcagacaaaccgtcaatgttaagtgcatcgcggctgacaaagagggtaaagctctttatctttttggcctggcagtcaggattggtgcagtacaggctctttacatcatttaccttgcggatttccgtcctgcctccacatacgggacattcctccggtatatcctttaccccgctgcgtgtcaggttttcctcaatctgagggataatcatgttggccttatacacggttatggtatctcccactcccagctccagcccttccatgatgctcagattgtggacactggccctgctgaccgtggttccttctaactccacaggctcaaacacagccacgggattgattagtcctgtcctggaagcgctccactcaatataggaaagggcggtctccctgatttcatccttccatttaaacgcaatggaattgcgcggaaacttggctgtacgcccaagggattctccgtaagcaatatcatcataggtcagcaccaggccgtcagagggaatgtcgtttccttccactgcctttgcaaacccttccacggacgcaggcaggcttgctgcgtccacctcttcatagtggaccacctcaaatccctggcctttcagccactcaaactgggccttcctggagttatggaagtccaccccatcggccttcaccagggcaaaggcctcaaaatgcacattcctctccgctgtaatctggctgttaagctgacggacagaaccgctgcacaggtttctgggattcttatatttggcatccacatcctcgattccgctgttaatccgctcaaagtccgaataggtaatgacagcctctcccctgagaatcagctgtccctggtaggaaatatttaacgggatattggcaaacaccctggcgttgggcgtaatgacctcgccaatctccccgtttcccctggtaaccgcctttgcaagagttccctcctcataggtgagcacaatggtaagaccatccatcttccaggacagcagtcccttctggtctcccagccattcctgcaaatcctccacactctttgtcttgtccaaagaaagcataggggaaccgtgggtctccttaggcagctcgcttaatatctcataccccacctgctgcgatggacttcctgacaaggtgaccccggtctccttttccagggataccagctcgtcatacagcttgtcatattcaaaattgctcatgatttcccggctttcctgataataagcctttcctgcttcccgcaggatggaaaccagttccttcattctctgaatcctgtcttccattctgttctcctgattattgattctttctctccttaagggacagactggaggagtccttaagaagccctgtaagctcctcatactcctccttggttatctggcggtaagcgcccgttctcaaattgcccagacgtatgttcatgatgcgcacccgcaccagacgtttgacctggcagccgcatgcttcacacatccgccgtatctgccggttcaggccctgggtgaggatgatggaaaatgtattccgctccaccttcttcaccttgcagggcctggtcacctggtccagctcaggaagccggatccctcccgccatctgttccagaaaacgttccgtcaccggcttatctatggtgacaatatactctttctcatgagcatttccgcttctcatgattttattcaccagatccccctggttggtcatgagaagcagtccctctgaatccttatccagccttcccacagggtaaatccgctccggataccccaaaaagtccacaatattctcagctctgtccttatcagtggtggtacatacaatgccttttggcttattcactgccaaaagcaccggtctgggccgttggctccggtccacccggaccatttttccattgcataccaccttctggcccggcgttactttctgccccatggaggcagggcggttgtccaccagcaccttgccggcttcaatgagacggtccgcctcccgcctggagcagactcccatctggctcagccatttatttaaacgttcttccatcttttcccgctttcttctgatatttcctcaatccctaccgcttctcagcagccggatgggctgcaataaacatagcgtccccaaaggaaaagaaacggtagccttccttcacagcttcccggtaggcatccagtatgtgctcccgtcctgccagcgcactgaccagcatcaccagtgtggactggggcagatggaaattcgtaatcagggcgtccaataccttaaagcggtagcccggataaatgaatatctctgtccagccggttccggccttaagcacaccatcctctgtggaagctgattcaacggtcctgcagctggtggtgcccacacagataacccgtcctccggccgctctggtgtcattcaccttctttgcctcagactcctccactatataaaactcggaatgcatatggtggtcctggacattctccacctttacagggcggaatgtgccgagtcccacatggagggtcacgtgggcaatcttcactcccattccctcaatctcagccaaaagctcctgggtaaaatgcaggcccgccgtaggcgccgccgcagacccttcatgcctggcatatacggtctggtaacggttcttgtccttcagctggtgtgtaatataaggaggcaggggcatctgccccagctggtccaggatctcctcaaaaatccccttgtaatggaactgaatcaggcggttcccgtcatccacggtatccaccacggttcctgtcagcaggccctcaccgaattcaatgacagttcccggctttgccttctttcccgggcgcaccagagtctcccatacatcattttccctgcgcttcagcaaaagtatctctattttggcccctgtatccttcttcaccccgaagagccgggccggtatgacctttgtatcgttaatcaccaggcagtcccctggccgtaagtattccgtgatatctttaaaaattctgtgctgtatctcccctgtttcccgatccaaaaccatcagcctcgacgcggagcggtcctccagcgggtcctgggcaatcagttcttccggcagttcataatcaaagtcctttacatccatggtcaatcttatcctccaagcctattctatcttcacactggaaccgcctgccgtaccggcactttcttctgtaccggaaccgcctgctgtgccggaatcagtcccctggttttcctgggcggctgccggtgttccttcgctttcccgggcatttgtaccttcctgtccggccgggacattctgtatcccttctccctgggaattctggcccgcgtcagcagacgggtcctgggacggctgaggacctccgttttcctgggtctcgccgccttcctcctccaggataaccgtgctgtctcctgtctcggtctcttcctcggaggaatggaccactgctccgttccttaaatccttgtaaattcccgcaagaaccgtatcgctctcaatggcctgtctcagcctctcattgacctggttggacagcagcttcacatcctcagactggttctgcttcgccacataatccgcctcgtcacccactacattctcccggataatgtaattgccgttgtcatccttgaccacatagcaccacataaggcccggcgccaatgtctccacgcgtctgaacttcacctcataggtgacataagccacataggaatcctctgtaagtcccggcttggtatagcagacgatatccacataatcctcaatgtataccgcctcattcttcagttcttcctttcgcgcatccagccctgtatcatcgctcttaccgaatatccggtacagggtctgcgcatcctggtccaccttggcctgaaaatactcgctaatcagctggtttacctggggtatctcgtcctttttcagctcatactgggaaaaatccgtggtgtactggttgttgtccggctccaccccgctatcatccggcgctgcggagctgtcgctgcttatattgatatcctcatccgaggaaagtgacacgtccgttggggcggatgcttccttatccgacggtttcctgtccatcaccagtataactgccaccagcaccagcacaataaccagcgggattgccgccatgcgcatatattttatcttatcgtccgcagaacgtctgctgcctgtccttcttctgttttgtctcatgattcaatcctcctgtcccgactgcgaagcccggagtatgttagtgttcaagtatctccgctctattctagcaaaaagcggttcaaattgcaatctgtaccaaaaaaataccgcagataatccaacactgaaacagattatctgcggaatcctcacaagggcattctgcccctttttaaccaatacaaaatgcgtctgataggaatcgaacctattgtccatgcactgttgttgcctgtaaataaaggccgaagcggaccgtgaagtccactctgacccatcttttgacccatccggatgatattccggtggaataatccccctgaaaaccggtatgccaattgactttatccgttgatttcagaaactttaaaccagaatccgaatactgatgcataagcaatttagtaaagctcctcactgccacttataagggctgtttgatagagagccaatacacgtataaaatcccttcttgataaatcgccgcgtttatcacataataaatcattgtttactgtcagaatatgattgcatcgtatgacggaaccctctttcagtcctgccatccctgcgtcaagcaaaacgtaatcatagtctgtcctcggttcatgggaagttactttaaggagaatgaccgttgtatgcatatcatcaaaatccgttacaaccgctggcctgcgcttggttttctgagagtctccctgaaacgggaactctatatcaataacagtcccctgaatatacatggaaactggaatacgcatatagtaccccctattctacatagtcgtcttcatctgcagcccggtcgcctatcagtttgccggaactatcataaattcccgtgttcaggcttttccagacccttcttttactgctaattggtatatccctcatatcgccaagcagctttaatacctctgcatcagacatttggctgattgtttctgctgtcacctgcttcattatcatacctccaccatctatctggtatctaaataaaaatgttgttaacatactgcttctgactatattatacattaaaaccatcggctttacaacgctactttaaatacgctcaacagactgggcggactgcatcagctgtgtatggaggacatggatgtattttccatatgtagtattaatatctgaatgtcccagcagtttgcttactacgctgacatccacgccccttttgagtagtcttgaagcgtatgtatgtcttagcgaatggattgtataatctttctccgctccaattatacccatgacacttttaaatgtgcgaagcaaattcctttcgctcacataccctccgtcctttgtacatactacatagttactctggatacccatccgctggttgtattcctttatctgttttaggagggaaactgccatgtcattaagtggggtaagccgctctccggcctttgtcttagtgggttctggaaaggtcgttttatgccggctgattgattcccccgcgtcattacgggttttagcctttgccagagttttattaatgcgggctgtccttttcttgaaatcaatgtcggtccattccaaagccagaagttccccaacacgccatcctgtattcagcatcagcagaagcgccggcatctgtttaaagaattgattccggctcttttttatcttctcattaaacgcatacattgcctccgtctcctcctctaacagaatttctgccggtttcgtttttacagtcatattgcgttctatcggcagcgccacggcttcacatggattaaaatccagttctccagttttatatgcgtgactaaacacatttttcacaaattcatgatgcttttttacggttgaatatgctttcgttctggctaaatcattaatcatttcctgaatgtcatccgtactaatgttccccatctgaatccatcctaaatattcacatactttattatatgtttgctccaaacggtcgtaggacacaggtttcaatactgggtatttatatagccgcatccaatgcaaagcataatccctaaaatttatattggcagctggtgttcggttcttcttctgctctgttgcaatctctttcagcttctcctttaattcctttgatgttcttccgtatatggatttatatgttttcttaccatttgaatccgtgccggtatagagccttacttcataccgtccatcgctcctctgccttattgtataaggtgagctcactcttctggttgctaccatatctaattcctcctggattaaatattattacagcttgatttttttacctgcattccgcttcatccacttatctaactcttctgccgaaatgacgtaatcattgtttatttggatgaccggcaaaataccggattccagtaggcgccgggttttgtcccgaccgtagccaaacataacccctatttctttcttgtgcagaagcttcttactgctgtttctgttcaactcttccatgttaatatctcccttcttttattcgcttacacttttaagaagtacttttcgttgactaaaagcccttcgcatggacataacttctgtattctcaactccagataacataccctcctttgcatcctctatcatgcagtctaagacatgtgcaaaagccgaatgccctaaattacactgaacaaccatatctcgtttgtattcaaccgttcttcttctctgattacgtggaagattatgattgcaataatcagaaaaatattctccaatttcctcttcatcctttggagcgatacatggataatatttggcatagcgatattgtttttcatctctaagtgagcaagcaatcaagccacatctagccattgcccccaggcttactttatctaaaaaatgctctggtattactccctgttttattttgttatccacaacatacaacatcttatccaacagcttatccctgcctattaccagaattccccttatatctgctgactgttcacaactttttgtggaccaagagcgttcaatatcatctatatataagaaatcatcctcttcccataagcaaaactcttgctgctgccatacacacccatcacatactaaaaggctttcccttctgtatttcgcatgacgtatccgggaagtttgaaccacttctgtcatagcttgaacaagcaatgcctcaagtcctccgagcagtaaagatgtatcctctactattttttgtatgctatactctccttttctttgaaattccacctttaacccttcgttattaaaacccgtatcagttatatatttcatccaaatataatgcatgaatctcatcatattatcattggctttaagcctagctccatttggaacattcgcatatatggattcctcatcctgccctctatgataatgctttttccatttatcaaggacatcctggtcttccatttccatacagagccagcatataaagtctcctattattcccggcaacagcctgctatttctctggaattttcgcaaagactccgaattccccttatcttcaaggaaacccgatacatctttatatagtaaccttgcattttgagattctgtagtctccatatattctccggttataaccgcacatgtatccacgctggtatccttctgcccatagttttctgtaaggcatccctgaaatactcctcttaacacagcgtcaaccgctatcctgcaatggtcacgttgcccttggaccttttcctgtttcacatcatccaggataacaggcattccttttgaacatgacaaggtttccagaatgtaacgtttactggttgtcgcatacatcaattccttatttccaaattcattgacctctgtaaaaactgctaatgcctctgccagttccgtctttccagagccagagtttccatacagccatactgtaattccgagttcaattccctgttttcttaagggtagccgtaccacactcatcaacgttattagaaacaatggatagtatatttctatgttttgctttaatagacatatgaattcctctatttgagttcccctttcctcctgctccataatcactttacccaagaaattataacgctgtattccagagtgttctttaaagccaaaaccccttttgcttattgaaccatttgacaggagaaatatccattcacaatttcgctccacaaaccctaccctatcataaatgacttcgattggagcaattccctgtaactgtgtctttattgcagttattaacattcctgtaaacttctttttgtttttacaccaaactgcaaagggtatcttataaatccaccttacgctattcatatctgctgctgatacatccattactaccttttgtttcgttgttgtaataatccgtattttatagtaactattcgggataccgttttcccaacgaacgagatgtccaagaaattctactgtaaaatcagtaactggctctccgtcacaataataagtttcatcgataatctccaagttcttaattgatagcaccataattaatgcctcctactcctactgttttaaaatgttaggttccatcgaacttactaccggccagtacttcgttctaattattattataatcgaattgcacaccaattaaaaagatagtaaaatgattctcatttgacgtttttaggcttataaaatgactatatctacacaaatgagacctaaattatataaattaaactttctattaacaatatcttaattaaaaataaccgttcccactatcggaatcggttatttttagttacctctatcttgataccattaacttttcggaactctccttctcacggtaatacattgcctttgtctgcatgcacagtgctttggatggtatgcatttttcccattgtctatattcttcaaacagttcagcattagcaattttataaattgactcaaactcaactctatcacactcttttacttgatattgaaatttaaccatatcacagaacctcagataccgtaccgtgttaatgagataatccgtcatattttcccaattttgcagttctgatagaaaatcatataaaagacactccctgtcacaaacctccagttcccttattttcttaaaaatattatctaactccttttctatccttctctgcgaaagtcccctttggcctgttttccttatctcgtaacagaatcttgcatcctctaataaattccttggagttaaacaagtcctgtcctcatagtcatctatttcttctaaatctgacaaaatacagcttaatggcaatttaggcttggatcttttgtatttatattcacaatgcatcattattttatctgcacagcgcatagatagcatattatcaactatttcctggtactcaaagataattttcgttatttctggtttaatagcttcttttatctcatctttatctatcacacataggtttatgtcattataaatccgttgtatgcctggatccaattttccttgccagagtaaatcttctatataatatacagcaagttgataaagatcctctttcaattccctgtatttcatcagtgtttctaaacccttatccatctgtaactgctcactaaaaataacacctccaagcctttgtactaaatcatatataataaaaatatctggtttttttgtaaacctctcacacagccaaaataatctacaaatatctttaagttctgatttgtagtcaaagaatatctgaaaatccagagtctgctctaattcttccaattctttgtaaaaacagtcttttcgcttattccgatccttcataaaatattctgcagccctattattctttaaaataaagtcatatcgatatttccgaactaagtaatatccttttcctctcgttccaccaagtatttctggcaacttagtcatgtcttgaccctcattgttatctttacctttacagcttttcgataatatctttacagctttactcagattttttgtaagggtagcatacttttttccctccttgggagaaataggcccatataaattttcgtattcactaacaatttcttcggaattccatatcaaattttttttatccgcgttgtttagttcctctatcatttcgcttatcttccttttatctttttttctatatcaaagtaccctggattataaaaatccaaaaacaccatgatttataacttttatccgcaaacatccatctccctatcaccttccatcctaaaaacctattctccacctgaaagggaaggatttctgttctgtccatgacacccctccctctctttttagaatatcaaattttcatagtcacaccttgcatccatccgtattaagcatgtcccataataaccgtgcccccccccccctgttgctttaattagagcaaatatctcaggacatttatttcttaatttataattataatgtaattc

SEQ ID NO: 3304 - DNA, 33683 bp, Unknown
  gut microbiota DNA sequence
aagcaatgatagttatcctattacaaatccgctcatacctgtatatattctcagaaagaacgtcttccatcggaacctctgtagcattaatacatttcacaagctccgtaagtgccttgcaatctatatccccagtatcttccaatagcagcacctcatgcacactggacggcaaaataatgatgtccttccctctctgctccgcaaacttctctagcactcctgaatagagcatgcaggcggccccattgatacctctggacgttgtcaacacataaaagggggcatcttcctcacccctatcctcgtctggttcctccccaaatgcacatttcagatcctctatgatttgcgttatactattaatttgagccggcattacacgctgcatattctgcagcgcaatcctgtatagcatctgcgtgtcaactccccataaggcaagatgttcattctgaatctgggccgtcatcatacttccactgtcttcatccatatataaataaaatacaatggaaaggtcaagatatggtatatttggaacctggttcaaacgttgttcattgttcttcgtgtgaatcagcttcaacatgaccctgtccctggcctttccgaagtcataaaggtgctccgccgatttcaagactgtgtcagacaggtccccattataacgaaaacagttcacaatcttccttgcagtaagttctacctctgtttctgtatccgctctttcagcgtaatagtcatccaaatagatgaccgggctcaccttctccccggccctgcatatacttatacctgtcagaatgattccattgtttttcggtactcgcctgagctctatatcatatccatcacccagaatctccttgacacattctacaacctcatctgcaaatagttccaatgatacatttaacataattccgttcctccattttcgtaatcaattaacatccctctaatatcttcaacaacagggtcccggccaaccggaccgcctcctcaacctgttccgattccgcctctcccgtacagcaccagtttgcaaaatgttcacagttgtttgacaccaaatcatatcggtcttctcccaaacggctgaatgccctcttccttatttcttcccctgtataaggcgaatcgaaatgggggacctcctccataatctctcccctcgcaaacttctccactgtatccactgtgatgccatcaaatgcataatggattacaagaccttcccctatataaatgccatgatgctcatatagcagccggcccgcctttaaatggcatcctaccttaaatttcttatgctccatattgctttaaacctttcctgcctgatttcattggataaaaagaaagccacaatccgtttccgaatcatggcttaccctccatcctatctcattatacgcttaatattatcctggcaatccttacaccatcctctgttctccacttatcacctgatatgcagatggtccgtcatacatcacaggccatatctagtcccgttccaataaccatcctgcatcacgcttatcccagaggattcggcgtacctccataacatcatctataaccacataatagataatgaaattccccacataaattctgtaatatgggtgttttcttgccccggtgccttgatacggctcaaaggataccggaaattccagacgtttccagattgccgcctccacacgctccagaaaatgatatgctgcatccgggttctggagtgtaatgtaatctacaatctcctccatatcagagacaaacagcgggagataccgcagcttatagtgcttctgctccatgtatcctccccttcaatccgctaaaaacttcctcgtgggtgagacggatatccgtttcttccgcctgtttgtccgcttcatccagcttcattcccacatcaccggtaatcctggaatattcctccaggctcagtaccaccatggccccgtaaccgttcttcgttaagtatactggctggttttcctttacaagagtctctatttcaggaaacttgtttcttaaatctgatacaggtctgatttgaatcatgatatcgcccctctcttaattatatcattattttatcacaattttatctgacactcaagacagacctgtatatttctattgatttccattacttctcaaaaaccaattttccttacctaaatgccttatgtcccagacgcagcccatccagaaacgcatctttgtaaactgccacacattcctctgcgctaatacagagcatattgctggcaaactcctcaaacttatcctttgtctcctgatccagacttttcatgatggcctcctgttctttataaaatatctttgtccctttcagatctccgtgcaggatctggttaatcctctccattatcatttcttctaaaaagtcatatgctgttggctccatcccttccccgcccttccttatgctgcctcagatcctgcttcttccggaaggcattcgttcctaatctcactcatatccacagcgattccggtcttaatcgtctcgtccatggacagcgccttttggaaatcggaagaaataggggcatatttcaataccctcttaatcacggtcttttttgccatagattcatagtcctcagtccatggactgtatttacttccgaaagatttagagtaccgggcagcaaaggtgtccatttccgtcttgttgctgacttcaaacccataaccaccattggaaagcttgaaaagaccataaacataggtaatttctccccgcgccccctctcccggcttatgtactagtttggaatcaaggccgtactggtattcaaaagaatcgaattcccggaccacctgtgcctgaataatttgtacttgcccggtccggtaggccaaatcaatcagtcctttatagcctagctgaaactgacactccagcttacccttatttttatagggaatcagatatgcctggcccaggggtgtattgggctcaagacctaactgggcggcatttaagagcgcagcaataaagctcataggggtacactccgccagttccggcgtattgttaatagatgacagcgccatcctggtaaaacgttctggtgtcagcaccgctggaagtgcccggcgtatttctggttccaaagcctttaccatatccacaattgtcatgttttttgttaatctgacagaggctccctggcctgctgccctttgttctaattcgtgctttacattaactcccatactgataaatctccttttcttacgctgccttaactgtaaaacgcctggagctggtggtctgcataaactgcctgtatacctctggtttttcctccttgacccgtttcgtatccagcctggccgtatccacattggtccatgtgattctatatctttcattaaatgcggactcattgtccttcatatacagctttatttcctgctcaatctgcttctgttcctgttccagcttcttcatcagctggacaatctcctgacggcggtttagtttttcatcaaaccctatgagaggaaccgccgttcccttccttgcatgatggaaatactgttctaatacctcgtcacaggcatttgaaccgtccgggtccggcatcacacgcttcaacacatggctgttccagaaatcatcctcaatggaaatcaggttccgtatcatctcttcatcccaggacagctttctatactggaaaccctgccctaaaaccaccaccgctatgtaccagttcttccttcccgtcaccgccatgtaatggtaacactgtatgacgtagtgaggcgggatttccccatccttccatttatccgcattgtaagcgctggcagtcttgcattccaatcccgcatcctctcccaccaccagccggtcaacatccgccagcataaagggataccggctgttgacatacatcatattgcttttcctgactttgagtccgattgcctccgtaaaacgcctggccacatattcctccaggtcccttccctgacgcatggcctcgttatctgatgcacttatctcctggcttgtcttatcctgatagacgctcatagggcttgcatacgggttcagaccgcagattgcgccggcatccgaaccgccgattccttccttacgccttttgagccattcttcatgggtcatacccaatgttgaaaccttagtaatcatttttccgccctcctgtccttgcttaaagtctcttaaaaatcctgataattatttcaatgataataaacggcattaagctacctccccatccgtatatgaaagcatcccctgctctttaaagctgtagcagcacgggccttcccctactatgatatggtcaatcagcggtatcccaagtatcttcccacactcttccaaccgtttggtgagcttgcggtcctccatgctgggtttggggtcaccggacgggtggttatggaagcatatgataaacgccgcgttattcagaactgcatgcttgaagatatcccggcagtcaatgctgcaggcgttcagtccccccactgcggcaatctccagagcctggggctccagcttcgtgttaagggacaggacaagcgccatctcccgatcagccatctcaaagaggggccataccatctccgccgccattcccgggtccgtaaagcgcgtcataccataaagagcccggccctcccttaccatttgaagatggacaatccccaccttctttttagggatggggcgtctcatcatgccttctactatctcatcgtttgatttccgatccatatgtttcctccacataaaaccgggaacgccgcaggctgccgccttacattcccgggttacgtatttttatattcaattgtcattgttttcatcatactgcctgtcatgcagcctgcagcatggcaaatgccctgtctatcaatgcatttccctctacggtttttgcaaagaggttctccttgtggtttgcgctttccctcaggggcctcgcgtgtgtggcaaaatccgataccgcattgataaaacgataaccgttttttcccacatgctttaaatccggcgcatcaaaataccgcgttttcatatcttccttcattcggttcaagttcttttgctgctgcggagtcggattatcatatagtgggaaaagggcgtcaatatactccatgacctggcgttctgaaagtctgagacgcttcatatgatctattgcctttcccagctccgacatgtaccggtccgcatacagaagcgtgtaacgggcgtcctccatcttgcccgcaatatcacctgtatggttggtggaccaggagcgttttgccgtagacagggccaagttcagcgtgttcatgcagaccacacgtaccggcgtcatggctacccgtattgctcccgtcccgtcatgggtattcataaagaccatgtatggcgtaatctcatccccacttatgatataccgctggggcagtttggcaagcagccatgtgcgccgtccgttctgcagcgagcctgccgtctcataagtaacgccctcgcctaacagttggtctgtaaaggcgaaggcgtcttcattctgtactactttataacggtcggtgaccactcccagaacccggctgtctgtgttccggatattggccttgaagccagatatggcctgtccgtctgtggtcgcaatgggtctctggatgacctgccagtccagcccggccagttccaaagcctccctcgaaccaggcgcatcctccactctggtcccaagtccatgccagggtttctctctggtgtaaaacatagtttcaacttctgctgacatatacattacctccttgaaatgtgattggttattggttcaaggggataatatatatttgaaattgtgggtaataccatatttcaatttatgcagtcataacataaaaaagtaaaagaccctactctatttcatatttttttaaccagttaaaaagccaaaagagcaacaaactgattttgtcactctcctggcaaccacaagttactgcatattttctaaataattatagtattcggttagaatgtctgtaaatgaccgagttgtaattaatatatcagctccaccaacatatagctctttgttaaaaccactgtcataagaaaacacttttccaaacacaataaccgtatctccttcttttatttcagcatccttagcagcagccacattgctttctatcggccatcctacagtatccgtatatgacgggtcatatcctgatacccatatttgatacccactatccccataatcagctactaggttgactgtaccataaaaccaacggtattcggctaagtcaaaattctttgtttgatgcgcatcgggtgaagcgtaagtacaatatgaaaagtaatctgaaagattcttccctgcttcatatcctatatatgatggatattcaaatataatagcattatcactttcctcctcatagaaactgtccgctttaacattgccataatattcttcttcggcaaagaccggtactgcacttcctactgctataattgctgcaaatagcatcataacaaaacttttcttaaacataatcattccctccacttacttttcataattaatcatttagatttttctgtatcaatttaatgggcttacgcttacaagtgaaaatttaggctcatagtcccaagggaatatgacagtagcatattgtccatattcatcaaatccaatgacaatgccgccttcctcttccgaaacatacgcctcatcgttgacattataaaaaccgctatattctgtaatattaccgctggcggattctgtatcatacattatcatgcttaccctgcttccttcaacagtcatcttcatatactccacgcctacagacatctcgtcaggatccatattacgatatgtatagattccatcttttttgggaatttcaattgaagcatcgaatgccgaatctgcctgttcctcaaaagcttttatcttttcaatattagctttctggatttttgtaagaactgactcactaaactggtccgatggtactattccctgataccatggcttactgttaaagtaatcaatcaagtcctgagatgtaaaaattcttccatgggctgcatatatctcatttctggcaatccgcagctcttccttagaaaagccaacaacatctgaatctgataattcgctatcatatgatttccataagagaatggagtccctatatgggttatctgctaccgtctcagaaaaattttcagaaacatcatattcttccgataatacttcctgaaacgaattagcaatcatctcatcaacgaatcctgtatacttagcgtttatcgtaaaaaatcccatatagttttcgtctgttgtctcatacccaataacccccttgtactctccccagacagtaataatatcatctaattgtaaattcggattcccttcttcatacaaagttatatatattttgccattcatatccattcctctaaagccaccattgagtaattggacaatttgcatcgtgacacataaacgctctccgacatggttatcaggatacctaaaatattcattataatcaaagctttcaatacagccactcttatattcttcttcggcgttttggatttcagtggtatctgacactcctgttacgttctcgctttctactgtagtcccaatggtcgctgcctcttttttatcttctcctgtattcacatccccgcaagctgttactgatgctgctaaaccaaacgctaataaaactgccaagcccatcctcatcatttgttcccaacctttcttcctggaataataaaagctaccatatcacctggcagctccatataaatgcaactggctgccatcttacaggccctctagttttgcgtcacacgttttcacgtgctttgccccaatatttacattcaacaaatcaaactatatcaacaaatgccacccaccatccccttatctacccaaccgaaatcatcattacgattgaattatcctccatcacctgttcttcttcaatttcaaacccctcttccataattttttttctaattcctatatacgttttttcctgaagtgctgcataataatcttcatttaaacaatcaatacaatcatgcagatgtctcatattcttgctggaagaattgatttccaaattaaaaggctcttcccccttttgcctgctaaaaatcatatcatagttttcgtaccgacatttaatttcatcctcggaataggttaatatttctatctgatatcgttcaataatgtcacacagcaattgcacatccacatagatggtaggatattcttcatagtataaatctgtcacagactcagcggcttgctgtatctcctctgcactgatatttacggaatccttaccgtcctcatagaatatttttttctttgctcttccttctactgcctcaataaattctttaatcgctgctttatcatcatatactgacattcttgctacaatttttccatcaatatctttccacacaaaataggacgacttattttgtgttaaatgagtttttaaagagccataccattccgtcacatcatatccagacgcttcaatatctctccgcatctcctccatggagtcaaacgttgtatacagcaagtagtcctttgattcaatccattgttcaaatttctcctttcccataattccacgcattgccagcgcaaggggcaaccccaacatcactcccattaatgaaatagacataaaaacctccctcccgttttaaaaatccacagaacgtcctcctctattcttcttgacctcgtcctcctgttctgtaatcttagggtcctgaatgttttccttctcttttcgttcatactcatgtctgtcttctcttgctgtcgcagctacggcccgcacattggcccaatttcgaatctgcataatctgctctgattgtgtgaccgataagggaaccatattagaaataactttaaataagtcttttatttctagggccctatcctcagaaaatgcttcgaaaagtgcagctacaacaatttgctctatctctgctccggcaaatccctctgtcctgccagataactctgttagcaatccatcattaatatctacatttcctgatatttctgaattcgtaagcctcttttttaaatgcagttgaaaaatatccttacgctctttttctgttggtaaatccacaaagaaaatttcatcaaacctgccctttctcagcatttccgaaggaagattactgatattattggcagtagcaaccacaaatactgcttttgtcttatcctgcatccatgtgagaaacgtaccaaaaatccttgaggatattccaccatctccagaagaaccacttacaccactaaatcccttttcaatttcatcaatccataagatagatggtgcgactgcttctgctgtctgaattgctttcctcatgttttcctcagtacttcctactataccgctaaatatcttccccatgtccaaacgcaataacggcaatttccaaactgcgcttattgcttttgccgtcaagctttttccacatccaggcacgcccgttataagtacgccttttggcaaaggaagattatatttagaagcggtatccgaccacgatttatttcttttcaaaagccatcgcttcaggttctccaaacctcctacatcatcaatacttaaatcactctttacaaattctaacattccggtctttttgattacctggttcttttcatctaaaataatacttaattcatcaattgatagccgtcccttctctaccatagctctcgccaatgcattttccacttcctgcaacgttaatcccaatgctgccttgcacatctggatcttttctctttcagaaagcaggatatcaattttttcctgatttgcctcaatcatctcactcagagtttcactgacttcctctaatgtgggaaggccaaattcaacaatagtaacctccttctgcaaatcattaggaagtacaatgttcggagaaatgaataccatatttttaggatatctgctgtttttaagttcctcaaccgaatcccttactttacgaataactccataatctgctttcgaattatctgctccaaaatatacatgaaaatccttcagacagaaaattgccgcttcactgcaatctgctatatactctaacgcttttaccggggtctttgtatcagcaatagcctttccagtagtataactgcacaatccctgtgtttgactccatatgtacaaagtcctctgtgtcttgataagctgaacatcatttgcaatatcgctcaatatttctattgcccggctttcttcccatgtcggtatatatatgattggaaaacgtgccctaaataagtttgataaatgtttttttacgttaattcctgactgtctgtccatattcaaccctctcagcattaaatatcaatttttctcccagcctttctaacaatatctacagtgttacagttattttctgcggtacatattaaatgggattttattgatgctgcattactctccctaatgccaatacatttaacaaaatcatcaactgattcaaagttccccttttcattcctgatccttatagctttttttgctaaaatgataccgattccaggaaccagtgataattcttgttcatcacagaaattaatatctactggctgttctgatatctttcctatcgaaactggttttatttctttttccctgttgtcctccgtttttacacgccttacttctttcctatctttctctatctcctttttttggttttcggcctttgctttttccgcctctgctcttatcctctctgcttctgctattgctctttccgcttctgcctttgctttttctgcttccgcttttaccttttctgtctctgcttttttggcttctgccgcagccctcgcagcctctgccctctgagcctctgctttagcacgtgcagcctctgctttctgtgcttctaagctggctctttcagctcgagccctttcagcctcggctcttactttttctgcctcggccttccgtgcctctgcttttgccttttctgcttcggccttttgggcctctgctttcgcaatctctgcttctgcctgtaactttttttgccgaattcggtcttccttttctgccagagctttatcagccttttctttctcattaaaagcaattacccttaagacggcttctcctttatcaccaaaaagcatcttacttgttttcaataatctctcattctctggtatctctataaataagcactcctgctcgcctagtttctgaacattaatgttgttttttttaactaaaagacgtaaatccagacatctttttaattttcctacattagctaaaattacaaaagtaggaagaaataatagtatcatacaaattgacataaggatgtctgcactctctgcgtcataaacgccggctaataccataagcataaccattaagccacacagtaccataccagccagtttcattttttttaaccccatttttcctgccatccagatccacacgccataattcacaaatcctaagaatgacagtacagcacacataaacacttgtaatccaatccccagctttttcatatccttgctttctccatttcgtttacataggtttcttctagtgccatctcgtaaaactcatccgtatatgcttgatccactactctgttttgtagaatattttctaacaaaggccgaaactcctcacacttttgcccttttatccctaccgtttctgcttgcacatatccatttgcatagattgttacttttatctgtttcataccatcccaccatcaacttttaaaaattttcttatttttttcaaatctcccataccattgattttcacactaccgtcaggataaatcctgacttcatactggcttttggcttttatatccaccaaatccttctcagaatatttatctgacaaaaatatatatttttgattttccgatcccatccatggccttgaaaaatcaagcttattttcaataaaagggccatcaatcatcaaatctatatttcgcagaattctttgtacgcaaatatccctgcttttttttaaatcatcatacaaataacctgtaaataaaataactgacagcccctgcctttttaccgcttcaaccagctgggccacagcctctttttggtccaacggctctcctcctaataatgtaataccttcaatcgacctagtgtttacaatgtctgataccaaacattctacttgtactttttcccccacattaaaaggccacatatgctgattagcgcaccctgagcaatgtatagaacatccctgcatccaaatgcaaaagcgatttccaaatccctccgtttttgtctccttaagaatgcggttcaaccataactccataacaagtttcaccttcaattcctttgtgcctaaagctatacattccatatcatttataactaaaatcacatttatttagttgattttaatatggtcctgacccatctttctgtaaaaccatattttaatgccaattcctttgcatttttcccattatactcctcccttattttttgcgctgtaaagttggaagaatataatttattcgggaataccacctgctgtccccgaaagtttttgtacaaaatcttagccacatcttccccagccacctcggcaatatctttataaatgcctgccatgccttcccctctattttttatttcttccaacatatcccatctcctttttctcaactatatcactctcgttttgaagtttcatctcgcataattccacaatattctaactatgaaaaatacattattttttgtcattcgtgtctttgtgcttttgaaccaacctattaacataatccttatattctttaagtcctccatttctatctgaaaatttcttaccatcaacaaagcttacagaattaacacacacatgaatatgtactcccctgcctttcttgtgtgcggcaaataccgattgatacctgttaccataataaccgctaatatcatacgcaaatgcattcaaatcattgattgtctctgtctcctctgcactcaggtttacagagaaatgccttaactgacgcccaccatttttttcatagacatccttaaccatcctcatatcctcaattatggtttccgtagattccagattgaccccatagcccccttttatctccgggataatatcatccctatttcccttttcccggaacatatagttcaatacgcattccagcgcattataatttgtataattttttccagaatacttatcatcataggacttgccgccaaatactttgactgtcgccattagcgcagcacctccttaactgttttcaatgcgtccagtatcctttcattaccttcacaaaagtctccgttgcagtttatatatgtttgtatcgtgcatatggcttccacagccctctgtttggctggcttactaagttcgttcttcgcctgttctgcttgaaccaaatcacggatgtatgctgagatattcttatagtttttctctcgcatcttcttttcaattttggtatacattttctgagacatttttattgaaactgtcttctcttttgcatcctctctgcgcatagttcctccttctcagaatataatccgctcataaaaaagtaatacaaaaagcgtatcttgttataatacagatataatatatataactatcagttctcatgattctatataagactattctttaactgtctatatactgttaatattcatttatctatcctcttgcttatttcagcattatacatgtgttactattcttataactcatgacaactcattcgtactactgaactgttatatgtactttaaaattcaaacatatttgtaaatcaatcctcacccacaaagctgaaaaggcaaaacagaaaccgaacgcttagaatctgtttcaaactttttatcaattaacctgcgaagatatgacaacaaaaaagcattgcctcattcatgacaatgcttgaatatattttcattttcaccagaacaaattattaaaatattaccggaaggagtttttaacagaatggaagatgcatacatatcactaaaagaattttgcgaacggacatccatcagtccatccaccgcctaccgtatgatccaagagggaaggctgccggcagaaaagctggctggcggaaggcgatataagattcctgtggattttttaaagagtttgcgccccacgcacaggcactattgagaggtgacccatctgctgacccatccatttgacccatctttgacccataccaatcccctcccatcagcgggattgtgtcatgatggaattatatcagccagacgtataaaacaacaaatgccgcagaatcaaggtttcccacgactctgcggcatccgccaatcataaaaacatgcaatcaaaaatgcgtctgataggaatcgaacctacgcacgcggctccggaggccactgctctatccactgagctacagacgcatccctattatgatactatattttttccaaaacttcaagtcctaattttacacttttatccttttcttctttcccaccagcttaaacacagaatccatcagaaacaccgccagggctatggcacccgcaatctgaagagtttccaccaggtaatacatggattcctccctgctgttgcggataacataatatacactgttatagatggatgtaccgggcaccaggggtaaaattcccggcaccaggaacacactgaccggcgccctgaaaatcctggcaaacagatgtcccataagagccacggacagactggaaagaaatgctcccagtatcatggagccggtgcctgcctttaccaccagatataccagccagcacaccccgccggtcagccctgaccagcccaggtattttctcggcatctccaacaccagcccaaagctgagcactgccataaacgaacctgccacctgaatcgcaactaccatattccgcctcctcctgtcagctgatggaacagtgccatacccgcacccactccggccgccactgcgagagcagttaccactgcctccagcattctggctgcccccgaggaataatccccgttcagagtatcccgtaccgccgtggtaaagatgacgccgggcagcaaaggcatgatggcgctgatgataaccacgtcattactggcccctgtcagaatccaccggttcatggccagggcagctatcccgatggtaaatgcccccagaccattgacgcagaaatcattgaatcccaaacctgatatggcgtataccaccaatcccagaatcccgccgatcaccgcagctcccaggcaatccgcaggtctcccgccaaggaccacgccgaagaatacggcgataaacgcataactgagggcctttaactcccttttatactgacagctgtcttttatttcctccagctcccggtaggcctcctcagggctcataagaccgccgcacagccttctggacacctcattcacacggtatatccggttcaggttggtagagcgcgcctccactctccgaaccagggtcagcgcctctccctcagggctgtccagactcacaaaaatgcctgtgctgaataccatggtctgtgcatttctgtcatggcagcaccccagtatataatgtatggttccctctatcctggcaatctcggctccgctgatcagcatgatttccccggccaggacagcggtactggctatcagatggtcctcgctccaatgatgttcgtccactcgtctccattcctttctgaaactataatcgagtatatcagtaccatgaccatccgtcaatttcatttcttgccattttcccgtgatttccccaccattcccgtccatatagtcgataaaatgacaatatacccctggaaatcccgatagaatacggctttttccgccctgtgcctgtctctgccggcccggcagcaaaaaaatccctttcccgtctattgacaatcatggccttatggattaagctggtgtcaattcatttactttctgatattcatgtaatatctgatattcatttatagtttgatattcattttatccatcttaaatttatccaaggcaatttcaccggaagtttcccttattagccagttcagaaaaccttattattcagttcagtaaagatatggaactgttattcagtttacataaatatcatcaaaaagggggtatacatttggtatacgaacaatttttagctgctgtaaaaaaacgtatggaggcagagctgggaagcagctatgagctggagctgcacaaggttcccaaaaacaacggactcattctggatggactatgcatcaccagagggaatgcccatattgctcctgccatctacctgaatccctgctatgaccagtaccgtaagggaatgtctttggaccagattgtggcagaacttctgaccatgtaccgccagaacgatacgccgcctcccctgaattatgagatgctgtccgattatgaaggcatacgctctaatattgcctgcaaactgatacatgctgcctccaatgaagccattctgaaggatgtcccttacattccctggatggacctggccattgtattctatctctgcatacatgaggatgacaccggcctcatgaccgccatgattcacaacagtcatctgcgcatctggaacatttccctggaagatttgaaaacatctgccctgtccaattctccccgtctgtttcctcctgtcatctccagcatggcttgtatcatcgaggagatgaaccgcggactgaatccccattttcaagaaacccatccaaagccggaaacccctgctccgttttacgttctcagcaaccgttccggtatcaacggcgctgcctgtatcctgtatgaggacgtattaaaaaacttcgcagacggggtggaaaagaatttaatcatccttccatccagcatccacgaagtcctgctgctgcctgacgacggcgatatatcctatgaggagatgagccggctggtgactcacattaaccggtccgaggtccctgaggaagaccgcctgtccaatcaggtatatctctattcaagggaaacgggggaggtcaccatggcatcctccggccccgcttccatttgctgaccttaaaattccgggcagcccaggctgttccccggtacggtccttatccaaatataagactgcccagctgaaataccagcattgcccctgcccaggccacggccagctggaacagcaccattcctatggtccatctccaggatcctgtctcccgtttaatggttgccactgccgcgatacagggtgaatacaggagacagaatatcatcagggcataggcgttcacacctccaaaaccagccatggcgagctgagtggaaagcgctgtcataccggcagcggagtttacattgctgattccgtacagaacgctgaaactggagacaaccacttcctttgcagagaggccggaaataagggccactgccacctgccactgccccagaccagccggcctcagaaccggcaccagaacatgaccgatgattgcggcaaagctgtgggacacgtcagacacgaatccctccggaccaaggttcagcacgaaccagagcacgatggaggcaatgaaaattgtggttcctgccttgctgagatagtccttcaccttatcccatacatagatggataccgtgcggccgttaggcgtcttatactcgggcagctcaatcagcagggcgttctgggcgctgtcattctttccatggatatgtacgataaacgccaccaggattgccatgcacaggccgatgatatagagggagtaggccactatcagagccctgtccggaaaaaacatttccgcaaataatacgtaaatcggcagcctggcggaacaggacataaagggtgtgattaaaatagtcctccgcctgtccttcacactctccagagccctggtagccatgaccgcaggaaccgtacagccaaaccctaaaagcatgggtaaaaacgccttaccggacagccctaccatacccatggtttcattcatcacatacgctacccttgccatatatccgctgtcctccaggaaagccagggcaaggaacaggatgaaaatattgggcaggaaagtaagtatacctcccacgcctgcaatgatgccgtccacgatcagggaggtgatccactgagccgcgtggacactggtaagaagtgacaggactgcaccggaaaacatatccagacccatctggaaatactcctttaaaaaatcacccactgtaaacgtcaggaaaaataccagagccatgatccccaagaacacaggaattccccatacaggatgggtcataagccggtccaccttatccgtggtagcagccttttcatccttattaaaaaggcactcctttatgacctcttctatataatcatacttctcattgataatctgtttttcataattgcgtggaagaatcacggcaatatcgtccagaggatgatcgtcaatcaccacctggtcaaactccaggaacttaatagcatgccagcgcatattatccatctcgccgtactttttatacagcgcttcctcaatcagcctgattttctcctccacctcctggctgtagcgtataaccaccccctgaggtccctcctcatagtggtggaccactgcgtgcatcagcacatccagtcctgtccgtttcctggctgatacagggacaaccggtatctcacccagcagctccgggagacggtgcatatcaatttccatgccccgctcttccacaatatccatcatattcagtgccaggattaccggcttcttaagctcaatgagctgcatggtaagatacaggtttctctccagggaagacgcatccaccacattgatgatgacatccacaccaccgtcctcaatacatttgcgggtgaccttttcctctatggtataggaggtaaggctgtagatgcccggcaggtcgataaccttgatgggacgccctttatagctggtttcaccttccacccgctccaccgtaacaccgggccagttagccaccttaagtttagcgccggtaaaggcgttaaacaacgtggtcttgccgcagttaggattgcctacaaatccaactgtgatcggcgtcctgtcatcctcatgctgatcttggaaatccatcttcttcgccccgctgtctcccagaatcacactgccgtacgtatccgtcccatctgctcttgcgcgtccgttcatgatgcctgttcctccctgaccgtaataccttcggacaagcgctttcccaaggccagacgcgtcccgcgcaccttgatgataacgcttccgctgcctttcttattcaatatatttacaggcgtcccctcattgacccccagggcctcaagacgtctggtaatgctctcatccacctgcacgcccgatacaacataccggccgccgatctcacactcattcagctttttctgcattgatgcctgtctccttttgtagttacatttaaaccatattcattgtatgcttaatgcgaaaaaatgtcaataaaaagagtttgttatgacaaactcaattcaaaaaaagatacagcgaatctctccgctgcatcttttcctgctttttctctatatttctttatgtttccgttctgtatattcgtattaagatttactgcacccaggctcctgaaccatccacatattttccgtccggcgtccatgtattataatacatggctccattggtgcccagatagtaatacttgccattaatagcctgccagccggtctgcatggcgccgctggggtctaagtaataccactgtccgcccagcctctgccagccggtctgcatggcgccgctgccgtccagataataccatctgccattaatggcctgccagccggtctgcatctcaccgctgccgttcatataataccatttgccgttgatagcctgccagccggtcatcatgataccgttggaagggttcagatagtaccaggtcccatccagcttctgccagccggtaacaatataccccttgttattgaaataataccatgcgccgttaatctgtttccaacaggaggccggatatccgccggtatcatacgcataccatacaccagtaccatcctgctcccaatgtccgcttccgccatagcggccaagctcatcctcatcaatatacagggagttggaatcctcggaccattcacctgtcttattattgtaacgggaaatagcccttacacggaaggtatagtctccctcccggttaaaataacctgcaaaattatatgaggttcctgtagtgctgaccgtagtgactgtcttgtcgtcgcggagcagctttacatcatagctcttagcgccttcaatctcctcccactcagccgtggtatcattccattccagctccgacgcaccctgaagcttgccgccgatacgttttaactcagcatacacttcaatgtactggccatcgtcataaatctttgctttcttgaaatccgcattacatccagaaagagagaagtggcttttggatgtataggagaacttgtatccgtccttggctgacagttccacctttacctccggtatatctccaaccgtccaggtatcctggtcctctatattggtatactcggcagagtccacttcaaatccgctgctgccggccttaaccgtaatgtctcctatttcgtccccgctctccggcgcctttgaataggaaaaactcagcttcaccgtgtcaatctttttatccgctgccaatacagtgaaactactgcccaatgccatagatgctgccagcagcagacatagccctctttttctcctcataaaacttatcctcctcgtctatatttgcaatcaattgttatttattgcctatctttattataaagtagtgacatctattgtacaatttaataatccttaagagaatattacatttttaggtacaatgttccatgagttacagaaaattacatgtcttgcagcattttcttaatttctatcattctgtcacgcagccttgccgcttcctcgaaattcagctccgcagcagcctggtgcatcttcttttccagttcctttgacagcttctttaattccttctcgtccatggactcgggatccttcttaaagtgcttgtcatctgcattcactgccttggatatggcaatcaaatctctgacagcctttttgatggtggtgggtgtgattccatggtcctcgttgtacttctgctgtatctggcgtcttcggttggtctcctcgattgccacagccatggagtccgtcaccttgtccgcatacataatgacatgaccttcgctgttgcgggctgcacggccaatggtctgaatcagggatgtctctgaacgcaggaatccctctttatccgcgtccaggatagccaccagtgtaatttcaggaatatccagtccttcccgcagcaggttgatgcccaccaggacatcgaacacatccattcgcatatcccggatgatttcagcccgttccaacgtatcaatatccgaatgaagatacttaacccggatacctacctctctcatgtagtcggtgaggtcctctgccatccgtttggtcagagtggtgataagtactttgtgatgggccgccacctccttgttcacttcagaaaccaggtcatcaatctggccctccacaggccgcaccgatatctccggatccagaagtccggtgggacgtatgatttgttccaccctcataagctcatgttctgcctcgtaggcagagggagttgcagaaacaaacatcatctgattgattttagactcaaactcaggaaacgccagaggcctgttatccagagcagatgggaggcggaatccaaagtccaccagcgtggtctttctggaccggtcgccggcatacattccgcgcacctgtggaagggttatgtgggattcatccacaataatcaggaaatcttcagggaaataatcaatgagtgtacaaggaggttccccgggcaggcctcctgtcagatgtcgggaataattctcaatgcccgaacaaaatccggtctcacgcatcatctccacatcaaagtttgtccgttccgatatgcgctgggcctccagaagcttatcctcactcttaaaaaatgtgacacgctcctccagctctgtcagaatgttctctgtggcttccatcatcttctccttcggcaccacataatgggatgcggggaaaatagccacatggcccagctgggctttggtttcatcggtcagcgtatcaatttctgatatccggtccacctcatccccaaaaaattccacccggtaggccaccccatcggagtatgccggatatatatccagaacatcccccctcacccggaaagttccccgcttaaagtccatatcgttcctgtcatactggatgtcaataagcttatgaatgacctcatcccggtccttaatcataccgggtctcagcgaaatgaccatctccttataatcaatagggctgcccaggccgtagatacaggatacggaagccacgataatcacatcctcccgttctgacagggcggcggtggcggaatggcgcagcttgtctatctcatcattaatggaagaatccttttcaatgtaggtgtccgtggacggaacgtaggcttcgggttggtagtagtcgtaatagctcacaaaatactccaccgcattcttcggaaaaaactctttgaactcggaatagagctgggcggccagggttttgttgtgggcaatgataagggtaggcttttgtaattgctggattacgttagccatagtaaaggtctttccagagcctgtaacccctagtaaagtctcgaattggttgccttctttgaagcctttaaccagctgctcaatggcctgcggctggtcgccggtgggctgaaattctgatactaattcaaaatgatccatagtgaagtctcctttatagtatacaaatacgtaaaatgtaactatgttttcataattctatccccttggcccgggttctctctcggccttctttatcttttgattgaaattgacttcctttcttctcgttgatacttcttgatcctgagtcgttgaccaccgatatatctgcccaatgtttccataaacacgtttaaaaagaaatgacgtgccccactgtgttctccggaaaaagctttttgaaattacttcggaaccgggcgggcagagtatattgtggaatgtaataacccggtaaaaaatacttgtaggaaaggtcattaaaaattataacatagacagcctgaaaagtataggcggaggcaggaacatttgttcttttttatccaactgttctttcttaacacgttctgagcagctgattgtctgctccatcttgtcattacggcagcggaaagcaattccagacaaaatatagcagaacagaaaaagccctgtggattgcttttccacagagcttttccacagagccttcccacagagctttttcataaaactttttgataggcaacgcgccaagctgcacataaaccttccggattcccttttgattcataatcctagaactatctaatccatctccgcagtgtttccataaaacgctccacttcaatgggttttgccacatggtcgttcatgccggcgcagtgtgcctttccaatatcagtggcaaaggcattggctgtcagagccagaatgggaaccgttctggcatcctcccgcgtcagcgctcggattgcttcagaagcctgataaccatccatcaccggcatttggatatccattaaaatacagtcatattcttccggcccggaagacgcaaacttctccactgcaagccggccgttctcagcctcgtcgatcagaaagccatgcatcttcagcagctccacagcgatttcacggttgagttgattgtcctccaccagcagaatccgctttccttccatgatggtgtaaacttccccgccgggaagcgatgaggcatcggtgcgcccctcccggcagaactggtggaaggtatgggcaattttggatctgaaaagcggtttggtgataaatgcgtctgctcccgccatcctaaactcgtcctcaatctcagagtagtcataggcggataccacaatgatgggaacatccatccccagcttccttcgaatcaccttgagcgtttccagtccgtccattccaggcatcttccagtccaaaataagggagaagaagtcatcctccgcctcatgggcttccacaacgcggcgaatggcttctttgcccgagagtacccagctgctccgcatccccagatcatccagaatctcggcggcgctttcgcagataacctggtcatcgtccaccacaagtaccggcaggccggagagctctgcattgttatcctctgcctcttcgcacagcttaaaggatacagccacaataaactggcttccttctcccaggacgctcttaacctcaatcgtgccattcatcatgctgacaatattctgggtaatagccatgccaagacctgtcccctgtatctgattggtctttgactcctcggtccgggagaaaggttcaaaaatatgagggatgaaatctccggacatcccaattccgttgtcggtgacgataaattcatactgccccttgccctttgcaaaagccggaatttcacggaccctgagacccacactgcctccctcaggggtatattttatggcattggagagcaggttcaccagaacctgctgcaggcggttctgatctgttaccactttttcatgccgcacatggtcagcgttaatctgcagctccaggtgtttttccgcggccaggggcctgaatacatccataacgtcctcaatcagctctggcagcgaaacgttctctgaaataagatcgattttcccgctttcgattctggacatatccaatacctcattgataaggtttaaaagatgtcggctggaaacattgattttattcaggcagtcttgtatcttttccggagattgcaggttcgcctgcgcaataaccgccatgccgatgatagcgttcattggcgtgcgaatatcatgggacatggatgaaaggaagttggtctttgcatcgttggcgatttgtgctgcctggcaggcatcttccagggcctgcctctgccgggcctgctccgtgcgctccgccgtgacgtcgataccaaccgtataataggagggaataccgtcccagttctcctccccgctgacatagctgcatgtcatcagtaaaatcttaaccttaccgtcctgagtgaaaatgcggctctccaccatagtgggcctgccagtctccctggactgcagcataacagcagcaacgcgttccttatcgtccgggtgtacataactgcactgggaatgcatctcctgctcgaactcttctttcgtatatccaatcaggtccaaaaaactgccgctgtaccagaggacagtccgcatatcccgtccgtccacccgcgccagcccgccggggacgctgcgaaccaacgcatcccgctcctggtccttctttgccagcttatattccgtgctgtacatatcatgggaaagctccagccgcgcccggtgtccttcccagtcgataatcctgttcttaattcggaatgtccgctccaaaaccgggttctggaactcccactcgtaaaattcattctcggttattttgctgttggtacagaacgggcagggactcgtccttccctggattacttcataacacttacgccccgccgctttcaccgccggcatccccagtacctcgcaggaatgctggttcacatacagcagctcataggtgtccatatcgctgatatatgcattgccctcgtatgtatccagcataaaatggaaatactgcagcttctgccggtagagccgttccagttcctctttcccggcagccagggcatccactcccgcaagctctgcctgcaataccttcccgcccgctaaagaatcctccctgacggtcccataaagatgtttccaggaatatccgccctccttaaggggcagacggacagtcagttcaatatcctgcctttcattctcaaccgcctgggtcagttcctgccggatacaggaaaacacatcgggcatcgctgcataatactgccgcagtgtggaaaagaggccgccaaaacgttcagcggtatatccaataccactgaaaaagctggaattcccccatagaaaagtcagatcctcgtccagcaggcaacatattatacctgttctcagagcttccaggactgccggacacttgattactgtattttcagctgcatgtgcgctgtcctgctctgtcatatctcccataattcaaccatccattccaaatctaatctgtgagaatcaatttcctttatattatataatcgcggcttctcaacataccgcgggcttctcaaatatattatgtaagtatagcaaaagccgtagtaaatagcaatagcctgtctggaaatgcagacagtacaaaagccccggccataatagccatgaccggggccctgttccacacttcttatttgttttccttcaacacctggactgccttctgaagctggttgtcttcctccggcttcaccactgcctgggttttaagcttctcatccagttccacttccacatccggttctattccctttccgtgcaggtcaaaaccgctgggcgtgtagtaatgggctgtggtaatcttgatggcggaaccgtctcccagaggtatcaggttctgtacaattccctttccgtagctggtggttcccaccacggtggcccagtcataatccttcagcgcgcctgtaaacacctcggaagcgctggctgagtccccattaaccagaatgacaatgggcattttcagctcatgaccgtctgaggcggtaaatacatcgcccttttcattcttgtcggccgtgtaaacaatcagggtttttcccttgcccttttcatactggtccaaatcatcggggagaatataatccaccatcttaacagcgctgtccaggactccgcccggattgctccgcaggtcgataatcagcccctccataccgtccttctgcagctcatccactgcctgctcaaactgctccactgtaatcacatcaaattctgagactgcaatccggccgattttatcgtccagcatgctgtattccacagtgggcacttcgattttgcgccgcgtaacggacatatccacatactcgtctttgtctgccctgtacaccgtgatagccacatccgtgccttcttcgcccttgatgtaattgttcaccagcacatccagactttcggaagccaccagggtatcgcccaccttatatataatgtctccgggctgcatccctgcctccagggccggggaaccctcgaacaccttcacgatggtacataaccccgtggttctgttctggcttaacatggctccgataccggagtaggttccctttgtgctgtcattgatggaacggaaatcctcctccgtataatacgtggaataagggtcatccaggccagccagcattcctctgtaaataaaatcctccacatttccggcgtcctcgtcgtacaggaagtgaagatctatgatttgctgaatcatggacatcttggccgtaacccggtcaaagtccacgccgccttcatggctgcttccgtctgtgattcccggtcccttgccctcgatggccacgctgggctgacggctcataacccgtttaccaaagatatagatgccggccgacatgcccaccacaatcaatcccacaaaggcggttacaagggctcccaccagagccccggcccagaaccggttctttcctgagccgttccggttcccgtcctggggtcccggtccgttgtccctgtagggaccatccggctgtccgcccatattatgttcctgtctgtcaaattcacgattttccaatttacgtctcctatctgtccgttccctctatcctatgacaggtcacgggcttacataacttcggggatttacataggtgccccctgagcggattccgaaatgcaggtggggaccggtggaataaccggtggaacctacctttgcaatcacctggccttttgtcaccttttcccccacgcccaccagcagcttggagctgtgcatgtagaccgtgctcaccccgcctccgtggtcaatcataatataattgcccgccgaatagctgtatgtagatatcaccacctcgccatcagccgcagcaatgatatccgcccctgtgctggcactgatatcaattcccttatggttgctggatgccccttctgtgggagactccctgtctccaaaattagaggtaatcctgctgctggacggacagggccacttaaaactaatattccccaaattcgatacggtatacgtcttgccggctgcttccgccttttttctggcttcctcttccctccgcttcatctcggcctcgattcgcttcatctgatcttcctgggctttgatgtctgcattgtactggtccagctcatcctgggccatggcaatcttggaattataggaatccagctccttctgcttggaatccatcagctgctgcatggaagcctgtttggcctgggtggactcctgaagcaccaaaagctccccatgctccttctccaggttctgttctctggcagccacctgctcctttgcagaagcataagctgtcagcatcttcctgtcatattccgcaatctggctcacgtattccgcgcggtttaacagctccgatatgctgccggactccataaccatatccagcagattgttctggccgttctcatacatgtacttgatgcgcagcttcatgctgtcatactggtgctcttcctcgcgtctggcctcctctaactgtatctgggcctggtctatctcctcttccttaagggtaatccggtttcccagctgttccagctcctctgccagggaggacagactgccgtccagcttcttcacataagctgccgtatctgcctttaatccctccagctggttcagggtactctccaccttcttcttttcctcttccaaagcagatacctgtttcttggcatcctctatctccacactggtggcgtaggccgaaaatgccgccataccgcccatcaaaagaccgcctgacagcgctgccgcacaaatccaatgtcttatcctcattcacatcctccttccctataccttcaagtgacggtggatggtaaaataactgacaaaaaaaccaatgcccacacccaggcacccggctgttgcagccatatagggaaatatatttcccagaggtatgggttcaaacatgcctgtcagcatctgataatgctcactgatatagatgaccgccctctggtaaagcgcatacatgcctgccagcggcaccgctgctcccaaagcgccaaggagcacgccctccaccacaaaaggcgcacgaatcatataattggtggcgccgattaagcgcatgatttcattttccctcctgcggaaggccgcggccacggaaatggtattgctaatcaggaaaaccgccacggccagcagtacgcagataataacggccgacatggccccaaccatctttcccgcactggtcagcccggccacagccgtactggaatagcgcacctttctcacgccctccatgccttccagacgctccacgattttatcctgttcctcaatattattgagaaatatctcataggaggcggaaccggacagcggattgtcgtctgcaaatccctctgccagctcctccatcccctcaaaataatctgtcttaaagttctcccatgcctgggcagcggatatgtactgcgcctcccgcacctcttcccagccccggataccatcgccggcagccagaatctgctcctccggcatatcctcatcaaaaaatacagtgattcccactgttgtctctgctgtctttgccacattctgcacattggctatcagggcgaaaaaaagacagaataaaaaaatacatgcagaaatagtcgctatagatgccagcgaaaacaaaatatttctgcatatattaatgatgccctgtttcaggcaataccaaaatgtactgattctcattgctgttcatttgcctttccggcggaataagcatacccgtaagctctccagagccgctgcggcagcaccctaataatatccgcccacatcactgataaccgacccccgttccatggtaatgatccgcttgttcatctcatccaccatttcctgactgtgtgtaatcacaatcacagtagtccccctctggttaatctcctccagaagcctcatgatttcatgggtattaaagctgtccaggttaccggtgggctcgtctgcaaggagcacctcagggtcattgatcaaagccctggcgatggccactctctgctgctcgcctccggacagctgtctggggtaggccttgtacttggacgacagcccgaccagcctgagcatctccggcactgtttcccggattatcctgggcggcaccccgattaccctctgggcaaatgcaacattctcaaacacagtgcggtccttcaggagtctgaaatcctgaaagaccacgcctaatcttctgcggtatttgggaacataccttctcggcatccttcccaggtccatatcgttcaccacaatacgtccctttgtgggttccagctccttgaggagcagcttcatcagcgtactcttgccggaaccgcttcttcctacgatgaacacgaactcaccgtcatcaatggtaagggatacatccttaatggccttgttccctgtctcgtaggttttgctcacattgcttatctctatcatccaccgactccggcctaataatccaggctttccatatacttcatatacttggcaaccatcagggcaatcttaaaggtgatggcgtcctcaaaaatgcgcagatctaatccggtgctcttctgaagcttatccagacggtatacaagggtattcctgtggatataaagctgtctggaggtctcggacacattcaggctgttctcaaagaacttgttgatagtggccagtgtctcctcatcaaactcgtccggagacttgccgtcaaatacctcgcggataaacattttgcacagcggaatgggcagctgataaatcaggcgtccgatacccagattgttgtaagcgataacgttcttattggcatagaaaatcttgcctacgtctaacgccatcttggcttccttgtaggaacgggaaacttccttgatgtcattgataatggtgccgtatgccacccgcacctttgtcatggcctcggtgttaagcatatcaagtacggtgttggctgttttgtccagctccccgtaggtttctccctggcgtacttccttcaccagaataatgttcttctcatccacagctgtgatgaaatcctttgtcttggacgcgaagaggcttctcactgtctccagcgcattgacatccttctcgttgtgggtctcgatgatatagaccacacgctttacatccgtgtcaatgtgcagcttctttgccctgttgtagatgtctaccagcagcaggttgtccagaagcaggttcttgataaagttatccttatcaaaacgctccttataagctaccagcaggttctgaatctggaatgcggccagtttgccaaccatgtatacatcatcgctggccccctttgctaagaggatgtattccagctggtgctcatcaaacaccttgaagaactggtatccctggataacctggctgtccgccggtgagtccacgaaaaccagaaccgagctctcggagtcttccgcatcggtaaatgtagaagccagcacttttccctctgtatcacatatacccaaatcaattcttgtaattgcctttaatccatccagtgtggtttgaagtatctgatttgaaatcattctatactctccttttcaaacgtattcggagtaactaatatccctattttcatattttaatgcaaaattacaaaaaaagcaagagagttgtatactctcctgcttctttttaccttaattttcacttacggtttgtttgtattagttaagaacaaccagttccgtatccttgtcgaaaatgtgaatcttctctaaatccatggccagcttgatggtatcgccaggccttgcggtggtacgtggatttaccttggcaacaaagttcgcgtcctcgatatcaaagtataacagaacctcggagcctaacatctcgtatacgcggacagtggcctcaaatacgctctttggagacatggccaggtaggattcctcgtcgtgaaggtcctcgggacggatacccagggtaactacctttcctatgtatccggcgtcctctaacttcttggacttggcctctgaaagggctacggtgtgtccgccgaagcttaaggttgtcagagcaccgtccttgccgacggttgcatctatcatgttcatctggggagctccgatgaatcctgccacaaacttgttgcatggcttatcatacagattctgtggattatccacctgctggatgatgccgtccttcataacgacgattctggtacccagtgtcatggcctctgtctggtcatgagtaacgtagataatggtggtctccagtctctggtgaagcttggaaatctcaacacgcatctgtcctctcagctttgcatccaggttggacagcggctcgtccatcaggaataccttggggctgcggacaatggcgcgtcccatggcaacacgctgtctctggccgccggaaagagcctttggcttacggtccagcagatgctccaggtcgagaatcttggctgcgtcatgcactttcttgtcaatttcatccttcggcgtctttctcagtttcagaccgaaagccatattgtcatatacagacatatgtggatacagagcatagttctggaataccatggcgatatctctgtcctttggttcaacgtcattaaccagcttatcgtcgatgtagagttcaccggatgagatgtcttccagaccggcaatcatacgaagggttgtggacttaccgcatcctgaaggacctacgaaaatgataaattccttgtcggcgatttcaagattgaattccttaactgctacaaatccatttggatatttctttgttacgttcttcagtgataaactagccattctgttttttcctcctaataatacgcttaacacatatgtgttttaccctcttttgtaactgctcttataatacatgaaaccccctggggaatccatatcgcaaatccacaaaatcaaaattggggttttagctaatttgtatacggggaaaaaaaaatgtcctaaat

SEQ ID NO: 3305 - DNA, 164065 bp, Unknown
  gut microbiota DNA sequence
gccaactttttgttaattatgttaatcaactgcgtttttcccgaaaatatcggcaaaagccacaaaattcagggcctaatattcgataaatccttcaccaaatacctctctggcatcacttacaataacaaatgcgctgctgtcaaactccgccacaatctcctttaaccgcacaatttctttcttcgaaaccacacaaaacagcatcttcttttcctggtccgagtacatccccctggcctccaggctggtcactccccttcccatctgttccatgatggcctctgcaatctcccggtaatgctcggagataatataagcctgtttggaaaacttaagcccctctatcaggccgtccgtgaccttagccacacagaaaatggcgataagggcgtaaagagcgctcctgatgccgaacacggaggcgcccgccaccacaatcaatccgtccagcacctgcatgatttgggccagggtatagtgcttaaggcgtttctggatcagggccgccagcaaatccgtacctccggtggtgcagctggtcagaaacaccaggccggttcccacaccgcttatgattcccccaaataatgctgacagaaacaggtcatttcccagataggacgcctccggcagaacatacagggaaacagagagcatgaccgtggcgaacagggtgcgcttgataaaccgccagccgcagaaaaagaatccggctgcaaataacgggatgtttaacactgtattggtcagccacagaggaacagaccacagttccttggcaataatggccacgcccgacacaccgcccgtaaccatgctcacagggtcgtaaatattcttgatggcaaagccaatcaggaatgtccctgccacaatcatggcataatccgccgccggattcctctttttcatgtctccccgtcctttccccaacccatgccccatgtaccggagccggcctgcaccgtctgcaggcacagacaatccgttcctccggcacattttatgctgtactaaaaagtatgtgccttccttccccattccatacgcttatacacgctcaatcgtcttgtccgtaatacgaatcctgccttcctttaaaagcctgcccacggcccgcttaaaggcatttttgctcatactgaactcgcgcatgataacctccggctttgccttgtcattaaagggaagcacgccgtcgaattcgtccatgacctttaataccttctctgcgtcagtccccatctgcacataggatttttccctgacgcacaaatccagctttccgtcctcgcgcaccctggtaaccctggcctggaccgtatccccctccctgaacctgccgtatagctccttttttggaataagtccgtaatatttgtggtccaccgccacaaaggcgccgatggtttcattgatttcatagatagtgcccgtaacccagtcctctgccttatagggcgactggttgctcatatgggaatagacgcgcatggtagctgccagacgtctgctcttatccacatacagggtgacaaggcactgctccccttttcttaccgggtgggtctgctccttaaacggaagaagcagatccttctccagtcccatatccagaaaagctccgattttagccacatccttgacctccagcttcgctgtctcgcccacctgaagtttgggctttcccgtggtggcaatcaggcggtccgatgaatctttgtagatgaacacctctaccttgtccccgatcccggctccctccggcacctgcttctttgggagaagaacagctgcctcatccccttccttctcagccagatatactccgaattcttttgttcttattattacaagctcctgcactttacctaattcaatcatctcaatcttcctcctgtccttttgtcctcagccataccacagcgcagatttctcctgtactgccctcaaggaccactgtccactccctatcccgggccacgcttacccgcggagtcaggacatctcccaatacagccgcctttttgtaatcagcccgtatctcctttatcacaagcccctccggtatggcctccctggccatttccacatactgggcattattcacatggtggtttgtgtcaatgtggtgtctggcaaccacaataggctcacccgctttgcagtcttcaggcaccggtatcttcctggggcaggggcttaataccagccttggctccggctcgccgtaaggagccgtatccccgggccgtacccggatcggaatgttcttatccgtatcgtagaggaaccacatggattcagccctgaccacgtccgtcccctccccgtcccgcagaacgaagttacggtagccgtatatcccctttgacgcacaatgccatgttccaaccaccagcttctcccccagtccgggataccggtctatcataatctgccaggatgacaaaagccatgctttatggctggcttccagataccccactcccacaccgcagtcctctgactggaatgtgctgcagtcctgcatgtagttgataatgcctgaaaccgacaggcaccctccttcatccgtttcgctgtaacggaccctgctgttaaatgtatacatatttacctcattctcccgggaccaggacgcagcctttgctgccggcgcttccatgccccgccccggtattacgcccttcattgtatcataaattcccttgggtatacaagcaaaatcccacagactttcatctgtgggattagtagctgggctacaaggattcgaaccttgaaatgacggagtcagagtccgttgccttaccatttggcgatagcccattgttagtttaatattctaacacaacttttactatattacaatatctattctatcgtttccataaatttaattttcatatattaaaaatatgcacatccgtgagagcagattccgaagaacctgccctgccataatccttcattccgcgggaaaatcaactgtatggggaacgaattccccatacattgttcccggccttcctaataatgtccgccgtcttttctgttttcatccagatcgaagcgcacctcatcaaaatatatctttgtctgtccccagtgttccttttctggccaggcaaaggggtgcagatgttttgcccgctttgctgtttccagagcttcctcttctgccttcagaaggatctccctctcattgattcccacggccttgccgtccctcagccggatctcaccatccaccaccacaaggtccacatcggaggggtgtccgtttccaatcagggtttctatcaggttaattctcggcataaggcggggattcatcagatcgattgctataatatccgctcttttccctgtttcaagggaaccaatctcctcatccagtcccacacaccttgcagcgtcaatggtggtcatctccagcaccttctccgccggcagataataatcatcattcatggcgcggcggaagatcatctgcgcccgtttcatggcgtcgaacatgtcaaaaccggatgtgagcatggaaccgtccgttgtcagggccactgtcactcctaattccagcagctcaatcaccggtgtcctgtttaccaactggcgcattcccggcgccacgctgatatgggtatctgtcttctgtatgatgagcgcttcatcaaatgagaggcccgtacagtgctgcagatggacatccgggcccaggagggcattttctttatcctggtaagccagatggaccatacccccaaaggcatctgtatgaatacgggtattgtatttttccgcaattctcctcatatccctggcctgttgcaggtcatgctctgtaagcttcacacagcggtccgcagaagtgggggcagagggatccacggaggtgactgccccaaagggagcaacgtaagccctggtccggtcactgttggcatgattcagctccgacacaactgtctccaggctttctaacacagtctcatagctaacctgggacatatgcctctctccgtcctccgtatagcggctgaatcggtgaggccacggcacatggcagggtcctgtgcagacaatatccttaacccccacctctgcgtatgccctggcgttgttaaaggcgggaacaggggagtcacagcgcggctgggagcccagcacgcatacgccggtggtgactccggcatggaggcgttccagggctgaaagccggccttcattgtaccagaagtcgtcagtaatatagtttttatatgtgtgggtcatcacaggcatccagtagcttgtaagatccacaatggacttaaaggcgctgtgtcccccatggccatgggcatccacaaaccccggcatgaccacatggtctttacagtccagcacctcctttgcctcaaattgctccgcttccatgctatcccccacaaaagctatccttccatcttttactcccacagccccattctcaatcacacgccgtttctcgtccattgtaatgactacagcattggtgagcagcaaatcgtacatatgtatcctccttaatcctgacctttcttacggaacagtcccttcttatttatgaatgggaaatgacggtctaaacagctcatcctcagacagatggcggtagtccctctccatatatcccatcctcatcttgtcataatacttctgcccctttgcctttatctcctccaggtccacaccttcaatggtcctgtccttcatgacagtctttccgttaataatggacagcttcacgtcacggccgcagccgcacatgaaaatcgtgcggatgggatcatccactgctcccatatggaaatcctccaaatccacagctatcatgtcagcctttgcaccgggagccagacggcccaggtcctccctccccaaaagggcggagcctccaagggttactgccctgtacacatcagccatggcagagccttccaccttgttctccgccatctgtgagaaccaggaagcaatgcggatattctggaaaaaatcaggtggaaacgtatctgttcccactgccacattgatattcctggcgcggtattttgcaaaggaatcctggtaatgcccgcttctccctattataaccgggcagaatatggcagtggtacctgtatttgaaaggatagacagatcgtcccctccatcctccacccacctggtaccttttacgatatagcagtggggaattcccacgttctttccgagaaatccaatgctctccagatattccaccgggcttttgcctgtccgctcctttatgaagcggtattcaaacagtccctgtgccgcgtggagcttaatggggcactttaattcctctgcatactgttttgtgcggatcaggttctcctctgtctgtgtctcaatccgctcaggcagcagggccccacggatcaggccatcataggccccgtcatatttgcggataaatcggaccgctctctctaacccttcctctccctgcccctccaggtaacggactgtcatggtaccgtcaggacggactacgttcagaccgcactggtagctgggagaagtgtacagcctcagacccagtctgcctgcgtgatggacacccgcctcttcctcttcataagtatccgcccattttttatagtatgtggatgtgatgggcatggctgtggtaatgccgtgcataatcagctgtgtgtacgcataaagggatttgaaggcctcctcctctgctgtcatcacctcatgagtgcccttctcaaaatactcctctgaaggattcaggctgctcctgatattgctgaaagcctccgtgtggagaatatcatggtcaatatccccaagggcatttaagtcaataaatccaggcatgatgacggcattacctgcatcctctgtcttgctgacttccccctcataatgctttcccacataaatgatggtatcattctcgtaaaccacctcaccgtcccggataatctcatgatccgctccgttatagccgatcacataggaccctttgactctcgtaatcatattattcctcctcgctatgagctcttacacgccgtaacccactaagacacaaggcgctgcagggtgagccgccctgtataatccatacagaaagccaacctttgcagcgccctttttcttatgcctgaatcccggacttatggttcagtgcagatttattgttcagcattttcaaaatgtacgttctggaagaaatggcttcctgccggtgtgggcacaaatccctttacattgcttctgataccaagaacctgctctgtattggcaaccggaataacaggaaggttgacgcgcagatatttctggatatccttgatgatctgctccctctccggtccgtcactggtatttctctgcgcctcaagcattttatccatctccgggtcagagtagaagcccatgttgtttgtaggaatctgcttgctgttaaacggtccgtaaatgttattgtccggctcagggaatcctacggctccaaaaccgatcaggaatatctctgtctcaccggcatccaccatgtcatagaaggtacccgcctcataactctggatctccacggttattccaacctgagccagcatgtcctggatgatggtagcctcgttcagtctgttggtgttttctgcgcaggtcagttttaagtgaagatcagataccccggcctctgccagaagcgcttttgccttctcaacatcatacctgcagtccgtatcagaatcatcgaaatacttcatgcttggcgccaccgtggtgggagaatactgtgcacttcctctccagacagctgtaaggatggcgttttcatccagggcccagtcaatggcctgccttactcttacatcatcaagaggtttcttggtcacattcataaccatgtattccacaattgtgctggcacgttttacaatagcagtatccttgttgttctccagcctctcaacatcatttgcaggaatgtcaaatgcaatatcaatatttccggattccagctcaattacgcggctgttggcctcaacaattgtgcggattaccaggttcttataagccggcttgtcgccccagtactcgtcatttctttcatatacacagcggtcattttttgcccatgatacaaatttaaagggtcctgttccaaccgggttctgtgctgccttctccggatcctccgtgaattccttctcgctgacaaccactgctccgatatacggaagatagccaactaaaggagaaaatggctcatgggtggcaatgatgatggtattgtcatccaccaccttgcagttatccgcatcaatggcagacatgatgtaagaaacctttgcgccgtccggtcccgtggctctcttaaagctgtaaagcacatcgtttgccgtcatcttctccccgttgtggaaatacacgtcgtctctcagcttaaactcccagtttaagtcatccaaccttttccactctgtggcaagaagaggctttatttccccgtcatcatcatatctcaccagggtctcgtaaacaggatttaagttgtttacactgcttgaggtggatgacgcatgcgggtccaatgttggcggatctcccgtaatagccactgtcagggtatccttttcctcctgagccttggaagaactgccgccgcagcctgtcactaaggatgcagccagtgtgagtgccagcaggatgccggccgcctttttcacttttctcataatctttttctccttttctttcatacatgcagatagttctgctattgccattacatttcccccgccagatgacaggccacaaagtggttgtctcctgcgtttttgagctctggatcctcctgtctgcaccgctctgtcacatacggacagcgacccgcaaaacggcagcctcccggaagattgacagggctgggaacatcccccttcagtataatctgttccctctcaacccctacctttgggatgggaatagcagataagagcgcttttgtatatggatggagggggccgctgaaaatggacctgtaatcactgagctccactatctttcccagatacataacgccgatccggttgcttatatgctttacaacgcttaagtcgtgagaaataaacaggtatgtcagccccagatccatctgaagccgttttaacaggttgatgatctgtgcctggatgcatacgtcaagggctgatacgggctcgtccagtacaatgaattccggttttacggataaggcacgggcaattcccactctctgccttcttcccccatccagctcatgaggataggcattgatcagccttctggaaagccctaccacatccatcagctcgcggaccctggcatccagcttttttttgtctctgcggtactcttccatatttgtaagcggttccgcaatcagctcaaacacggaaagcctgggattcagacaggaatacggatcctggaataccatctgtacatgttccctgaatgttttcatctggcttttgttaaatcccagtacattttctccgtggaaattcacctctccgctgtctgcttccagaagacggatgatggttcgccctgtggtagactttccgcagccggattctccaacaagtcccagtgtctcgcccttgttaatataaaagctcacatcatccaccgcatggagcagtcccttatttacatggaaatattttttcagatgattgatttcaactaatctctcttccggattactcatctttatttacctcctcctgcttctcgtataaaaagcacctggtataatgctcaccgttcacaactgtaatttccggctttttatgcttgcagatttccatgcagttgggacatctgggattgaaggaacagccgtcaatcctctctgtaggttccggaggcagtccgtggatctcctccagccagtcctcctccgtatccagtttcggaatggaattaaacaggccctttgtatatggatgacagggattatggtaaatcttgcttacctccgcatactccaccacctggcccgcatacatgatggccaccttatcgcagatctccgcaacgatacccagatcgtgggtgatcaggatcatggaggttcccagcttttctttcagccccttgatcagattcatgacctgggcctggattgtcacatccagggccgtggtaggttcatctgcaatgatcatcttaggacggcaggccaatgcaatggcgatcaccaccctctgtttcatgccgccggaaaactgatggggataatcattggccctctctcttctgattcctaccatctccagcagtccgcaggcctcctcaaacgcttcctttttgccgattaccttgtgaagtcggatcatctccacgatctgatcccccaccttcatggaaggatttaaggaggtcatggggtcctggaaaatcatggagattttttctcccagaatccctcttctctccttgtccccgatttttaacatgtcttttccgtcaaacatgatttctccggaagtcacctttcccggcggtgtggggagaagtcccatgatggtcatggccgtggttgtcttacccgctcctgtctcccccacaaatcccagcgtttctttgggttccagggttaagttcaggttatttacagcatatacaattccgtcttctgttttatatgtaacacttaaatccttgatatcaagcaatttttccttttccacgatctgctccgcctttcattagtttctcagtttcggatcaagcgcatctcttaagccgtctcccagaaggttcagggagagaacagtgataacgatggcaagacctgggaacatggtcatgtacgcatatcctctgatataatcacggccggaggaaagcatgttgccccactcaggattgggcggctgtatgcccagtccgataaaactcattcctgcagctgtcagaatcgccccggcgatacccagcgttacctggacaataacgggcgccacacagttgggaagaatatgctttataatgatttttgtattggatgtgccggacgccctggctgcttcaatatactcttcctcacggattgtcagcacggaagcccttacgatacgtgcatatgtgggaaccgaggatataccaaccgctatcatcaggttcatgagtcctgttcccagggcagctacaatggcaattgccagcagtgtctggggcacagccagaagcacatccataaaacgcatgatcagattatccacccttctgccgtagtaacctgcgattgcccccaaaacgccgcctataattacagcaatgccaacagagacaaagccaaccagaagggacattctggccccgtacacaacacggctgaagatgtcgcggccgaactcatctgttccgaaaatgtggctgggactggggtgctgaaaggcatcagccagattctgcttggcaaaatcatagggcgcgataacatgtgcgaatatacctgtaaataaaagaatgatcaggatgaccagtcccaaaaccgccatacggtttctgctgagcgctttcaggatggtcacaacctgacttctggatttcttctcttccatctcaatcaatacctcccgttcttttattcttttgagaccttcggatcgacaactgcgtacaacaggtccaccgcgagattaaccaacgagaaacatgccgcaacgaacagaacgctgccctggacaatggggaaatccctctgcttgatggcctcaatcatcagacgccctacccctggaatggaaaatacaacttctgtcagcatagcgcctcctaaaagcgttccgaactgaagtcccaccacggtgataacaggaatcaaagcatttctgaacacatgcttcatgatgaccacgctttccttctgtccttttgccctggctgtcttgacgaaatcctggcgtatcacctccagcatgctggaacgtgtcatcctggccactaccgccgtactctgcatccccagcgcaagggcgggcataatcaactgcttaaaacttccgaaacccgaaggtggcagccatcccagattgacagagaacagaataatcatcaggatgccgatccagaagatgggggccgatgttccaatgagcgccagcaccataacggcattgtccagaagggagttctgctttaccgcagagacaattcccaggaaggttcccaggatgacggcgatgatgattgccgctgtggcgagcttgactgtgttgggaaacactgtcataatctcgtccagtacaggtcttctggtggagtaggacgtccccagatcctgatgtactacgatatttttgatatagcgcccatactgtaccagaaagggatcgtcaagtcccagctccagccgcagttccgcctgcgcttctggggtagctgattcacccagcatcatccggaccgggtcccctggcgtcatgtagagcagcaggaataccagaaatgacacacccacaagcaccagaaccagatataccagccttttcattgtgaacttcagcatagttcattcctccattatacattttcatgtagtatttatgcattttattatactacgctgtattttggaaatatattggcacaataggataatcccgcccccctattttcatccttccagtgcacccctcctttattcatttccaccaaatttatgatatacttataacaatgattttattgttattgtttatgaatataagatttagttatctgtattatacataaatgcggcggggagcatccaaatgaaaaaactgacagtggctgacatcttacaactggatattctgaaaaatgtaacaatatgtgcgggagccgcaggcctgtctcattttgtcactggtatcaccacagccgaagacccggatctgatccagtggcttaccggcggcgaaattcttcttacttctctgtacggagccgtaaccggccccctttccttcaaagaatatattgatgccctggcctcaaaacacatcagcgctttgttcataaagactggggagcgcatgccggaaatcccggcggaaatcactcagtccggcagccagtacggaattcccattgtacagcttccccctgatgtgagcttctttgacgtggtgtcttctgtcatgaaacagatcctgaataacaaagcgcagtactttatagagcttcagaacaatatgtcacagcttctggcctccggggccggagaacaggatatcctggattacctggctgaatatgtgcctgcttccattcatctgtgcgattctgataaaaatattatttttacttcccaatcagaagaattccactctgaaatggccatagcagacaggatctcgcttcccattatgtgcatgggagaggtgtgcggctatctggaagctgcgaccaaccgttatctcgatgaaaatctggaaggacttctgaaaaatgcggcaaatctgtctgccgttctctatctcaaaaagtattacactgttgaaatagagcagagatacatatccgggtttttaaaagaattgtttcgacaaaatatgggagtaaaacagattgtagagaaggctgaagggtatggctggcacgagaatgattcctatctggcagtctccattcaactggaggctgccagaaacataaccaaggttcctgaggcgctggcagagatgacgcgcctgattcccaaaagcaactattacttctgcatccaggatgatctgctgaatataatatacaggacagaaaaaaagctctctccccaagaattgtacgatctggtcacagaagttataacaaatttaaaccaatacatttcaaaaacatatggctcttttaccttctacgcaggtatcagcagcatcgcatctgaattgttccagctttcccagaagattcaggaatcagcagattccctgcagttctgccgcgtgtttaacaacaggctggtaaagtatgaagacatgggggcactgcgcatgctggccacctattcccaccgcagcaacctggaacaggtgattccccctgcagtgaccagattggcggaatacgacaagctcaataatacccaatatttagaaacccttgattcccttcttggaaataacctgaacctgagcaaaaccgccaaacagctgtttatccactacaagacaatgcttcaccgcatggaccgtatctgcgagattgcagagatatccctggatgacagacagacccggctggatgtagagctgggagtaaaactttatatgatgctgcccaaataaaaaacgcagcatataaaaaagctagtaatccgagattcattctcgaaattaccagctttttttaactgggctacaaggattcgaaccttgaaatgacggagtcagagtccgttgccttaccatttggcgatagcccattattcagtttatccgcagcgccctgccctgactgtttgtcctgattggcggctgcggagtttattatacccatattgtggcaattagtcaagaacttttttaaatttttttaatttaatatgaaacagactcaaaaatgccggatttagccgatgcattacgggcaggcgtcccctgcatcggagtagtcgggtatccacccttccagcacgttggataccttctcgataaagaaatgggaaatgcttcctacgatgagggcggccagcacggttccttccctgattcccagcacatggcccgtaaagaacagtgaaacccccacagcacttgccacaatgctcatatcaaaacccgtttttaccaatccaaacctccagccggtaagccctgcaattacacgcaccagcccctctccaggaaggataagcacattgggaatcacctcaaaggcaatacccagccccaggaacacgcagcccagcagcagcatgagcacctgccccacatagcttcccgtcttccagaaccccagaatatacatccatccgtctatgcaggcggaaaacagcagggcggccggaagctgaagcagctgtacctttccaaatgccctccccagaagggcggcctgtatcaggaacatgaccgtgttcaccagcatggtaaactctcccaggctgtgagggaatataaacgtcaggacaaaggcaaggctggtaatgggcgatgtgcccagtccggcttttgtaatcaggctgatacccaaggcgctgaatatgacacctgcaataaacatgctgtaacgcttcaacttatctgaatttttcacgtgtttacacctctaaaaatttttgtataacctaaatttttttatatatcttatgatatcacgtaaacccacggctcacaatgggcattctaacttaagttgactccatattttcgtcacaatgcacaatcatttttagataacctaaaatttttttagatttttctatgctttctcaccaatgtaatatgggcatacatggtcaccgcagcgctgaatcccagctgtacataatacgcaatacctctggacaataccatggcgggcaaaagcagatccccgtaaaaaataggatcgaatatggtcaggaacagatgctcgctgattcccatgccccccggaagaggcagcatatcggctgacacagaaatcgttgactggagaagcaccagggtaatcatggccgtccccttaagcccaaaggccctgtacacaaaatatgtcactgaaaacaatgccagccgctggcagaaggtgagaaacagcactctgagcagcacatgcttgtgctggcgcaggaaggcagccgtatcattataatgctccatggtaaggagcaggcgctctgtcctggaggtttttttcttgaggaaacgaaaatgctccagaagtcccagaacccgcattgccatgtccctggcaagagatgtgtggaaagccagaaccagcatggcggcgcagaataccacattaagccccagccccagatagtagacaggcatgacctcgtacaggtaacgatttaaaaagccctggccgaatacagccagaagacagccaatcaccaccagaacggatttgtatgtaatggttaccaccatgagcaccactgtggccacaggcacggggatcatgttcttcctcatatagtaaacctgggccggctgtcctccccctgccgaaggcgtgatgcagctgaagaaaaaacccacagaggaatacagaaaacaggtccttctctttgtctttatgcccagggtgcccagcagataatgcaggatagcagactccgcccatatgaaaaaaataacacagccaacccccataagcaggtatacaggagacgcctcggatatggtgtccgctatatcgcttaaatcctcacccgaaaatacactgtaaatggtcagaacaaatacagtcagaaggaatattccgttgatcagattcttctttttatcagacatgttttccccctctccccgtcacgtccgccggtatcccttttacgcagcttcatatccccgcaggattctgcccccatggattaccagacttgcaggttccctccccgcagggttcccggtccgaaaacagaaatataacaaaaaatcccgtcaggcataacgcctacgggaccaagatataacaaactgggctacaaggattcgaaccttgaaatgacggagtcagagtccgttgccttaccgtttggcgatagcccatcaacacaacgaaatgtattatataatatagtcggcaattcgtcaagtgtttttttcaattttatccattttctagcacattattttgtttttattttgtttttattttgttttattcgttttccatcccctggcttactgtcttacccggaacatctgagcagctcctgaagctttttcatggatcggttatactttgacagtaccgtagctaatggcatctggagcgcctccgccacttcccggtgcttcatgcctgcggctgcgtgaagaagtacaatctgccgctcctcacggctgattcggcccagggcgtcaagcagcaccttacggtccgcagcctgttccaggggagcgcagtactccccctcctctttctcagccaggtcctccagagccacgtctgccttcatcttctgctccctgaagcgcatatagcaaagattcctggctatggtgaatacccaggccagaggcttgccctgggggacataggaccctgccttggtccacacggtcagataggtgtcctgcatcacatcctcggcctcctccggattcctggtcagggacaggataaagctgtacacaggcctggccgtgtcctggtaaaagaggtggaacgcctccatatccccatctcccagggcctctatcatctcttcctgtgtcatccagcgtcccccttccaggaccagcccggcgcccatatcaagcttactcccggctttccgagataaagctgttttccatggttatgacgcagcagcagcgcctgtcttttttcgccacgtcctcagtgatccttgctttcagtttacccagaaccgatggcttatattccctgggaaccactaaatcaaagatcaggttgatgcgctccacgccgtccaccatcctgaagtcgtggaacgtaagcctgctgtctattccgtccagaacagacgtcactaactccttaaactctactaccctctcgtcgtgggtctccaccgggtccatatggataaccagcagaattcccatccgcctcatggcctcccgctcaatgcggtcaatgatttcatgtgtgcgctccacgtcgcagtcattgggcacctctgcatgaatggatgccatgcttcgcgaagggccgtaattatgtacaatcaaatcatgactgcccacaattccgtcaaagctctccacaaagcttgatattttgtcataaatctcagggtcaatggcttccccaatcaggggcgccagggtatccttggctatgttcacgcctgcgatcattaccaccacagacacgatgagtcccacaataccgtccacattgaatccaaatgccccgtatattccgatggagcatatggtagcggaagtagtgaccacatcgcccagcgcgtctgccgaggtggccagcatcaccttggaattgatacgctttcccagctttttattaaaacaggaaagccacagcttaatggccacagacataaaaagtatcagtatggatatccaccgaaagctcatatcctcaggatgcagtaccttgccaaaggaggtcttaaacagggaaaagcccacctgtatgaccaggaatgccacgataaaagctgcgatatattctattctgccgtgaccaaagggatggtcgtcatccgcaggtttttccgccattttgactcccacgaatccaataatggaggaagccgcatccgacagattattaaacgcatccgccataacagatatactgtgcaccaggatgccgatacaaagcttggatacaaaaagaagcaggttacagccgattcccaccatgctggtcagtgtcccataagccgtccttacacgtacatcctccacattgtcatgatctttaacaaatcgtttcactaaaaatccagtcatatcaaatcaccatactccactttttccaggaataacccttcaggcggggcggtaaaaccagccatagaacggtccccggcctccagaatagctgccatttcctccggttttcgtttacccgtccccacctctataagggtgcctgataaaatccgtaccatctgctgcaaaaacccattgcccgtaaaggatatatggattctgcttcccatccggtaaaagcagatggattcaatggtgcggattgttgatttcttcattttcttattgccgcagaagcttttataatcatgggttcccgtgagaatggccgctgcctgttccatctttcccacatccagatcctgccccaagccatagtaataataacgctcaaacacattctttttgggagctgtctctatctggtagcggtatgttttcctcaacgcattcaaacggctgtgaaaccgttccggcatcacgcaggcccttgtaacggcaatgtcctccggcaggtaccggttcatatacctcataatctcgtccggggtcatgttcttcgccaaatggaaattagccacctgactttctgcgtggacccccgcgtctgtccgtcctgaaccgtggacctccaccggactgccttccagcttttccagaaccgcctccagcttgccctggatggtcctgtctgtatttccctgcttctgccagccgtcgtatctggtgccgtcataggacagccacactcctatattcattctctgcctccctgccttgccctttcttttttcctgcgcagacaacacagcgcccccacggtaatcgccatccccgcggctgctccgctcatatccagccatacatcgcttatctggccggaccgccctgccacaaagagctgaatcgtctcatccacaaagggaaccataaaaatcatcatcagtacatccctgttaaatatcctgtatcttccatttcccccgcaggccttgaccatcaatcctcccagcaccgcatactctgcaaaatgggctgtttttctgacaatgtgctctgtcagccacagatgctcccagcccagggatatcatggctccccggaatttatccaaaagaaagccgctttcctgggaagagatagtggccggtgtcagggaattaccgtatatgaagcatatatagaccagtatcaccacatgccaccggttcaatgcgggccggttcattacagaccgcttcaatgcaggccgctttaatacaggccggttcctctcatctggcatctaccgtttcccttctgcggtcaggacgccgctttctctgacagcttttatagccttattaagcatttcctcatcctggaccagggccaggcgcacatatccctcgccggacggaccaaacgcgctgcctggggtaaccattactcctgcccgctctaccagttccatgacaaatgcctctgagctggtataatgttccggaatagcggcccacacaaacatggtggcctccggccgttccatcttccatccaatggatgtaaacccgtcgcacataatatttctgcgcgtctcataggccttccttgtagcctgtacacaggactggtcccctgtaatcgccgcaatggcggcagcctggaccggaaggaacatgccgtagtccatgttggatttaagcagcttcagacgggacaccacctgggaattgccaaggcagaatccgattctggctccggccagaccgtatgtctttgacagggaattaaattccacgccgatctcctttgcccccggaaaccgcagaaagcttccgcatgcttttccatcaaaaatcaagtcgctgtaggcattgtcgtgaagcacaatgatgtcatatttcctggcaaaggctatgagttcttcataaaatgaatccggcgccatggccgtggttggattattaggataggacaccaccataagtttggccttcctggccacgtcctcgggaatctcgtccagacggataatatatccattttccttcctctgaggcatgtagtgaagcctggcaccggctatctgcggaccgtcaccaaatacaggataacaggggtccggcacaagcaccacatccccctcgtccacgatggacagcgcaatatgggccagtccctcctgggaccccagcagggagcaaatctctgtctcagggtccagctccaccccataccgggtttgataccatccgccggccgcctccagcatctcccttctgtcactgatggcatacacatagttggacggctctgcggcggccctgcacaatgcctccataatatgaggcgcgggcggtatgttaggcgctcctatgctgagatcgataatctcctctccctttgcagtcttttcctttttaatttcagccagttttgaaaaaatcccctctccaaaacggtccatcctttttgcaaatttcatatgactcatccttcctctctgtatagctgcagctgcatctgcccgacataccatgtcccgctcactgccgactgccggattcctaaaaacccaacaggcaggcaatgattggcaaaaaaacagccggcagcaggtttcctatctttatcttgcttccaaggaccagattcaggcccagaccgaaaatcagtatggaaccaatgcaggataccctggttatcatgatatccgtaagaaatggcctcaccagccctgccagcagggtaatactcccctgatagatggccacggggaaaacggaaaatgcagttcctatgccaagtgctgctgtaaacaccacagacaaaactccatccatcaccgccttggtaaacaaagtattataattatggcttaaaccgtcctccagggaacccacaatggccatggcccccacacaaaacagcagggagctgctgacaaaggcctccacaaaagtccctgatacctgtcctgcgggaatcctggatttgcaccactcccccagctgctgcagcttgtactcaatattaatccattcacccagggcagcgcccgccaccatgcacaccacactcaccagcgtgtcctgtgtctcaaagctgcctccatttatggtcatcagccctttgagagcgcccgtaatgccaacaaacaccacgcacagccccaccgcgctggaaatcgtatcctgcagccgtttgggcagcccgcctttcaataaaagccccacaccgcatccggccagtatgccggccacgttaacaatcgtacctaatcccgccattttacttattcccgcctgttccttacccatttcctaaaacacttttaccggttaatctcgcttacccatttgaatacttttacccattaacaggctaaatcagcccatttcgcctattatagtataattttccagatatgacaagagtccgttaccatgaatgttttgcaccagtactatgaatgttttgcaccagtaccataaatgcctggcatcctttcacagtccagatccagagattctaagcatttggacaagtttataaaaacatataccgccggagctttcacaaaacggcggaaatccccaccagaggatttccgccgtacgcaaagaattcatataaagctacataagcatgactttcacctgttcccccgcctttaaaccgctgcttcctgccgggatatctaccaggcagttacaaccggccatactggacagcatgcccgaagaatggcgcccctcaggcagccatacctttccgtcctctatctttcctcttaccaggcgcctgcagggagatgccttgggaaatggacttttaagtattccaagcagaatctccggcttccactgcgcttttccgcgcatccgttccagcaccggcctcaccagaacctcaaacgtggccgccgccgcaaagggattcccggacaggcagaatacaggcttgccctccactatcattgccagcatgggagaacccggcttaacattgattccgtgaaacagcacatccgctccaagggcttctgccacataaggcatgcagtcccgcacacccaccgatacaccgccgctggtaatcagagcatcgcattccgtcaattgttttctgatttcttcggccagcttctctgtgtcgtctcctccacgttggagaagaaacggcttcattcccagctcccttatcctggcggcaagaagggggccattgctgtcataaatctttcccggctccagaggggttcccacaggcaccagttcatcccccgtggccataatggctaccacaggcacggaatataccggtatggtctcaattccctgacttgaaaggattcctatgtgggaagaatgtatcgaccttcccttttccataagcagtgctcccctgtatgtatcttcgccttctttacaataatttccataagatgcgacggattggtatatctcaaccgattcgcttccctcgtcagtccgctcctgcatgataacaccgtccgctccctccggtataggggcgcctgtcataattctggcggcctcccccggacctatctttaatttaggatacataccagcgcagatgtgctcgattacattcagtcttaccggattctcctttgacgcccctgtcgtgtcctggcttctgactgcataaccatccagcggagaccgcgggaagggaggctggtccatgactgcgtatatattttcagcgcacactcttcccaatgcctctgtcacccgtacggtttcagtctcttccttcatcttaatcttcatgaggcgttcctgggcctcctccaacatgattggattcctttttctcatctgcttcctctcccatggcaaatcatatgcaaaaaagccgggaaaccctgatgaatcaaggcccagccaataaaacaaaaaagcgcgagacgggattcgaacccgcggcccccaccttggcaaggtggtgctccacccctgagccactcgcgcatgaaaatatgttattactttgacgtggtatagtctatcatattttctctgataaatcaagaggttttttatctgttggattaaatttgttggtttaaaatgtttctgaaatatttttgagatatttccccaaaccatccggaaaagcacattgtacagcctttgctttttcggatggtttcccggcataagtttttatttctgggctgtttcgatcctgctgcaggtggctccttctatgaaggaggcttcaatgattttggatacaggattttccggcgggttgaccaccagctcaaacaattcaagggatatttcacgcagattctgctggacagtggttatctggggctgatggagattgctgatcacattatcaaatcccacaatggacatgtctgcgggaatctttaatcccagggaatatgcggcgttcaaagctcctaaggcaatgatgtcgttgcagcagatgattgccgtaggggcggctggaagggagaggaagtaattaagagcctggcttccggcctgaagagtcagctggggatttttgtcgtaaatatattcctggataatggggagtccctttcctgtcattgtttctatgtagccattctgtctggaaataacagaatccatgggtgttttacagccgacaaaggcaatttttctgtgcccaaggttgtagaggtagtccacaattggctgcatcatctgtctgttattagaacgtacgctggagaacttgccgtgggtttttcggtccaggaatgcaattggaatatgaatcttgcaggcttcgaagatatcggaatcaacaccctctgtcaggatgatgccggcacatcggttagccaggcagaagtaaagatacttcttttcaagctccgggctgcttcctgtatcacaaataaggagcatatagttgtgttccagacatatctggttcagttctttaatcaggctgatgaaaaaagggttctccatgtcatatataaacacggcaatggtattgcttgtcttggaaaagattttcttgacaggctggtttgggatatagttatattcctcaattactttttgtactttctttctgaccttttcagatgtcatttctggattattgataacccgggatacagttgcagtagagactcccgccagtttggcaatatccctgattccgatgtatccgctattttccggacgcccttccttgttcatacgatttctcctcctggtcctgaaagggtgaaacttgtttcatgaaaagaaaaaataagtttcatccgaccatatcatattatagtttaaataaaattaaatgtaaatacgtaaaaatgtaacagttttactttgcgcatcaaacgattgtagtgtgcagcatggatggacaaggaaaaatcgctaaaaaaagagaaaaaacaatgaattaatatgaaaaatgcacaaatatattattgacaagaatgagataaagtgctatattgaaaatgtaacaagttacatacacgaagtgaatgtgaggggcggaacatgaatacaagaacggaaaggttgagaaaacggttatttgatacagacccgcgtatttgtccggagcggtgtatctattttacggagtccatgaaggagacagagggaaaaccaaatgctttgaggcggtcccaggcattttatgatgtgctgagccgtatgacggtctatgtgaatgcagatgagctgattgtgggaaaccaggcacagtggcctaaagcctccccgatctatccggagtactccacagactggctggaagcggagttaaatggtacaccttttttcccggataaaagaccgggtgataaattttactatacccaggaagataaagacaaaatattagaatgtgtggattactggaagggaaagtccttatatgaaaatctgagaaagacccttcccgagaaaatcaaccaggcctgggatgccaatgtgatagatgatacatgggtgtctgcagcgggcctgggcaatgtaattgtagattataaaggcgtggtagataaaggtttatccgatgtcatgagacggatagagaataagcttaagaggctggaccccagagaaccgggcaatacacgaaaaagatggtttcttgaagcggcccttcagggcaatcaggccgtggtgatgttttcgggccgtattgctgactgctgcaaagagcaggcagagcaggaaaaggatgagacacgcagaagggaacttcttaagctggaggacatatgcaggaatgttccgctgaatccggccaggaccttccatgaggcggttcagtccatctacatgattctgctggcagtccatctggaatccaatgggcatgccatctcactggggcgttttgaccagtatgtgtatccttattataagagggatttggaggaaggcagaatcacaagagaagaggccctggagatagtcgagtgcttcttcatcaaatgcaatgaacttaataagctaaggagctggccggatacagaatttttcctgggataccagatgttcattaatcttgccattgcgggccagacagtggatgggaaggatgcaaccaatgaagtttcccatctgtgtgtggaagcatgtgaaaatgtcagactctttaccccgtccgtatccattaagtggttcgagggaaccagtgatgggttcatgatgaaggcgttaaaggctgcgcaaaggcatcagggcgggcagccggcattttacaatgataaggcatttatcaggacgcttaagaatatgggaattgccgaggaagaccgggtggactgggtaccggacggatgtatcgaggcatccattcctggaaaatgggattttgcggccaaaggcccatggctgaatgtggaaaaggtacttgaaatcacactccacgacggcacggatcctaagaccggataccattttgtggatttggagaaacgtgcagaggactgcggcagtgtaagggagctgatggaattatataaacagaccctggattattttatgggactgcaggtggaaacggaacatatcaatgatgaaattcatatacagcaggacatcaacgcattccgttcatccctggtatatgactgtatagagagggccatggaccttgtagagggcggttccgtgtactcggcggacggcgggcctactgcgggtaccatcagcgcaggggattccctggcagcattggacgaaattgtatttaatcagaagcttctgaccatggagcaggtgcttcatgccatgagcaccaattatgaggatatggagacagtgcctgccggaccggaaatcagggccatactgttaaacaaggcacctaagtttggaaatgatgacgagagagctgacaagtgggtagttgaactggaggactatattggctccagctacaggtataaatacagaagttccaagtatggaaaagggccggtgccctgctgttactcctacagccagagtcctgtgacaggtaacattgcttttgggaagagcattggagccacgccggacggacgcaaggccggacagccggtgaataatggaatttcccctgccaatggctcggagaaaaaaggcgccacggccgcctgcaattcagtcatgaaactgcccagcatatggttccagaaaggggcgatattcaacatgcgcctgtccaaaggagcgctggatacggatgagaataaagagaaggtaattgccatgattaaggtgctgtttgaaaactacggacagcagatccagtttaatgtggtggataacaaggtgttcaagaaggcaatggagcatccggatgaatataaggatttgatggtcagagtttcgggttatagtgcactgtttacatcgctgtccccggagtgccagatggatgtaataaacagggcggagctggaattatagctaaagtaccgcaatgcggtgtatgagccggcggatgacgaacagggggaatcacagacatgggggtttgcaatgtatttaatatagaacggttcgcaacagaggatggccgcggtatccgcaccgttatatttttaaagggctgttccctgcgttgcagatggtgtgcaaaccccgaatcccagagagcggggaccgaggttctggttaagacgaatgtctgcatcaactgtgcaagatgcagcgttctgtgtccggaaaaagccataagctacatggaaggttatggctttattacggaccagagcaagtgcaggcaatgcggtgtgtgcatcagggagtgttatgcggacgccagggagatgatggggagaaaatacaacgaggaagagcttctgactgagatactgaaggaccgtcaatattatgggatgtctggcggcggcgttacgttcagcggaggagaaccgctgtattacagtgaaatcataggagctgtcggagagcagatgcaccggagaggttataataccctggttgaaacatgcgggcatgtcccccaaaaggcattggaagacataaacgggcatgttgactctatatattatgacttcaaacagatcgctcctgataagcataaggagcttacgggcgtggacaataccttgatactcagtaacctggaatggctgtgcggtcattacagaggggaactgtcggtcagatatccttatattccgggatgcaatgatgatgaggcgtccatcaatggtttttttgagtacataaagagtttggatcatatctctgagattgtatttctaccctatcacaggctggggctgccgaagtatcaggggttaggacgtgcatatgagatggggaatatgccgtcccttaagaaagcagacttgttattcctggtacagcgggcagaaaaatacggtctgaaaataaaaattcaataagagaggggcaggggtgttgatgaagcggaatatggtagcgtttgactgcggtaattcatcatgcagggttattctgggggtgtatgacggagaacagataaccacggaggtcatttcccagataccaaattacatggtcagggtacatcagtatttttactgggatatactgatgatttaccaaaaactgttagagggattgaaagaggcggtaaagcgggccggaaccatccattcaatcgggatctgtacatggggcgtggattttgcgctgtttgacaatcagggacttatgattcagaatccattgtcatacaggaacagcataggggcagaggttctggaacagatgtcagatgagcagagaacatatctgttcaggcagacgggtatcctttgcgataaaattaattcggttaatatgattaagggaatgatggaaaaaatgcagtccatgttttcccatggacataagcttctcatgattccggatatcttaaactatctctttacaggctgtatggtgaatgagcccagcgaattgtcaacgacccagctgatggatgccagaaaaagggaactcagtgaagaagcattgaaaacaatggaaataccctccggcctgtttgcgcctattgggagacacggtactgccattggcatgcttcactccaatgtaaaggaaattctgggcatatcgtatgatgtaccggttatttgcgtgccatcccatgatacggctgccgcggtcctggccattccggcagaggaggaagaatttttgtttgtcagcacagggacctgggcgcttatcggcatggagttagaggagccaatcgtgaacgaagaggtgagaaaaagatgcctgaccaacgagataggggcatttgataaaatcaccctgctgcgcaacagtgcgggtatgttcattatccaacgcattaaggaggaatatgaaggggaacatggggccataggctgggaggagcttaacagccttggagactgccaagagggggcggctccgctgtttcctgtcaacgattccagatttttcaatcccgtacatatgtctgatgagatatggaattatcttgttaagaccggtcaggcttccggagaaaaagactggggtacaatcatatgcagttttcaaaactccatggcgctgagctttgcctcggtgatacagggtctggaggaaatcagcggaaagaaaaaagacactgtctatatggtaggcggcggctcgcggaatgtgaggctgtgtcagatgacagcagatgcaacaggcaagaaggtagtgacagggggcaaggagagtacgtccctgggaaatctgggcgcacagcttaagtactttaagcctgagatgacagtgggggaaatcaggcgcctattgggaacaggcattgagagtgcggcttattgctgtggcaaagattccggcgaggcattgaaacggtatcaaaaactagaagggtaagggggcctgtccatggacggatgtatattgaggatgtgcgggattaacaaaagtttttttggtgttcctgtactgaaaaatgcgcagcttgaggtgcttcccggtgaggttcacgttcttttgggagaaaatggagcgggtaaatccacgttaattaaaattctgtccggtgcatacggacgggaaggcggggacatacagcttgacggcagggagctggcgcctatgacgccgaaggaggctttggacgccggtatcagcgtgatttaccaggaatttaatcttgtaccggatttgcctgtatatgaaaatatattcattggaaaggaatacggccaggggcttcttgtggaccataagcgtgccataaaagaggcagaggggtacatgaagcgggtcggtctggaggtaagtcccaagacactggtccgtgagctgagtgtggcccagaaacagctggttgagatagccaaggccatatccaatcatgtaaaggtcctggttctggatgaacccacagcggccattacggataaagagacaaacatgctttttggaattatccgtgaacttcaaaaagaaaaaatcggaattgtatacatttcccaccgcatgagcgagttgttcgagattggagacaggtgcacggtcatgcgtgacggtgagtatataggaaccgtaaaattatccgaaaccacagaggaccagctgacaaagatgatggtgggacgcacagtcagctttgaaaagattgccaatgaagcagttgacatgaatcaggttgtattaaaggttgagaagctgagatacaaggagtttttaaaggacatatcatttgagctgcacaagggcgaaatactgggatttgccggattagtgggagcgggcaggacagaagtggcaaaatgcatgataggcgcttacagaaaagatgggggaactgttacgtataagggtgaaacattgtccaacagcctgtccaggaatattgaaaagggaatcgtctatctgagcgaggacaggaaggatgagggacttgtgctcatgcactctgtcatggataatatagcgttgcctaacttaaaacagcttgccaaaccgtttatccgcaaaaaggagatggcggatcgcgcaaaggattacatcaaaagcctgcggattaaaacccatacacatcttacggaagccaggaacctgtccggaggaaaccagcagaaggtggttattgcaaagtggctgtattccaatgcggatgtatatatatttgacgaacccacaaggggaattgatgtaggggcgcgtgacgaaatatacaatattatgtatgacctggtcaatcagggggcctctatcataatgatatcctccgaccttgtggaagtacttaagatgtgcgaccgggttgcggttatgagggaaggcgtcctggaggctatattggacaacagcccggatttgacgcaggaaaccatattaaaatatgcgatgcagggaggattataggtatggagagctacaaagagggtgttaaggcaaaactgccggccttgactttatatctgggactggttgttatttttattgtatttgctgtaatctgcagcatgatgggaaagaattttctgacccttaataacatgttcaatatcattacccaggccagcattatttccatcattgcaatcggcgcctcccttgtcattgtcacaggcggtattgatttgagcgttgggtctattgtgggatttgtgggtatatttggaggactgattctgaaggctggtatgcccttgattgccatggggattttgtgtatcgcggccggcgctgcctttggcctggtcaatggctgtctggtcagctacggaaaggtaccgcccttcattgtgacgctgggagccatgcagatcgccaggggattggctcttctgattaacggaggacagcccatatccagcttccctaaggggctgggcagtctgatggcttcaaaggtgctggggacggttcctgtctccgtcatttatgtatttgtgttctacgcagtgattatttttgtcatggcatatacaaagttcggcaggcacgtctatgccgcaggcggcaatatctgcgccgccaggctttcaggaatcaatgtaaacaaaaccgtgcttatggtatatgttttaagcggcatatttgcagccattggaggcatcatgcttttgtcacgccttacatatgcagacccgaatgccggatccggttatgagatgaacgccatcgcttccgcggttatcggaggaatctctttatcaggcggaaaggggaagatcggaaatacactggtgggagccattattctcagtactctgacctgcggactccagatcatgaatgttgccacctattaccagaccattgtcacaggcattgtcattatagccgcggtgtttgcggataagaagaaagaacgccagagtgagtaggaaagctaaatacattaagtatttgcaaataaaggaggaaattgattatgaagcgaaacatgacggcagcagtgatggcattggcaatgagcacggttatgtcggcggcggcacttagcggatgcggaagtaccccgaaggagactgtgccggagacggccaaggaacagcagacagatgcccagaccgcggatacaactggggaaagcgggaaggacgaagaaagtagcgcagaagcggcatcgggtaactatggagataagaccattggatttgtggggatgactttaaacaacgaataccatattaccctggctaacggcgctaaagtagaagcagaggcaaagggggtcaagattgaggtccaggccggagaccagcatgccagcgctgacgcccagcttggcattattgagaatatgattgccaacaaggtggacggaatcctgctggttcccagttcttccgacggtttggaatccgcccttacaaaatgtaaggaagcaggcattcctatcatcaatctggatacaaagctgacggatgagagccttgccaatgtaggcctggatattccgttttacggaaccaacaattatgaaggcgccaaactggcaggcgaatatgtggcgaaaaactttgagaagggaacaaagacagccatactcaaagggattgaaggacagaccaatgcagcggaccgttacaatggattcatagaaggcgccggggacacggtaactgttgtggctgaacagacggcaaactgggaagtggaccagggatacacagctgcccagaacatcataagtgctaatccggatgttgaacttttcttctgctgcaacgacaatatgggtatcggagccttaagagccatcaaggaagcaaatatgcaggaacagattcagattatcggatttgatgcggtaagcgaagccctgaacctggtggaaaacggagagtttctggcaactgtggcacagtatccggctgaaatgggaaaattgggcgtggacaatatgctgaaaatatttgacggcggtgaggcggaatcctatattgacaccggaacggaagttattacaaaggacaatgtaggagagttcaaggattacctaaagacttttgagtaggaacagggctggagttttgagacggatttttcatatgggaatcaaacatacttcaggccataaaaaataagggctgcctgccggcagcagaatgagaggcagaaatggactttaaaaaatgcattgtagagagcggtaaaaagctggagaattcaggtcttactgtagaaacgtggggaaatatcagtatccgcgatcctgagaccggactggtatacttaacgcccagcgccatgaaatacagtaccattgtggaagacgatgtagtggtctgcaggctggatggaacaatcgtggagggtcacagaaaaccaactattgagacagggctgcacctggctatatatagaaacagagaagaggtaaacgcagtcatccatacccatcctatgtattccatggtatacgctacgcagggaaaggatattcccctgataatagatgaggcggcccaggccatgggagatacctgtaaatgtacacagtatgcactgcctggttctgaagaactggcagaccaatgtgaaaaggcgttgggaaaggaagccaactcctgccttctgcattcccacggagcagtctgtgtgggtgagaatatggacgcagcgtttaaggtagcaacagtcctggaagcaacagccagaattctttacatgattgaagccacgggcggaaaaccggcagggatatcacctgaaaatgtagcggtgatgaaggattttgccaaaaatcattatggtcaggggaaatagcgggttataagagagaatcagaacataaaaggcagcagtgtattgcgctgctgccttttgttttgccgtggatataaggtaaacaaaacaaaaaagcctcttcaaggctttttctcattttacagagcaggtgatgggaatcgaacccacgtatctagcttggaaggctagtgttctaccattgaactacacctgcgtaatgaccgcttcgtcatacggtcagtgcccaaagtcggaatcgaaccaacgacacgaggattttcagtcctctgctctaccaactgagctatctgggcatttgtctatgggaacaatcaggaatcatcagtaattatccttacaagctctgttccatcagcgacatcaacaattttacaagatttctccaatattgtcaagatgaaatttgagtaaaataaccttaattcgccgtaatttgtttttgtcatacccacagatataaaaatccgccttcatccctgcgtatttgagtaaacaaaaagacatggacagtctgccatgtctttaagaatatcctgttacacatactccttacgcccgctggcatccgcaatgccttcctcttccctgtatttggcaacggtccggcgggagatggatatgccgcgttctgccagcttttcacccagaaggcggtcgctgtaaggcttctttttgttttcttcctctatgatttcccgaagcacacgcttgatgtctgcggcagtcacggactgggtaccgctttcgctgctgctgctttcctggacagccacactgcgcgagaagaaaaagttcatggggtatacaccccaggagcactgaaggtatttcttgctgacagctctgctgactgtggattcgtggatgtccagttcctgggcgatatctgccagccttaagggattcaggtgggcaggtccgaaggtgaagaactcctcctggtgttcaagaatggcccgagatacctgcatcagcgtctttccgcgctgggttacacactgtttgacccactcggcctgccggattttattgcccagatactccttgagttcagaggattcaggattctggttcatctggcggtagtagctgttaagctcaatggtgggatacatggattcattcagcaggatgtcaaaatggtccttgaactttacaatggtcacatccgggatgatgtagcggagctggtccctgctgctgaaggatacacccggtttgggattcagggatttaataatctgacagtaacccgcagtttcagtgggagagaggcgcagcttcctggcaatggccggaatctggtttttggcaaccatttccaggcagttgtcgatgatggattccagtaccggggtcagtatgtccctgcgttccagctgcagtttcaggcattcctccagtgtacgtgcgcagacgccggatgggtccagggcctggagatcagacaggagatcttccactatctcagtatcggtcccaaagtaggaggcaattgtctctgtgctctcttccaggtagcccttgttgtcaagacattccagcatgaacttgatgatttccgtttcctggtccgtgaagttttccgtgatgagctgggaccacagatagtcctgaagagtctcgccgtcgtccgtgttaatgttccagctggatttaaagtcgtagtcatcatcattattctggcgctggtacagatagtaattctcctcattgaaagaattaagccattcctgctgttcaatggactcgcgctgctcttcagcagtggggggctccacaatgtcgattaccgggttttccaatgccagttcattgatataagtattcagctcctgggaggtcatctgaagaatctcagctgactgaatcatccgctgtgacaaagtctgggtttgctttacctgtaattttaggtccataacacttccttctttcgtgatatctcataatgcatcagagcgtgtttaaaaattgtgttccgccagatggcgggcaggcggtttcaaacaggctccggagaggtgatgattgcgccgggcagtatgaggcagaaacatgtttccggtctgccctggaaaattttaatgaaataattataacacagatggccttttggtacaatgatgcacttggacatttaaagaggcggaaagaaagcttctgcgtgtaatcagaagctaagtgcacccgtgcagctggctccgcaaatcagcctttaaaatcctgtggaggcatgttataatatcgccatggtccagaccgcggggaaatggctgggatcaggcagatgccggcgtcctgtaatgcattttcaggcaccctgcggacggaagaatgaattcaggaaggaaaatatttcatgttatttagttccatgatatttttatggctgtttctgccctttgtgctggtcgtgaatctggtgctgcccatccggctaagcaacttcttactgctggcaatgagttttattttctatgcatggggagagcaggagtatatatggcttctccttttgtccctggctgtgaattatgcaggtgctttgggcatagaggctgtgcggggtagcaggccggcggcgactggagctggggcggcagaggccgggccggaggcgattggagctggggcggcagagactgggccggaggtgactggggctgggctggctggggctggagccgctggggaagctgctggagcggcaggggttacggcagggactgccgtcagtacagacagccagacggcttccggtgccggcaagcacgctctctttatcccggataagctgctccttgtgctgctggtggcggtgaacctgggttttttagggtattttaaatactttgatttcctgaccggcctggtcaataagctggcggggggcactgtggcggagccaaagaacctgctgctgccggtgggcatctcattttacacatttcagatgatatcgtatgtggcggatgtgtaccggggggccacaggggccgagaggaacctgctgaacctgggactttacatgtccttttttcctaagatgatacagggacccatcgagcgctatcagggtatgggtgcgcgcatcagaaaccgccatgtgacgccggaactgtttgcatgcggagcaaggcgctttatctacggactgggaaaaaaggttatacttgccaaccagttcggaagcgtggtggacaaggttctggccaatcccatggaccagatcagcggaggtttgggatggtatgtgggaatcctgtatacactgcagatttattttgatttttctggttattccgatatggcggtgggccttggaaaaatgctgggctttgagctgacggagaatttcaattacccatatctggccaggtccgtgggagagttctggcgcagatggcatatatctctctccagctggttcaaggactacctttacattcctcttggcggaagcaggaaggggacatttgttacctgccgcaatctgatgatcgtatttatctgtaccggattctggcatggcgcgggcctgtcctttattgcgtggggaatgtattacggctgcctgcaggtggcggaacggctgtttttaaagcggcggctggagtgtctgccggcggcggtcagttatatttatatgttttttgttaccgtggtgggatggaccatgttccgggcggattcgctgacccggggacttatgctgcttaagcagatgtttcttctgcgcccggggatttatgatacggccatgtacatgagccataagaccatagtctatatggtgatagggattgtgctgtgcggtccgtttcaggccctggttccctgttttaagaaacatatgcaggacggcagaagcatttacctgtctgaaagcctgggacttatactgctgtttgcatactcgattgtgatggctgtgggcagcacttataatccgtttatctatttccggttttagagaggaggcagcaggtgagacaacgcataaaagcatatatatttgcaggcatgttcctggggatgatgatactgcccggactcctgttcatacctcttaaggattatgtggacacggagaattacgaaaaccgggtttaccaggaaaagccggttcttaatttcaggaatctttctgcagcggaccttaaatcctatccggggcagtatgacgcctactttaatgaccatctggcctttaagaatcccattgtggcctttggaaaactggcggacattcatgtgtttggggaagtcacgtccgatgccgttcttatgggaaaggacggatggatgttctataagctgaaaggggaaatggaggacagcattgcggactaccagggaaccaatcattacagtgttgatgagatggaacggtttggggcgctgcttaagcaggcggaggaaaatctggcctccagagggataaagctggttttctatatggttcccaataaggagcaggtatacagtgagtttatgccctcatccgtgaaggtggttcaggaacagtccaaggcggatttgctgtacgaatatctgaaagagaatacggactgtgatgtgtactaccccctggatgagttcagaaaggccaaggatgactggtgccagatatacaggaagtatgatacccattggaatgatatgggggcatttatggcatcccagatggtgatacaggacatagacggggagccgttcggaccggagtcataccgctcttatgatattgaaaacagaggaaccttcagcggggacctggcaaccatgctgaatcttcagaagtattatgacgatgacccattcctcaaagtgtcaggctacagggaggatgtgtcctttgaaatggattaccagaatgaacatgagaccatcacccactactcctcagacgcagaggggaaagcagaaagaatccttatttgcagggactccttcggggtacacatggctgagtactttgccaggaactacccggatgtgacgctgatggattaccggacagaggactgcggggcggctgcccttgagattcagccggacgcagtggtgattgaggtggcggaacggtatacggattacatgttcggactgctggaacgtctgggtaccatcggaagcggggatgggattctgaaagaggcaaccgcggactgaaacaggcggaatgaaaaatacggcagcgaatcggatgagtgttcaccggatttcgctgccgctgttttatattagatttgattttaatcgctgtataagacatggtaaaaaacgctgttccacgggaacattgtgccgaagcctacccggccagaaatccttttccgatgatttcgctggagttggatatcagcatgaaggccgtgggctcaatggtgcggatatagttgcgcagctttaatgcctggctgcgtttcatggtggtcatgattacggtcttttcatgatgggtaaaggctccctgcgcatggtataccgtggcgctgcggtgcagcgtgttgatgatatagtcgcaaatcggatccgggtcgtcacagataatattaaagcatttgcacagattcagattctcaatcacatcgtcgatgaccagggatttggccgccaggccgatggtggagaacagtcctgtctcaggcccgaagatgaagaatgaggaggccacggccgccacatccaccagcatgagaacggttcctatgttaaggctggtatatttcttaagtatcatggcgatgatatctgtaccgccgctggaagcgcccagattaaagagaatggctgtgcccactgccggcaggaagatggcgaacagcagctccagcaaaggctctgttgtcagcggcctgcttaaaggacagacacgttccagcagggacaggctgatggacatgaccatacttgcataaacggtctttattccaaaacccttacccaggaaaatgaaccctaaaaccagcagtgaggtgttcacaataaatgtgaaatcactggcagaccaacggctgatttcgcttactacagtggaaaagcctgtgacgcctccgaatgcaaaatgattggggaacttgaaaaagtagattccaaccaccataatccagatgcttactgtaatgatgccatattcggcggcagtgcgccaaaatggacttttgatatcgctcataatccctgcttcccttacctgatccggatgacggatatgcgggaagtttaccccctttgcggcatgaatgccacgtattcattgttgttccaaccatataataggatgaaacgactacaagtgcaatcacattttttgttgaaacagccacaagtatataactgtagccgggaaagtgttgtgaataaaggagaatacagtatttggggtatatgtggtgcaaaaacagcttgtaaccactatatatatggtttataatggtgagcgtgacatctggaaatggtatgcttggatgtcaggaattagataaggacaggaaccggcaggagaaaagtaagaggaagccggagaaaatgagataaggtgagataaggagagcaaaaggacatcatggcggatacgaaagtagagatagatttggactataaagggctggaacaatgtctggaagaaatcggaagggattttcagggggagggatatggactggatcgtctgcttgagagataccgctccttccgcaagccgggaatggggccggctgagggaatggaagccctgattcggtccgcggcggaactgacttccaaggaaacacccctgtgggaatttgcagcggccaggctgcggtactgcggttttgcctgtgaggtggaggaacagcttaagggactgggaattaagggactgtatgaaaagatttcatatctgacggaacaggggttatatggtgattatatcctgaagcattacagccgggaggagatagaagaggcggaaggatttcttgatgatgagagaaataagctctttacctatgcgggactggatttgctgcttaagcggtatgtgatccaggaccacagccatcatccgttagagacgccccaggaaatgtatctgggcatttccctgcacctggccatgaaggaaagtaaggattgcaggatgcaatgggtgcgccggttttatgatatgctcagccgtatgcaggttaccatggccaccccaaccctgtccaatgccaggaaaccgtaccatcagctttccagttgttttattgacactgtgccggatagcctggaaggaatttacagaagcgtggacaactttgcacaggtcagtaaatttggcgggggcatgggtttgtatttcggaaaggtcagggcaacgggaagcaggattcggggatttgagggggctgccggaggcgtgatccgctggattaagctggtgaacgatacggctgtggcagtggaccagctggggatgcgccagggcgctgccgcggtttatctggacgcctggcacaaggatttgccggagtttcttcagcttcgtactaataacggggatgaccgtatgaaggcccacgacattttcccggccgtgtgttttcctgacttattctggaagatggctgaggagaatctggaccaggactggcatctgatgtgccctcatgagatccggaccatcaagggatactgcctggaggactgctatggggagctgtgggaggaacggtatctggactgcgtgggagatgacaggatatccaagcgcactgtgctgttaaaggatgtggtacgcctgattatcaagtccgcggtggagacaggtacaccatttatctttaaccgggatacggtaaaccgggccaaccccaacagccaccggggcatcatatactgttccaacctgtgcaccgagattgcccagaacatgtctcccatagaaagtgtgtcaactcaggtgctggaggtaaatggggagaccgcggtggtccagaccacacggccgggagattttgttgtctgtaatctggccagcctctgtctgggggcgattgatgtggatgatccggatgaagtggagtatattgccgccagtgctgtgagggcattggataatgtaattgacctgaatttttatcccctgtcctacgccggaattaccaatcagaattacagaggaatcggtctgggagtcagcggttaccatcatatgctggcaaagcacggcatacggtgggagagcgaggaacatctggcctttgcggaccgggtgtttgagcggattcattacgcggctgtcagggccagcgccaatctggcggctgagaagggatgctaccggtattttgagggaagcgaatggcagacaggggcatactttgagaagcgggggcttgtgagcagggaatggaaagagctggcagaacaggtggcagagcacggaatgcgcaacgcctatcttctggctgtggcgcctaccagcagcaccagcatactctccggtacaacggcaggcctggatcctgtgatgaagcggttttatctggaagagaaaaagaacgccatccttcccagggtggccccggatctgacacccaggaccttctggctgtataaaagcggatacaccatggaccagacctggacggtgcgggccgcaggcgtgcgccagaggcatattgaccaggcccagagcgtgaatctgtacattaccaacgattataccatgcggcagctgctgaacctctatatactggcctgggagagcggcgtaaagaccctctactatgtgcgcagcaagtctttggaggtggaggagtgcgagagctgttccagttaagctgctgttgaaaggtatagaaaggcatgtaagaaaggatttttgatatgagtatattgtcagccaagcccctgtttaaccctcagggcgatacggataagaacagccggaggatgataggcggaaataccaccaatctcaacgactttaataatatgaaatacacctgggccagcagctggtaccgccaggccatgaataatttctggattccggaggaaatcaacctcagcgcggatttaaaggattataagaacctgacggctgcggagcgcactgcctatgataagatactgagctttctggtgttcttagattccatccagacagcaaacctgccctgtattgcccagtatatcacagccaatgaggtgaatctgtgccttaccatacagggatttcaggaggcggtgcacagccagagctacagctatatgctggattccatctgcagtccggtggagcgggacagaatattgtaccagtggaaggaggatgaacaccttctgcgccgcaatacatttataggaaatctgtataatgaattccaggagaagaaggatgatgtgacccttctcagggtcatcatggccaactatatcctggagggcatttatttttacagcgggttcatgtttttttataacctgggaaggggcggcaagatgcccggaagcgtccaggaaatccggtatatcaaccgggatgagaatacccatttgtggttattccgcagcatgattgccgaactcaggaaagaggaaccgcagttattcacgcctaagatggtagatatgctcaggtccatgctggaggagggcgtggcccaggaaatccagtggggatgctatgtgattggcgatgatgttccgggtctgaccagagaaatggttacggactacatacggtatctgggaaacctgcgctggagcgggctgggcttcggcaccttgtacgaggggtatgacgaggagccgcagtccatgaaatgggtgaaccagtattccaatgcaaatatggtgaaaacagacttttttgaggcaaagagcacggcttatgcaaaaagcgctgccattgttgatgatttatagataagggggtataatggggcagggataccggcatgggaagcagtgtcagatgcagtgccagatgcagtgtcagacgcaggaacagatgcaggagcagacgcctggtatccgattatatgattgacaggaggagcgataacgtgacagcagaagagggggaccgcaggacctgggagctgacaggacagctggtacagattgacagttctgatccgggagcctatgagggccaaattgaacagtggatatatgaatggtttacaaaagagatagaggaaaaggcaggagcgcttaagaaccaaattgaactggtccaaagagaagtgatgccgggccgttttaatcttatggcccgcataccgggaaaagaacaagctccggcgcctgcccttgtgtacatatgccatatggatacggtgatgctgggggagggatgggaggaagagactcctgccctgggagcagtggtaaaggaaggccgcctgtacggaagaggtgcctgtgacatgaagtcaggcctggcctgcgccatgtctgcattttcagatatggtggaattgaccggaagcacaggggagcttccggcgcgtccctttgtattcataggaaccgtggatgaggaagattttatgcggggagtggaaagcgctatccgcgacggctgggtaggcagggaagactggatactggatacggaaccaacggacggccagattcaggtagcccataagggccggacctggtttgaactgaccatacagggaatcacagcccatgccagtaatccatggaagggcgctgacgccattgccgccatggcagaggcagtcagccatatccggaaggccatcggcagctgtccgccccatgaggatctgggcatgtctacggtgacctttgggcagatcacaggggggtatcgtccctatgttgtgccggattcctgtaaggtatggattgacatgcgtctggtgccgcctacggatacagcggcagcgaagaatatagtagaggaagctgtaaaggcggcagaagctgagattgcaggggtcaggggcagttacctcattacgggtgaccgtccttatgtggaaaaggacagcagttcccggcttctggccagccttaagtctgtctgcgaccgtgtgacgggagaggacacacctgtcggttcttttaacggctatacggatacggcggttatcgcaggaaccctgggcaactgcaactgcatgtcttatggtcccggcagcctggaactggcccataagcccaatgagtatgtgccctatgaggatgtgtgccgctgcaggcgtgttctgactgagctggcacggcaggagacattctttccctttgccttttaaagtcaaatgtgctatagtgtaaccagtttaaattaaaggagaagctaaggatgaaaaatactgcattggtaatcatggctgccggtatcggaagccgctttggaggcggcatcaagcagctggagcccgtgggacccaacggcgagattatcatggattattcaatccacgatgccatggaagcgggatttaataaggtaatattcattatcaggagagatcttgaaaaagattttaaggaaatcataggacacagaatagagaaactccttccggtggagtacgcataccaggaactggaggaccttccggccggttatgaagtgacgcccgggaggaccaaaccatggggtacaggccaggcagtcctttctgtgaagggtatggtagacggaccgttccttgtgattaatgcagatgattattacggacgggaaggatttcgcaggattcacgattacatggcagagcatatggactcacagtctgagatctatgatatctgcatgggaggttttgtgctgtccaacaccctcagcgataacggtacagtgaccagaggcgtgtgccaggtagatgaggaaggttatctgacaaacgtgacagagacttataatatccagatgaaggaagatgggctccatgccacggatgagagcggcgcgcctgtaaccatcagcccgtcccagccggtttccatgaatatgtgggggcttccggccagctttgtccaggagctggagaagggattcccggtatttttggacaatctgaaagagggtgatattaaatcagaataccttcttcctaaaatcatagacaatctggtacagaataagaaggcgagagtgaccgtccttgacaccccggataaatggtttggcgttacctacagggaagataaacaggccgtggcggacgccatcagagggctgatccaatcaggggtatataaggagaagctgttttaataagaggatactacagactgaagacataagcagtatataataaaaaactgcccggccggaactgccccaaaggttctggcccggccatgatatggcagacaggcagacagggacatgcggatactgtcaatccgtgtgtccttttttcatgcataatttcaaatacccaagcctatactataaaaacagcccacttaagccgggcgatgattataacatgtttgggtggacaacttagctatgaaattatggaaaacatttaacgtacaaaaacgggaagacatatcttattataatacatcagaaggttttgaaacagagggctttgccatgcacctggaccggcttatcagagaggagatggcagccaagggaaaggacggaatcatgttcctgtgtatcggcacagaccggtctaccggagacagcctgggccctctggtgggacatatgctccgcagccggcggcttaagggagccgcggtcatcggaacacttgacaagccggtccatgccatgaatctggatttgtacgccaggtatatacggcttcactatcctgactatgtggtggttgccattgatgcttcggtgggaagcctggaccatgtgggatacgcgaccctggggcggggagcgcttcagccgggactgggagtgtccaaggaactgcaggccgtgggtgacatagccataaccggaatcgtaggcggagtgggcagccgggatccggtcatgctccagagcgtgcgcctgtccatggtgatgaaaatggcggactgtatttgcgaaagcatttttcttgtcgaacgattatgggaaaatgctgccataatatgacaaattatgcgccgggaatctgctatgcttgtttggattaaaaacagcggggtgattctatgggagaattatatgaacccttccctaagctgccgaagaatttccggcagataggtgagagggaccaggttttaaaattatatctggaagattatgtaaatacttatttaaaacgcctccagccggcaaagggggctgatttgcgtgtgggtctgcttttgggaagcagggagacccatgaggacataccctttgtttttgtggatggagccctggaaatggattcagtcaccgaggaaggcggaaaagtggccttcaccgaggatgcctggaaaaaggcctaccaggatgtggagcagatgtttcccaaacgcacggtccagggatggtttctctgcgcaggacccggctgtaccttaagccctctgacttattggaagcagcacagtcagtattttacgggaaagaaccagctcatgtatctgaactgcggtctggagggcgaggaagctgtttacataacatcctctgacggattttacaagttgagaggatacagcatatattatgagcgcaaccagatgatgcaggattacatgatactgcgcaaggatgtgccaagggcagaaacaggagtggatgataaggtcatccagaactttaagcagaaaatggacgagcgaagggtggaggcaggacgccaccggagcacggtgggagttttgtcgggtctgtgcagcgtcctggctgtgacggtactggcaggcggcgtggccatgttcaataattatcagaaaatgcaccagatggaaagtgtgattgcgtccgtggtgccggaaggaaatataaaggacggcctgatggcgtttacaggtaagggcggaacagaaaatccttccggaaagggctggtccgctgcggacgagcctgattatgtgattgaggaggcatcgggaaaggtatatcccactacggccccgtcaccggagaatggagatgagaagccctccagggtgacaccggaaacactggcaccgtcaaatagcggccagacaggcgggacaggccagggaagcggccagacggcggcagcggatcagggaagcggccagtcagcggcatcaggccagggaagcggccagacggcggcatcggaccggggaagcggtcagacagcggcaccggaccagggaagcggccagacggcggcatcgggccagggaagcggtcagacagcagcggccggtcagggaagcggccagtcagcagcatcaggtcagagcagcagccagaagggcgggacgggccaggaaaatggccagacatccggcaagggtgagtcccagactgattcagcccagaagaaaaatgaacagacggagtccggtaatagccaggcggcagcccagacaaaagctccggccgatgattccactctgccgccaaccggaggaagaggggaagctgatgaccagactgtgtcttctgccagctacaaggtgtataccgtggcggatggggagacattgtacggaatctgctttaagctgtatcataatctgcagcatatagatgaaatctgcagggttaattccctgacagatgaaaacagcatatttgcaggtcaaaagcttttgattccataagtatatgcctggaaacttctggcggaaaaagataatgcgttttatccaaaattgttgtatactattgcatatacgcaaaagacgaattttgggagaacgcaggatgggcagtaccaattctatgagccgtgaaaataaaaaaaagcagctgaagcgtcaaatcgtaccttccggcagtcccttccaggaagaggaggacagccgggaaatcgttcacaaggcgcaccagcgtgtagtcaggaagcgcctgattattctggctgtgcttgttggcctggcagccatagcagccctggtgctgttccgctatgaacgttatcatacctttacggattaccagacagtatgggagcgggacctggtggctgaggcccaggaagccgcggcccagggtgaagggagcttctgcgggtacagggatttcggggacggagtcctcaaatataccaaggatggagctacctatctggacgccaagggcaaggtggtatgggtgcagagctatgagatgagaacccccgtggtatcggtcaacggcgattttgtggccattggggaccagcagggcaacagcatctacatatgcgataagaacgggacccagggccaggccaccacgctgctgcccatattgagggttacagtgtccgccaagggcgtggtggctgcccttcaggaggattccaaggccagctatatctatttatataaaagagatggaagccctctggacatcatggtaaagtctctgctgtcaggggacgggtatccggtggacttaagtctttctccaaatggcacgcagcttatcacatcctatatgtatctggatcagggtgtgataaaatgcaagattgtattttataattttggactgggtaaaaatgatcccaaccgcgtagtgggtatattctttcccaaggacctgggagatgccatggcgggcagggtcaggtttctggatgaaagccattccgtcatatttacggataagggaatacagttcttttcaaccagagtggagacatcgccggagctggtgagccagattcccatagaggagaatataaggagcattacatatgcacaggataaggttggcattgttacagataatgtggaaggcggcgatccttacaaactgagaatttatgacagggaaggaagccctgtttttgaaaagacctttaactaccagtataccggatttgatattgacggtgatttggttcttttgtataatgacagttcctgcaaggtttacaacatgacaggtacggagaaatataacggaacatttgattttacggtcagcaaggtatcagcaggaaggttcccgggaacgcttcttgtcatgggacctcagaaaatgacggaaataaagctgcagtgatgcaggaataaaagtgaaaggaagtatagataccatggggatgaaatgtatcggagtagatgtcggaggaacttcggtaaaaatcggactttttgagattacgggagagcttttggacaagtgggaagtaaagacccgtaaggaggaaggcggaacgcatatccttcctgatgtggcccagtccatccgtgccaggatggaggaaagagggctgagtctcaagacggaccttgtaggtatcgggctgggagtccccggaccggtgatgccggatggatttgtggaggtatgtgttaacctgggatggcgccggatgaatccccaggaagaactcagccgcctgctggacggagtcactgtaaagagcggaaatgacgccaacgtggctgccctaggagagatgtggcagggcggaggcaagggatataaggatttggtcatgattaccctgggaaccggtgtgggtggcggtgtcatcattgatgagaaaatcattgccggccgtcacggtctgggcggtgaaattggccacattcacgtaagagatgaggaatgggagcactgcaactgcggaggagtgggctgtgtggagcagatttgttcggccacaggcatagccagggaggccagaaggaagatggaagccagcgataagccatctgccctgcgggaatatggcgcggatgtcacggccaaggatgtgctggacgcagccaaggcaggggatgagctggccaacgaagtgatggatgtggtgggacgctacctgggactggccttatccatggcggtcatgattgttgacccggaaattttcgttataggcggaggcgtatccaaggcaggacagtttctgatcgatgttatccagaagcattatgattattttacccccatatccgagtacaagggtaagctgggacttgccaccctgggaaatgacgcaggcatatacggggccgcgaggctggtactgtagggctgggctggtattgtaaggccgggctggtattgtaaggccggtattgtagggccggtactgtatggctaaagctgcaagggcttatcaaggtatacacacatttagcaaattaataaggagcaggcacctttgtttcaatgtgcctgctccttgtttgtataatttgtctgataaatgaactttttccaagaggtacgtatcttttgcctgtaaatacccggtcagttacattccgggaatccagctacattccgggaatccatacgccggacgcatcaacccagaagttatcaggtgtacgtgtattggcatacatggctccggtggaaggatccaggtaatagctcttaccgtccagttcaatccatcctgtggccatatatccctctgcgtcaaaatagtaccactggccgttaatctgctgccagctggaaaccggataggagccgtctgcattgctgtaccaccagcggccgtccgctgctgtctgccaggtgcctgccgctggctgggaattgtccgagacagtattgcccagggcagcgatatctgcttcgcttactgtccatgagccggacgtgttccagctgctcttggcgctgttgctggactttacggagcggaccttgaactgataggtgccgggtgctgtaatctgctccctgaaatcataggaggtattatagatgtccttgatttcgcctatggcagctccatttttaatcagctgggtctgataatatttggcgcttgaaacctcgttccaggaaacgttaccattgtgggcggaatcccactgaaggttggagggggcagcagctgcgctggtatccgcatccttgtcaaatacgagctggaccgtaaggataagagtggcgttgctgtcctgacgtttagcgtttacgaatttaatcttatcaaagcggtatttgctggaggagcctaaggtcagcttgaagttgctggatgatgtattggaaaaatagtattcctcctcatcctccacccccaggatgatgtctacctgaggcggtttggaactgctccaggtgtctccatcatcattggtgacctcccaggagtctacataataaagaccggtattgtctccggtagcagtgacctccacatctcctccatcacgtccggtgcgtatgtcggagtcaatggtgaggtaaatcttgcctacctttttcttgcttgccgccatggctgcaggagccaggacggaagaaataagggaagcaactaacaatgcggtgcccacttttttccatgtaatcatgtctgcctgtcctttctttttaaatcattttggaatgaattatacatttcaccataatataactatatcacaatttcctggtaaatatcttacgatattataaaacatttgtatactgggaaacattcccataagctcctgaaatccggtgttacagacatttcctaaaggttagtggaacggggcagtgaaaaaataaactctgttcccacgccttccgtgctgaccacgtcaatgttctcgccgtgtgcctgtatgatttcctttacaatggacaggcccagtccggtgcccttcttatccttgccgcgggacaggtccgtcttgtaaaaacgttcccagattttctttaaactgtccttgggtatgccgatacctgtatccttgaccgacacaaatattttttcataccgccccgatgcctggatgtagatggtggaatcgtgatggctgaacttgatggcattgtcaataaggttgtacatgacctgctgtatttttccaaggtcggcaaagaccatctggatgtcgtctgagaaggtaagatcaaagcttacatttttggactcgcaggtgccttcaaaggaggctgccgtatcctttatgacacggttgatatcaaaattggtcctggagaggtagcccctggcatccagggagttaagggtaagcatgctctctgtcagcttgtgaaggcgttctgtctcggatatgactctggacaggtacttttcatacatttcagccggtatggtgccgtccagaatggcttccagatatcccttgatggaagtcaggggagagcggaagtcatgggatacattggcaatgaaattcttctggtattcctccatcttattcagctcatcggacatgtaattcagggtgtcggagaggtaacccatctcgtcgtgggtcttgacatcaatccggtaatccagatttccggccgcatattcattggcacccactgtaatcttgcgaaggggcaggtacacggtctgggtaaataccagaagaataataagggacaggccgaacaggacagcggatgtgatgtaaaggatgctcaggatgccgttctgggactggttgatttcgctgatgggaaggtgaatcagcacataaccgtaggtgttgtaattccctgtgatgggtgccgacacgctgagtacgttcccgctgaacatcccatagtaatcccctatggtataggaccggtttccgatggatgccgggtcaaagccgtttatggaggactggaccctggaaccgcccaggctgtccataaccacggtgccctgtcggttgaccacccatatctcggctctcagatagtgggacagcgcccgtatttgggtggaaacctcctcggaatccagccgtttcccctgatacatggtgctgcatgacgaggcgatgatatttgcctcgtcatacagcgcgtccgccttgctctggaccagatagtcacgggtcatttttgatgaaaatgtggcaatggcgataaaacccagcagaccgaaaatcagatatcccagtataaatttggaataaagagaacgggtcatcgtttcacctcgaatttatagccgattccccagaccgtggtgatggcccagctgttgtgatcctttatcttttcccgcagacgtttgatatgtacatccacggtgcgggtatccccgatgtattcataaccccagatatggtccagaagctgttccctggtaaatacctggttgggggaagccgccagaaaatacagaagctccagctcctttggcggcatttccacggagtggcccatatagattacggaataattggtaaggttcacaatcaggtccgggtactccacgtactcgccctgctgttcagtggacgatggagccggggccggtgctgcctggtaacggcgcagcactgccttgacgcgggccaccagttccttggagtcaaagggtttaatcatataatcatctgcccccagctccagccccagtaccttgtcgaaaatctctccctttgcggacagcatgatgaccggtacctgggaggaagcgcgcagctccctgcagacctgataaccgtctataccgggaagcatcaggtccagcagtaccaggttgggcttgaattccggaaataccttaagggcttcctcgccgtcccccacaatcattgtctcataacactctttcatcaggtagagggagattaattctgcaatatttgcatcatcatccacaatcagaatcctctgcttctctgccatgctatagttcctccttgctgctgatttctacttaaatgtcacaacggttacgcctgaatcgccttctccaaactggcccaggcggaattcctttacatatttgagctggcgcaggcgcttgtgcaccgcgttcttaagggctccggttccacggccatggaccacgcgcactgtctggagatgggccagataggcgtcgtccagatatttttccatggcaggcactgcctcgtccacagtcatgcctatgaggttgacctcagcggacacagtggaggatttggacatcttaatctggctgctgccgcttcccttgcctctggcggcctttccaccatagcttatggaacttccgtctcccagtgtggcgcttatgtccttttcattaagaagctctaaatcccggatattcaccagggaacggagaatgcccatctggacatataaatcgcctctggcattgggcagggtgcttacggtgcctttcaggttcatggacagcactttgacaccgtcccctattttcagtttcttgggcgagatgggctggctgggtccctttggtttcacggtcagcttttcatctgttttctttaactggtccctgagcctggcgcgttctgcttccagttccttgcccacgcctgagctggcagccagcttgttaatctgcttgatggtctggtccgcggtttctttggcctcccgcaggatgcgctgggcttcctcggtggcatttttaagaatcttgtccttgcgctcgtccaggcgctcttccttctgggtcaaacggttttttaaggaggcaatttcatccttataggcgttgatttcagcctgttccttctcaatggtcagcctgctggattccagactggttaacagatcctcaaaggactcatccttggcctccagatgggattttgcgtcgtcaatgatatatccgggcagccccagcttctgggaaatggcaaaggcattgctcttgccgggaataccgatgagtaaccggtacgtgggctgcagggtttccacattgaattcgcagcatgcattttccaccccgggcgtgctgagggcaaataccttcagttcgctgtaatgggtggtggccatggtgcggcacttcatgttgtgcaggaaggagaggatggcaatggccagggccgctccctctgtaggatccgtacccgcgcccagctcgtcaaaaagacagagggaccgggaatcggcttcatttaaaatgcgcacaatattagtcatatgggcggaaaaggtacttaagctctgttcaatgctctgttcatccccgatgtccgcgaatacctggtcaaatacagccagctccgatccctcccacgcagggatgtgaagcccggactgccccataagggtaaacaggcccactgtttttaaggaaacagtcttgccgcctgtatttgggccggtgacgattagcaggtcaaactccctgcccagccatacgttgataggtacaacggcctggggattcaaaaggggatggcgtccgtccttgatatggatatagcctttgtcattgaacacaggggcgctgcacttgtaatggcgggccaggcctgccttggcaaaaataaagtccagctgcgccaaaagctccatgtccatgcgaagctcctctgtacagggcgctgcctgattgctcagggaggctaaaaccgcttcgatttccttttgttcctgtatctccagttcccgcatctcattgttcagccggataatggccatgggctcaatgaaaagggtggaaccagtggctgactggtcgtggaccattccggatacctggtttttgtattctgactttaccggaaggcagtaacgtccgtccctcatggtgataactgcgtcctgaagataggagcggttggagttgaggatggagtttaactgggtgtggatgcggtcagctgtcaccttcatggaacggcgcacatgggataatcccggactggcatcatccgcaacctcgtcctcagagaggatgcagcgtttgatttcattgttcagaggggtcagtggctccagtcccgcaaacaggggttccagggagtcgaagtcatcctggggttcgctggttccccttgcatcatcttctccgtcatggcgtccgtaagccttggctctggctgccacggtcaggagggagcttatggagagcagttcgggtatgcttaaggaactgccgatatccaggcgtttcagggaatctccgatatccctgatacctgaaaatgacacggaacctttgagacggatccgtgtcactgcatccgtagtctgtgcctgccaggtgcgcacttcttccaaatcagaggaaggagagagattctggcagagggcctttccgagaggagaagccgcatattctgtgagctggtttatgattttatcatattctaaagtttttaacgctttctgattcattgatttcacctgtgatttccgtaaaaatgctggatttaaaaggactttttcccaaaagccgacatttaaattataccataaaaaacgatatttactatcttttttactatcttttcatatataaaatcttgcataatactgggaagaaacgtataatagagggtaagagtcttcgcaaggaggagtactatggcggataaacgtgctgaccagcatagagatttagaccggcaggaccagactccggacaagtcccatcgctttattaatgagaagattgtccggcagccaatgaccagacggcagattgcccggaaaatcctgttgaccattttttgtgccgttctgtttggcgtgttgtcggccatttgttttgttgtgagcagacctgtggctgaaaggattttaggtcaggagactcctgaggagagcagccagattaccataccaaaggatgagccggaaaccacggctcctgcggcggcagagactgagcccacagaaccggccatgaccgaggcagtggatgagatggtacgctctgagatggagaagtaccgttattccattgatgatttgaataaactgtacagcaatcttcgcaccattgccagtgacgcggatgacagtctggtggtggtccattccattcagcatgagaaggactggtttgacaatcccatcgagacatcaggacagttctccggagtggtcatagccaggacccgcactgagatactgattctcacgccggacaaggctgtggaggcagctgattccattgaggtagcgtttccggacggaactatgatggccggaatcgtgaagcagagcgataccattatgggactgtctgtggtaagcgtggacgcgggccagatggacagcgagcagtttaagaaggtggaggccatcaagctgggcaactcttacggggtaaagcagggcgacatggtggtggctatcggcgcgccggccggtattgtccattccagcgattatggaaatatatcctatgtggtgcgcaatgtccatacggtggacggcagctccagggtgttctataccagcgccagcggagacgcggaggcgggaacatttctcctgaatacttcgggtgagctcatcgggtgggtcacggacaaatacgacgaggatggagtgtgcaggatgaccacagtggtggccatatctgactataaaggtatactggaaatgatgagcaacggtatcccggccccgtatttcggcatcaagggccaggaagtgagccaggccatggcggacagcggaatgccttccggtatttatgtgatatcggcagtgacagacggccctgcatacaacgcaggcatacagccaggggatatcatcacatggatgaacggcgagaaggtgggaagcctgaaggatttccagaaccaggtggaaagcctgcacgcaggagataagattaaggtggcggtcctgagaaacggcaaggatgaatatacggaaattgagttttcggtgacggttggtgccaggtagcggctgggcttttgaaaggaattggagccgggcagagatgacagccggagagtttgatacccggcggcggcagtggacaggtggcagtggacaggtggcagtttgcgccaggtaatgtaagaagtcaggcaaaggggccaggcagtgttaaccgcctggctgcgttgctgtcagggagtggaatgaatggaactgatggcggtatgaatggcggtatgaattgccaggcgtatagacagggtaatcattgggttttcaaagtgggtttttcaagtgggttttaaaagtggatttataaaataggtttataaaataggtttataaaatagaaagaagaggaaaattgaacatgagatatatcgacaccttcagggaaggtatgcacattgcagatgtgtacctgtgtaagaacaagcagattgccctcacgaagaatggcaaggaatacggcaatctggtaatgcaggacaagacaggtaccattgacgccaaaatatgggatttgggttctcccggagtcggggaatttgagaccatggattacgttcatgtggaggcggatgtgaccctgttccagagctcctttcagctgaatgtacgccggatacgcagggcgcaggagggagagtatgtggaggcagattacctgccggtgtcaaagaaggatataaagaaaatgtacgaggagctgctgggatacataagaagtgtgaagaatccctatcttcagaagctgctgagcggctattttgtggagaacgcggcatttgcaaaggcgttccagttccattccgcagctaaaaccgtgcatcacggattcgttggcggcctgctggaacacacgctcagtgtgacaaagctgtgtgattactatgccggatattatccgatgattaaccgtgatttgctgctgacagcagctatcttccacgatgttggtaagaccagggaactttcacgcttcccggagaatgattataccgacgatggacagcttctgggccatattatcattggtactgagatggtgggtgaaagcatccgctctataccgggattcccggagaagctggctacagagcttaaacactgtattctggcccatcacggggaattagagtacggctcccccaagaagccggcgcttttggaggcattggccctcaactttgccgataatacggatgccaagatggagaccatgatagaggcgctgcagtccggcggggagaataaaggatggctgggatacaacaggctgctggagtctaatatcagaaagacaacggaataggcgttaaggttggataatatagagaaataacaggaccgaatatataaggctgaaaacatttagtttgggtacgggattgcaggatgtgtccttgaccagtgtgttttcggccttttgtgataatgggggcggggatgggatagcgggatggtgggatgagatagcgggatgatgggatgggatagtgggatggtgggatgggatagcgggacgatgagataaaataatgggttgaagaaatcgagagcaataatagagcataataacagtttgaatacaggacaggtgaaatggtatggaaaagaatcaggaatttattgttacaatagaggatatgaatgatgacggagcaggtgtgggaaaagtggatggctatatctggtttgtcaaggatgctgtgattggcgacgtggtgcgggcaaaggccatgaagatgaagaaatcttatggatttgccaggctcatggaagttctggaaccgtcagcctctcgtgtcattccgtcatgcccggtagcaaggcaatgcggaggctgtcagcttcaggccatgagttatgaagaacagctgaaatttaaagagcggaaggtgatgaataatctgattcgtataggcaaatttgctgaggatgagattcatatgcttcctattatggggatggaggagccctggagatacaggaacaaggcccagttcccttttggaaaagataaggacggaaatgtaattgccggattctatgcagggcggacacatgccattgttgaagcagaggactgcctgttgggagttgaggagaatagggagattctggatattgtaaagcagttcatgaaggaaatgaagatagagccctatgatgagctctcacataagggattggtgaggcatgtcctgattcggaagggatttaagacaggcgaaattatggtttgtctggtgataaatggaaacaagcttcccagtaaagagcggctggtggagatgctgaccggtggggatggggttaaaggcatgaccagtatttcctatagcgtgaatcaggaaaaaacgaatgtaataatggggaaggagattgtgaacctttatggacctggatatattacagattacattggaaatgtgaaatatcagatatcgccgctttcattctaccaggtaaatcctgtacagacagaacggctttatgggacagcgctggagtatgccggacttacgggaaatgagattgtttgggatttgtattgcggaatcggcactatttcattattcctggctcagaaggctcagaaagtgtatggtgtggagattgtgtcccaggccataaaggatgccaggaggaatgcagaaataaacggcattcataatgcagagttttttgtgggaaaggccgaggaagtactgccggagcagtttgaaaagaagcatgtccatgcggatgtgattgtggtagacccgcctagaaaagggtgtgatgcggtttgtctggatactatactcaaaatgaggccggaacgggtggtttatgtcagctgtgactcagctacgctggccagggatttgaggtacttggcagatggggggtatgtggtggagagagggaagtgttgtgatatgtttccggggacggtgcatgttgaaacagtggcgttgctcgtgcggaaaccttgattctaggcgagtttgcgggattatttggagataatggagttgtgtttttgcggatggtgagaatgataagtttccgcagatagggggacggggataacgtcggagagtttgaaaatgaggggtttgctatgtgaattgaactatgtagcaaaaccatactactgtaaaatagttaaatattatgataattttataggttggaatttgaggtgatagaatgttggaggcaattacctaccagaatatgttaagagatattaacagcaatgaaattaaggaagatactattggaatattgattacacgtcccgatttagaagttgggaaaagtattttaaatagcttgaattattttcatcatcttagtagaaataatacaaatttttatttgcctggatatggagcatactggtatgaaagttatccagacggacaagtggtaaccaaaattgagggtgttgactggtcttttagcgataaaatgtttgtgtgttttataaatgatttagagacgtatagtaagtgggaatattcaggtgaaagtgagttgctcatgttggaatataaagatggcatactgtcttatgataatatgatgcaattctatttagataatatgatgcgggatagggttatcgtttcaattccttcattttttcaacagctacttagaatctgtaaaaatgataaatcattaaaagatattagtaatgcatttggaaaggataaattaatccaagtaactaaagaaaatattttaaataatattccatcaagtctggcaaatgtatttgtacaggaaaaatatttctgtattcgaaattgtggtaaatgagatgtaggcaattttaggaggaatcaaatggaacatcaattttatgaacaaattaaaagaattctttctgaagccagaaacaaagtatatcaaacagcaaactttgcaatggtggaagcatactggaatatagggaaaagtatcgtggaacagcaggatggctatgaaaaagcagaatatggaagtagattaatagcggaattatccaaacagatgactgtagattttggtaaaggttttacaccgactaatcttaaatacatgagacagttttatctgacatttccaaatagtcacgcactgcgtgacgaattgagttggacacattatcgcctactcatgcgcgtggaaaatgaaaatgcccgtgaattctatacagaagaagcaataaaatcgaattggagcacacggcagttggaaaggcaaattaattcttttttttatgaaaggctgttatccagccaaaataaagaaacggtttcagaagaaatccagaaattggagcctgcaaaagtaccagaggatattatccgcgatccatatgtattagagtttctgggattaagtccgaatgatgatttttatgagagcgaccttgaagaagcattgataacacatttacagaaattcctcttagagttggggcgagggttttcttttgttgcaagacaaaagcggattacatttgatggacgccattttcgaatagatcttgtcttttataattacattctgaaatgctttgtattaattgatttaaaaattggagatttgacacatcaggatttggggcaaatgcagatgtatgtccattattacgaacgtgaattgatgaatgagggggataatccaccgataggaattgtactttgtgcggataaaagtgaatctgtagtaaagtatacattgccagaaaatgaaacacagatttttgcgtcaaagtataagctataccttccaagcgaagaagaactgtcacaggaattgcaaagagagtatagagcattggaatatgataaagaaaaatcaaaataactttacttaaaaaaagtgtaatttttgtgggagggttattgaaaggggtaaatttattcataaaggggtggttttcgttcaaaaggggtaaaattgacgaagaaatttaccccatcattatgtaatggaaatacttttgccatgtagtataaaatcttcgtcccaccgcatgtggaagattgttgccaattgtcgaaaatatgaaataggctaatcagtagaaatgacaattataaaaaatagtaaatgaaaacgttttccaaacatagggaacaggcatagttttttagttataatttataaaatgattaatgacgttttctgataaaaaagactataaaatgtgatagaataagtataacgtaaagctaatagattaaagcttccaaaagtgatagaaactatgatttatttggaggctgcgaatagttttaatcaagaaaatgaaaaagaggatagacaaagatggatgtggagagcttacaataattcgaataattctacagcgatacagaatatgataaaggattgtatggaaacagaagacatatttaatattgattcgatttggcaagttgtaaataagaaatttacaaatcaagataattgaaagaagcgttgtgtgtaatagggaatatgatgaaaatatcataaaagataatgtgaagaaaatagatgcttatgaaaaacagttgataatttgttatgctgaaaaagggagatgccaaatgtaccaacgatattgattcaaaaatgttttagacatgcaaaataattaagacagggttgtttaatgcattaagaaggaaattgttttatttacagatggcaatgttgcattagaagtacccataacgccggaacaggataccgtttggttaaaccgtaatcagatggctgaattatttgagcgtgatgtaaaaacgattggaaaacatgttaacaatgcgctgaaagaggagttgcaggatcagaccgcaactatcaattaaaaaaggtggtgcggattatgaaacggacagaagaacagttggatgcaaaacagattttatcagtgattgaaaaatatagcttagctctggacttgttggatgcatatgaccatcaaaatatgaagaggccagaaggtgggaatactatttatatactctcttaccaagagtgtcggaaagtaattgacagtatgggctatggagaatccagtgatgttttcggtaatgagaaggatgattcttttaagggaagtattggggcgatttaccagacctttgcaggccaggaagtttatccgtctttggaagaaaaagcagcaaatttgttatactttattacaaaaaatcattctttttcggatgggaataaaaggattgctgctgctattttcttatattttatggatagaaatcaggcgctgtttctggatggtgaaaagataatttctgatcatactttggtagctttgacaattatgattgcggaatcaaggccagaggaaaaagaaatgatgattagtgtaatcatgaattgtctaaagtgattaaaaagtgggagtgtccgcataaaatttgatattttagggcataacttttaagccgccagaaccgccggctttgaaaaaatggggtgggtggggttgtgtatagaaacggatgttactctgcctgctccaagtttcgcaggcactctttgaccttgccataataaatgcggaggaacttattcgctgcggcggtcatgtaagcatagtaaggctttccttgtacccgctttttatcaagaaaacgatataccggattgtcctcaggggcattctggagcagcgttgtcatgatctgaaataaggtcttgcgcagcctggcagagccaacttttgaagccctgttgctcttggacttgtgctggccgggctcatccacgccggggtcaacgcatgcaaaggcggtaagtgcttccctgtgggtaaatctggagacgttccacatgccagaatgaataggcatagtcaacccatttttcgcttccgtcctcacgtggcggactgttaaagagtttattgacaccgggataagtattatccagtaatgctatcaggtttgcttttgcggcaaccgtttgcttcataaagaggctgaattgagagtttaaagtttttaactgagtacgtgtattgtccatacctgaatattggcgtaattctgtccagttgtcaagagtatagcgtgcaatcttgcgggcgtctgccgggtctgatttgaccttttgcaaggagttgttgccgaagtttttgatcaggtggggattcataacggaaatgcttttggcaacaattttgatggatacatagtgataagaggcaaccaggaatatgcgcgttcctttggagtataactgacggatgaaacgcagcagcagctggtgcgagactaccagaggatggaagccgccggcatggaggcggagctggaacatacctggtttttggtaaattaatctggtccccgtatttactgattacggttttgattggtattttatgtatgccgtttacggtaaaaaaatggtgaaggatgaaggtatgacaatggtatgacaggaaaagaaacctgtgataagatagttgcggaagataagttgtaacagttcagacggcattttcctgccgtctgaatggctgcaataaaatacgaaacatggagaaaaagtatgttgaatattttaatatgcgatgatgagaaaccatttttagacaggctggctaataaaattaccgtttatttagaaaacagagagataccgtttcagatggctgcattctgttcaggggaagagcttcttaagcacaatgaagatagattgtttgatattgcatttctggatatcagcatgaatgcggtcagtggaatggatgcagcagagtatcttagagacaggaatcggaaaatttgcattgtttttgtgacgggttatatggactatgtgctggagggctacaaagtcggagcgtttcgctatctggtgaaggattccctggagattagctttgaggaatgtatggaagcggtgctgaagaaatttcatatagatacggatgaaatctgtctggaatttactgatagaaagctgtatctgaaagcagatgaaatctgtctcgtggagagcagggggcataagcttttgtttctggcagtggacggcaaacatgtcatcggaaccatgaaccggaagctgacggacgtggagggcctgcttggcggacatgggtttctgcgggttcatcagagttatatggttaacatgaaatatattgtaaacatcgcaagctaccgcctggaactggagccggatattattctgcacgtccctagaaacaggtatccgtatgtaaaacgggagtatgccatttacaaaggagacagcctatgattgcctatattttgacgcatctgtgggtgtttatggaaatgcttttcctggatattctggccgatgcctttttgataaaaaagaaatcgggaagcagatcaaaacgtgtttttggtctgctctttttgaccatggttatgtcagtcagtgtgacgctgtttgaggatattgtggcacttaagctgttttttgactttttgcttgtttatgcctatcttttatatttttatcaaactacattaggggaggcgctctccgtatatgtaattaattattcggtgattatctgtattgattttattggtgtgtccggatattactatatttttggaacttcggaaaatatgccaatgttttacctcatgtgcctgatggtaaaaagtacggagcttgggagcggctttttgatccgatggttttggaaaaaaggcgggaatgcagccatacgttcagagggaatacgggcattgtttccgtcattcgtaatcattgcgggggcaggaatctttgcatcacagtttctgatgcggacgcagactgtgcctgtggaggtgacggttcttatggctggcatgataggactcaatatttttctggtttttaatatgctgttggcggcaagagtggaactggagaaaaacagtttgaaggacgcggcccgtcaaacaaagatggaacttctaatttaccaaaataaacaggagctgtatacaaaacagggaaaacgccttcatgagtataagaaccagcttttgacaatcagcgatatgctggagcaggggctggtatcccagacgcttcaatacacccagggcctgactggagagattgggaaagcgctggaacgcatttacaccaatcatccggttgttgatgcaattttgaatatgaaaaggcaggaagcattaaacagaggtgtaaacgtaaacctcatgtgcggggatctccgggatatgatattaaaagaagatgagattattatattgctgggaaacctgctggataatgccatagaagcggctgaaaaatgcgagtctgaaggaatggtcctggtccggattgtccgggaaaaacggcagcttgtgataaccgtgaaaaactcttatgccgggcagctgcacctggaagacagcagattgatgacttcaaagctggatgaagaaaaccatggttatgggctggcggctattcaggatattgccgggcggtatgatgggacctttgtagtaaaggcggagggggattatgtgaaagcgactgtcttgataccggatatgtgaagacggaaatgaatgagctttttttgcgttccatagtatgattttgcaggagttgttctgtgtatttatttaataaggtatgataggaatagtcagctggaggattggctgactcataaatacacaaaggggagaaacaacatgcaaagggataagaaacgatgcagaagactatgttccatcgcgctgacggtggtatcgaagccagagcggaggacaataaggtgtttgtgactggggaggcatactcgaatatcaaacttgactttgtgatatgtccatatccggcggaactgtcaccggaggagacggcgagggcagccgcatcatttataatgataacggcagtctgccaatcccgattcgtagtggaaattatcagtttgacggctggtttaaagcgaaagcaggaggcacaaaggtaactgtggatacggtactcacaaaggacagtaccatttatgctcattggacgaatacagatggttctggcagtatgggtggatctggtggaagcacaggaggtccggctgccgcggtcggaggactgaaagaaagcctgccgaaaaatcatacaggtgagacggaaatcataaataacgtcaaagtccccagctatgtggaagaagtaatctggaaagcaatggaggacggcagatggagactcggctgggttgtgattgatggaaaatactattatttccatgaaaaaccgaatgtaacgagaggaagaatgcacccgaatacctttactccggacggataccatgtggacgaacatggagtgtgggcgccagcctcaaacgttccagaactgttaccgccgcgtgccgaactactggattgacgtggagtatttcgacccgcagaacgggcagacaaagcggcgcgcgtaagctgaacaaatacacgatttactactatgtggatacttccgctttgtagaaatcggcgttccccgcttcctttgggatttacaagcaacagagaacaacatcatttcctataccggggagtaaaccatgaaaaaaacaatagcgacaaaacaaatgaaacgttggcagaagctggacaggctggctctacttgtgccgctggtcctgtttctttttctatccattggaaaagaaggacggctgctttggggaatcgttctgagggagcggaattttgtggtaacgattgcggcgctgcttctcctggctctggccgctgtcttggcttctctgccgattgtacttatatggcgggccgtcagccataccatgaaaaaagccgcgattcaaaatgccacctttcaggccgatgaggatttcgactattaccgggaaaaactgaccggcgttccgcccgccactatcagcctcttgatggatttgcagattgaagcaaaaaaagacatggcggcattactcttaaaatataccaaaatgggcgcggtttccatgaaggctgggacggttcatgtgcaaaatcaagagcttcccggactgctccccagcgaccggacgcttctggcgctgattgccgggggacaggcacagcctgcaaaccttggcgcgtggaggaggcaggccgtcacggaggccgttgagtcaggcaatttgaaatacagaggcatgcggcaaaatgtacattccgcatcccgatcctgtctaacaggatgcctcggcggatgtctgctccctatcctcattttccttggaatgggtatcaccgccgttgcgattaacaacagcgactggatggaaaagctagatggctttcttgcggcggctccacagtctttcggtatgagacaaatggaataccttttgtcatcgccggatatggtgattgcgatccctctgaccgctttttttgttctgtcctttctggcaatgtttctgcttccgattgcggctgttctgcgcacggcgttgtccatttacggcacaggaacacggcttaagaggacgcaggcgggcgagattttaacggcgcagatttgggggcttaaaaattttatccgtgacttttctaacttggctgaatcggagaaagaacagcttgtcctttgggacgatttcttgatttatgcggtggtgctggaggaaaacgaacgcattatcgaggatatttttcgtttaaggaatttgaaatatcgggattttatacttttctaagaaatgagaggaacataaaatgggagacataggaaaatacattgttattggaggcgccgttctgattgtcgcggttatcttccttgtaatcatcaagaccagaaacgggtttgttgtactccaaaaccgggtcaaaaaccagctggcgcagattgacgtacagcttaagcggcgctatgacctgattcccaatctgttggaaacggccaaaggctatgccaactttgaacggagcactctggaggccgtggtaaaggcccgccagagcgcgatggctgccgcggacttcgatcaggcggctgccgcgaacgggaagctccaggcggcgcttcggcggctttttgcggtgagtgaagcatacccggagctgaaggcaaacgcaaattttatgcagcttcagagcgaattatctgatacggagaataaaatcgccctgtccagacagttctataacgacaccgtgctcaaatacaacaacgccatccagatgttcccggccagtttcattgcgggattgtgcggttttcatccaatgtccttttggaatgcggaggaagaggcccgagagcgcattacgattcaggcggaggatatgaagttttcataaaagaaatcccctgatgggaaaagacgataacaatcaagaatttttgagaaagctggatcacttcgaccgggccgggaacagaatcttgcattggattgtggtcaacctctacgccgtatttaccggcactcgctggaaagaatcttcacgcttcctgcgaagcggccgcagcattaacgaaaaaagcacactgaagcagggaaagaacaggtgaaaggattcaaaacccatgaatgaaaaacgcggacagtatgcttatgagattggtcatgtattttcaacaaaacatggcagcatggctgtaattgcaagacaaaaggtggagaaaaaacctgatcatttccggaaatactataccttgcaatgcggaaggggccaccaatatgaggttggagaaagctatttgcagcaggggcgtctgcgcacatgcaaacattgttatcatcctccgattgctgagacggatccggatttcgcattatggtttgcagaaccgcagattccaagggagagaagccgttattcgcatacactggcagacttttattgtcaggaatgcggctcattggtgcgggacaagagtattcatactgtttatcagagaaaatatgtcccttgcccttattgcagagatggtatgagttatccggaacggtatgtcaatgcgtttctggcacagctgaatatctcctttcatagacaatacatggtaccgtttgaaaaagaaggaaagagaagtcattataaatacgatttttacgatgaaccgcaaggaattcttttggaagtacatggccttcagcattttgctccagatgttttcaaacggattggagggtggtcgttggagatgattcaggaacgtgatcgggagaaggaacggtttgcaaaagaagttctgcatttacagtatatatatttggattgcagaaaatcggaaccggattggatacgaaaagagattataagtaaattagcatgttatccgttagatggtgtggattgggggaaggtcagacaggacgcaaatacctcaatggtattgcagatgatagaactatccaaacaaggatacactcagaaacagattggtgaaaagcttcaggtacacccttctacagtctgccaaaaattgaaaaaggctgaggcggacggtctgtttgatggaagatgtccaagagtggaacaggccgaacaaaatcgtcagcataaacaggaaaaaagaattcgatatttgaaacagaaaatgcggctgcaggaccagaagaaatatttggaaaaaatgcagtacagaccgaatgaggaactaaaatcaaatagcagatccggtatctgctgtgaacaggagtatccacagattcagatgttgggttcttacgtaaatacccgaaaacctatccggttcctctgcaatcagtgcgggcaggaatttgaatgctctgctacatggtttatggagcatcacgcttgtccttactgtaaacagcttgcacgtattcagggcagaattgcagagaaatacggagaggaaatacaggttctgagcatttataaaaattgtaaaacttccatgacaatgtatcatacggtttgtaatgaaacattccagattacttatacggattttatgaaacgtggctgtccggtttgcggaaaacggaatcgtattatccattcagcagaaaccaggagaaatcgcgagattcagagtttttatcagaaactccctgaaatagaagcaagaggatatacattggaaagcgatgtatgcacgaggcttggagtaccccataaattccgctgccatcattgtggggagatctgggaggtgacgcccagtgcagttatgcatggaagaaatcatatttgtatcagcccgtgtaaaaagaagacgccggagcaatttcagcagcaggtggaagctctggtgggggaagaatacactgtcttatcagaatatcagaatgcttttgctcatgtaaagatgcgccataatgcatgcggactggaatattctgtggcaccggcccattttaccagcacaggaaggcgctgtccgaaatgcagcagaaaacgctagtcgggttcttcactgaggacctggaggcacttgagcaagaggcggtttgtaccccggaatttggcaatgggcggatgttttattactatatgaaagaaggtacttccaatgcctctgccggtgtggggtggaggatatacctgggaagaataatagaaaaagcggttatcatcaactattcttatttggcgaaaaactgccgtttcaatcataatgtaaagggatgaaaatgcgtgtaatgttccatttaatcctggtaattcaagagttatcaaaagcactgaaaggcaggtataattactatgaataaagccataaaaacagactggaaaacactggatatgccggagaaaacagcgtcattttcaattgatatcagtctgacagaaggtgaattttccgcacttcaaaatggtcatattccatgtgaaatggaggataagtggtttgaatattttgaaaataatatcctgtatattcaccggagctggactggaatttgtatttataaggttcagttttccagggacagaagaatagaagaagtggttgtaaacagggacagtgaacagtatagagagaccaatattgagcgtgataaagttcaggtcatgatgcgaattaatagtctgtgcggacgtacgggaaatggggaattaatgttaaaatatataaagtcagggagataaatcggagtaaataagaaggataaatcgaagcaaactataggaataaaccggaacaaaataaagaaacaaatcccaataaagcgaagaataataaaatataactataaggagaaacagaaaaaacaatggaatataaatacctgaaagagcagcttctgagtatgtttgactctgacaaactgcatttatttccggaagaatggggattttttaatgaaacggaaagggatattaagtgcattggatatgccacaaatcttaccggggagatcatagaacgagccggagaaaaaggggtggattttcttcttactcaccatgactcctgggaatttatatatggattgaaagaacattgtaataaaatgcttcgggaagccggtatgacacatgccttttttcatgcaccgttagacgatgcggattttggtacaagcgcatcgctggcccaggcattggggatgaagggctgtaaaaaggtcatgccatacagggagcagtattatggaggtgttgccggtgaaattattcccacggattttgagtcttttgcggcgagcctttctcatatattgcaggaaaatgtgcgctgtcatcggaataacgacaggccggtctgccggatagctgtggctgcgggcggaggcaatatgaccagtgatatgaggacggcagtggagctgggatgtgatacatatgttacaggggaatatgccctgtattcacagcaatatgctggattctgcgggatgaatctctttgtgggaagtcataccaatacggaaattttgggcgtgaagtctatggcggagcggttgacttgcggaggcaaaatagagttaatcagaatcagggaaccaaatgattgagtgtaaatataataatgtgcacgggagaaaaaagatggggagggtatgtcggagcagttgcggaaagtaaagataacccgttcccattttattgatactgtcagtttaggcggcttaaagcgacattagatgtcttaagctgccttgatattatatcagcgggaaaccgcagtgactaaaggaggttgagaacatgagtaaagtaaagataactgttttaaaaaccaccctggacaaagagctggcccgggaatacggagcagagggccttactgcctgtcccctgatgaaggaggggcagatattttatgtggattatgctaagcctgaagggttttgtgatggggcatggatagccattcatccgtatgtattttccctggtccatggtacgggaaatgaactgttttattatggaaactggattagaaagccgggagtcgccatatgcagctgcaatgacggactgcggcctgtcatattcaaagtggagtctgccggacaggattctgctatggaatatgagccggtccggtaaaataaatcggctgctttgacggatatgaatggttcaaattatgagaatataacacctgtataagacctgtatttcccgtgtataacgtcattatgatctgcataaaagacgaattagaaatgcccgtcagatgtactgtatgataagattatgcagtatatatggcgggcattagcttacgcaaatcagcatatatgttctgtggaaaacagactgtttatacatttcaaattggacgataacgaactattttgaagtcctgttacgggcaataccgggccgtttcaaagcaccattccggtcagtatttaatcgcattataattccggaaaagctgtcataccatcgccgcaccttcagcaagccatcatggatctgtcctgctctgtcacctctccggatccttaaaaatagaaaatcccggcggaaaataagtaaacagcagaaaacaaatcaataaaagaaacacggccatggatgtcacatggctgtatttttccaatcgacagctccctgacaatccgcggtatatgagaaaggcagcaattacacaaatgtaaaacagggcgatatccaataccaggaagttacgtcccagcacgcttgtataggcgtaaaacagtaccggtatcaggagcgtccccatgagcagtcctgcgtgaaaagcagatatgcggcaggcatcggtcactccctttaggttccacagtccaaacaagagcatggggaaaaacagcaatttcatgtgttcccacacagattcattgacaggagcgataaggccgatgaggggattgcggccggaccagcggtaggtgaaatggagaagggtccccagtatggatacgcacagtatcccggctattgttagtgaaatattcatatgcacctcctgttatactgtatgaaatagggacatatggtagaacattggacaatgccgggaagggatttcgttttctttttgacaaatattataaaacaatgtacactgaaaatatagtttaaagtcaggaatatgcctatggaggttgatatgctgaggaataataaggaggatggattcagcccgggttccatgctgcatttgtggacagctcagacagatgcagtccttgattgtatcagggagaatggattttcccaggtaaagatggaatttattgacaagaaatatgaggagagcgcctgggtgtttaaggaggcgtatggcttttttaaacagagggccaggctcatggtcaaaccgcccgaaggagccgaatctcctgtctggctttttttcgacccaggctgggtgtatttgtctccggacagttatctgctggaactgtctgttcccagggaacgggtggtgctgtttgaccgtgaaaggtggcaaagggttctgaatctttcctatgtggggaaggagcaggaggacgaggcccgctttgaacagaaaatgaaccagatgggtgtgtccacttactgggaagtgtttcagtccgccttctacccatacttgaagtcagaaatcaagaagagttgggagcgcatatttgacatagacaatacggaacagactaacctgggagccgccgtatggcagctcagacaagaggatgtggtgggaattaattcccattcagctttagaagaaagggatggtttcagtggaaaatgaacgggtgaggagaaagtattttaaggatttaaaccgaaaggtttacatagagagggccttggaaatcatcagggacgaggggactgaggccatttccatacgcaggatggccaaggaattccagtgcagcaccaccagcatgtaccggtattttgagaatgtggaggaactgctttattatgccaacctggggtatctggatgagtacctggaggagctgaatgtccatgagaaggagtggcgtgatatctgggacatgcacattggcatatgggaatgctactgccgtattgccttccgctatccccaggcctttgatatcatatttttcagcgcggccagccggaacctgaccacagccatccgtgaatactatgatatgtttccggaacgaatcaatatagtcagcccatatcttcaggtcatgctccagtccacggacctgtttgagcgtgatatggtcatggcggagcgctgtgcccaggcaggcgttattaccatggggaatgccatgaatatgaaccggatggtctgccttttgtataaggggtacctgaaggagattctggattatggtctggaaccggatgaaatcgagggtaaggtccaggagtttaagcgtgatgtggaagtcatcgtaggtatatatgccagcgatacactgggtcatgattatctggcaaatgccagatagaaaaacatcagaaacaatatgaactgccgcggctgtcagaagagatttccgcggctcattttttatgaaaccagaatataggtgatgcagacaggaggaattgatatgagcaaagagacagcaaacggatattatacggtttacaccaggcagtccaaaaaggtgctggaggagctggaaaaaacgggggaataccgggttaaagaggagtatatcaggatgaaaaatgactctatttcagagtattacctgaaactttaccggtggtttgctgaacggtgcagggagagaattgatgttccgcaggggtgttctcttcccatatggctgtccatgcatgatgaatacaggctgaggaacacagaggatacggtgtgcttcaccctcaggataccccgggaaaaggttcatgtcatttctgagtatgcctgggggttcagggtcaattatatgtatgtgccgttaaacctggaggatgagcgcgcgtttaacgaggagctgaaacgatacgggattgaaaatgaaatggctcttgtcacagagtctctgggcaattattatcccatgctgaaaaagagaattatttccagctgggaccgggtatttgaactggaacccaattcaccggcagacgaattgggggtatgttttgagatacagagggaatggattgaaaatatcgagtcccttacatgatgcataaagttaccatggtattatccaacaatgttctgaaaatcgtcaaaatgcacaaaaagccttgcaaaccaggcagttaatgttaaaatattaactgttaagagccagaactatagaaaatttctataagaaaggagtagttcatttatgaagctggaactcggtaatttttatgtaaaggacatcgtttttggtgacaaaaccaagtatgagaacggtatccttacggtagacaaagaggattgccttgcctttgtcaagagagacccgcacatcacggaggcagatttaagaatagtaaagcctggtgacatggtgagactggtacctgttaaagaggcggtagagtgcagagtaaaggtaaatggggacgcactgttcccaggttacacaggaccactgtcacaggccggagacggaaggacccactgcctgaaggatatgagccttttggctgttggaagacactggggaggtttccaggacggactcattgatatgggaggggaaggcgctaaatatacatatttctcccagcttaagaatcttgtgctggttgcagatacagacgaggattttgagaagcgggaacagcagaagaaaaacagggccatcagggaggcagttcacaaacttgccgagtacattggttcctgtgtaaaggatatggagccggaagaggttgaaagctacgagctggagccggttatcaggagagcgcctgagacggagaagcttccatccgtcgtgtacgtgatgcagcctcagtcccagatggaggagatgggttacaacgatctctgctatggatgggactgcaaccatatgcttcccaccttcatgaaccccaacgaggtgttggacggagctatgatttccggaagctttatgccatgctcttccaagtgggcaacctatgatttccagaattgtccagtcatcaagaggctgtacaaggagcacggcaagacccttaacttcctgggagtgattatgtcaaacctgaacgttgccctggagcagaaggagcgttccgctctgtttgtggctcagattgcgaagtcccttggagcagacgctgcccttgtgactgaggaaggctacggcaatccggacgctgactttacaggctgcatcgtggctttggaggacgcaggcgttaagacggtaggccttacaaatgagtgtacaggccgtgacggcaagtccgatcccctggtttccatggatgagaaggaagacgccattgtttctaccggtaatgtttctgaattgattgaacttcctcctatgccggaggtaatcggcgagctggaagcccttgccagggatggtctgtcaggaggctgggccggggatgagattttagggccgtctgtcaggccggatggatccatcatcatggaaaacaacgccatgttctgcggagaccagattatcggctggtccaccaagactgtcagggaattttaggaaaatcagtgaaaggagtttcgttatgaagaacgttatctgttatatcaatcagttctttgcaggcattggcggcgaagacaaggctgattatgaaccggaaatcagagacggcgtcatgggacccacagcagccatcaaccagatgctggcagagattgacgcccaggttaccaccaccattatctgcggtgacaactttatgagtacacacagggatgaagccattgagaggattctggccgcattagagggcagggagtttgatcttttcctggccggaccagccttccaggcaggccgctacggagttgcctgcggtgagattggaaaagcggtttccgccaggttcggcgtaccggtcatcacatccatgcacgcggagaaccccggtgttgagatgtttaagaaggatatgtacgtcatgacaggcagccattccgcagccagcatgaagaaggatgcaggcgccatggtaaagctggctgataagctgttaaagggccagacaccggagggaccggatgcagagggctactatgcaagaggaatccgccaccaggtatggcgcgaggacggcgtggcagcagcagaccgcgcagtggatatgctcattgccaaggctacaggacagccctatcagtctgagctgattattcccaagaaggacctggtacccattgcaccggcccttaaggacttaaaacatgccaggatcgcattggccaacaccggcggtattgttcctgtggacaatccggacaggattcagtccgcatctgcaacacgctggggcagatatgatatttccaagatggaccgcttagcaggcggcgagtttaagacaatccacgctggttttgacccggcggctgccaacgcagaccccaacgtcattatgcctgtggatgttatgaaggaattcctgaatgagggcaaatatggttctctccacgattatttctattcaaccgtaggaaccggaaccacacagggagaggccagaagaatggccaaagaaatcataccgcttctaaaggaggaccatgtggacgccgtcatcatggtctccacctgagggacctgtactcgttgcgggtcaacgatggtaaaagaatttgagcgcgcaggtttccctgttgtacttatgtgcaaccttcttccggttgcccagacggttggcgtaaaccgtatggtaccaactatatccataccttatcctcttggcaatccttccacctccaaggaggagcagcatctgctgcgccgctccagagtggaggcagcgctggatgcactggctacagatattaaaaagcagacgattttcaaagtagaaatctaggatacagggcggtacgaaatacggttctgtatgccatgaatgatgagtggctttgtgtgccgcctggcaggggggcctgtcaggcggcatttgtgtttgcttgggagcttatgttttcaagagagcttttgtttggctgtccagaatcattttgccggctgtccgcatgcttttaggagaaggagagggcctatatgaaagacaaaaatcaggtattcgtagtttcactagcaataaccattatcatggcaatatgggcagttgcctttaatgccaactttacagttgtttcaaatgctgcatattcatttctgaccaataatttcggctggctgtatcttatggccatgaccgcatttgttattttttccgttgcaattgcgttcagtaaatggggaaagattaagctgggaccggatgactccaagccggaatattccactgtatcctggtttgccatgctgtttggggctggcatgggtgtgggtctggtattctggggaatctctgagcctctggcgcatttttcaaatccgattcccggaattgaggctggcacagaagccgccgcaaattttgccatacggtccagctatatgcactggggacttcatccgtgggcaaactattgcatcattggattgggccttgcctatttccagttccgcaagggaaaaccgggtcttatcagttccatatttgaacccctgatcggtgaaaagggaataaacggatgggtgggaaagaccatcgacgtactggcagtgttcgccacagtagcgggcgttgttacttcccttggactgggcgttatgcagatcaatgcaggtcttaactacctgttcggcattcccacgaccctggtgattcaaattattatcattgcggtaataagcgttatctacatctggtctgctgttgacggcatcagccgcggcattaagatcatttccgacgctaacttatatattgccattggcctgatcactgttacattcctggtagggccgaaacttgagattcttaacaacctgacaaacggactggggcagtatctgcagaacttcttcggggacagcctcatgatcaacaattatggagacaatacctgggtgggagcctggagagtgttctactgggcatggtggattgcatgggctccatttgtgggatcctttattgcacgtatctccaagggcaggacaattcgggaattcatcgcaggcgtggtgctggcaccggccctggggtccatcctctggtttgccattatgggaagcctgggactgcatttgggtatggacggtacactttctgttgcccagctggcggatattgcaagcaagcctgagacaggactgttcattgtgatgggacagtatcctctgggaatgattctgtgcgtggtatcccttatattgttatgtacattcttcattacttcggcaaactcaggtacctttgtacttgccatgttctcatccaagggagatctgaatccgaagaacggaagaaaagtgctgtggggcgttgtacagtctcttctggctgtgggacttctggttgcgggaggattgaaaccccttcagactatttcgcttgcagcggcattcccctttatattcattatgctgtttgcaggggctgcccttgtgaaggctttgatgaaagagaaatagctgtgtggtaagataatcagataaaatataagcgggcccggcgcccgcagcgtaagcataggtgtcctggatgctgccttttattatagaaggctggcttccgggacacatttgttttggtatgggaagatttgggatagaaaaagcggaaagataagtattatagaaaatattatataaggaaggaattgacattttggttagtcaatgctaatcttatcacataaacgactcattagccaagcagaaggaaggtgatattatgtcaacagccattatatgcgcggtcctgattgtcattgcaatcattggaatcaagagctacgccaaaaaattaacctccgggtgctgcggggcctcctcccagccatcggtgaaaaaaatgaaagtcagggataaggataagtcccattacccctattcacggcttctcaaggtggacggcatgtcctgcggtaattgtgccagccatgtggaaaatgcactcaacggcctggaaggagtgtgggcccaggtggacctggaaaaaggcgaggccctggtgcggatgaaacaggaatacggaaacaatgagcttaaacaggctgttaaggatgcagggtatgtggtctataaaatagaagaaagccctgagttttcaaacagataaagaaagaaggtaagggccagcaggtcggcgctgcccccggggcttatattgtttttaataaattccctgtccagtgattcaatataaggaatcgggtccttgtttatgaattccgggtcatttagcgtttcacgaagaagggcctggattttcttcatggaatgataggaggatcggtttacaatattggtatcctctgagtgggcaatgatatataacagggtcacagcgccagcgtcattgagggagaggcccctgtccagctgatgtttcagtacaggaagagctttctttaagactgtgtgataacctgacagggcctcgcctctggctcctttcatgccatagagggcataaagtctttctccgtttgtgcgggcattttcaaccgtcacatcattaaaatcctcaagcacgtctgccaccagcttcctgtttatcttaaggagggcgtccggagagtatggaatgtggttggcatacatgtagcccagggcgccgttcatgatagccagggagaatataagccccttatgtgtatttacctggttggtagcccggaacatggtttcctcagcctgtatgcccagggagcggagcctggaaaagatacgggaaaatggttcgtgtccgttttcaatcccgcagagggcaaattgttcaaagtagtgattcagtgacacggcgctggcctcaaaagtgaagatgtccatatcctgatgggctcctgtattgttccggtctaccagtcccggtttgggagtgacactgacctcgtataaaagcgcctgcatggacagggaggaaagtttcctggcatgctgtttcgcaaaataattagtcatgatctggcattcctgctccagcagctcctttacggaatgggtcctggcacggctgcacacaaatgcctcctggttgcagataaggcatttccgggtggaaaatcccaggtctgtccgggatatcttcatgccgtctgtctgaatcacgtcgatgtcaaacagtctgccaagggcaacagagtcctctagcaggcagagattttcttttataaaccgggcatccccgtctactgcccagaaatactcatgtcccgtatgggatgtggtggcataggtggcaatgatggggattttccatgcatggcactgggtttcaatgaggcggatgccttcgtgaaaggtccgcagagccagagggaataccttgacgggtcctacaatattcagggtaaaggagatgacaggcaggtgatgttcagacagaagcattctctggacctcctgccggtgctccctggcatccagcatgtccttaagcgaaacctccctgcctgttaccagggttgaaagattgatgtccatataaaccctcctctgtttcatccgtctgtttgataccattgtatccggtaataagaaaaaacacaagccggagagcagctgcggttgcccggtgctgtccggtggttttccgcttgttttccatccggtctttcaggtggttgttttcctatatggggaagtgtataattaggaaaataccaacagggaggggaaacatctatggatttggaagaacggaaaaaggcattgcgccaggagataaaagcggctgcagcagcgttggatgaaggttatacaaaggaggcggaccttgagatattcagccatgtggtggggctgccggaatatgagcaggcggggactctgttctgctttgtgggaaccagcggagaaattgacacagcgcccatactggaggatgcattaagaaagggaaaacgggtgggtgttcccaagtgtacggccagagggatcatggaagttcgtgaaatcaggagccttggggatttggaggcaggaaagtacgatatattggagccgggtgcagaggcgccggtcatacagccggaggaaattaatctggccattgtgccatgtatgtcatgcagccatgacggcaggcgtctggggtacggcggcgggtactatgaccgctatctggtcaggacccgggccgtgaaggcggtcatatgcagggaacggatcatgcgtgcggatatacctgtggagccccacgaccagctgatggatatggtgatatcggagcatggtgtccggcggctgggaagccggtgatataccggtcatcggacttggatgaataaattctttcataaattacataaattttataaatatatgtcacaaaccagcagtgtcctccctctaactttataaaaggaggcggaaagctatggagaaacaggaaaagtatgatatggaaaggctggttgacctggcagcgtcggggaacagggacgcattggaggaactcttgggagatgtgcaggacatggtgtttaacctgtcccttcgtatgctgggaacggttcctgatgcagaggatgcatgccaggagatactgattaaagtaatgacccatttgtctgatttcaggaaggaaagccggtttagcacctgggtgttccgtgttgctgtaaatcatgtgcttgcgtacaggaagcatatgttcagccaccatcctctgagtttcgagtattacggggaagacatagctaacggcagggaagaggatgtgccggatatgacaggcggagtggaccgcggtattctggaagaagaactgaaattgtcctgcaccaatgtaatgcttcagtgtctggacggggaaagcagatgtatctttattctgggaaccatgttccggctggacagcgctgtagcgggagagattctgggaatatcaccggccgcgtacagaaagagattatcgcggataagggaaaagatggcggcatttttgggggaatactgcggtctggcaggaggaaaatgcagctgcagaaggcgcgtggattatgctattgccagccgccggctgacaccggagcgcctggagtacaacggcatggaacagggacggagcaggattgcagaacagtgcagggccattatggaggagattgacggccagtcccggatatttgtagagatgcccttttaccgtaccgggcctgaggcaaaggagtttattaaagggcttctgaggtcggatgcataccgtaccgtgatgatgtcgtagaggaccgggcctgaggcaggaaaaacatgacatacagatgtcattttatatgtgatataattttgaaatgacagatatatgatacggaggcacacggcaccgggccggcagacgcgccggttatgatggggtttcatcacggccggctctgtctcccttcgttctccggcataacgaaaggaaggtacacaatgacatggatggaggcatacccggctcacaggcagccggacatggagcaaatcggaaggtatatagcaagtccctgctggcagccgcttttggcgtggctggaggacacctttcatatatcccccaggattgagtacagcagatgctccatgcagggaggctggaatgtgaagtataagaagggctccagggcagtctgtacattgtatccagaggaagggtattttatctgcatgatttcagtgggggcaaaggaagcaccggaggcagaactggcactgaacggctgcactgcgtatgtccggcagctgtatcatgatactactccctttaatggggggagatggatgatgatagaggtaaggaacggggaagtgctggaggatgtgaaggagctgattgggattcggatgaggaagaaacggagtgtttgagtttaaattgcagtgaaggcagcaggaagaggccggataataaatcccccctcttccttatttttgtcttgacaatcggttcgtggcaacgtatgatgaatatattaattggattaattcattaaaatcaattaatgaatagggagaatgtatgaacagaagtataaggggttttaatcaggagaatatacaggacatgaaccgtacgctgctccttaaccttctcaggaaggaaggaatttgtgcaagagcccatctggcaaacctatcccagttaaaacaggccacggtgactaatattgtcagtgattttattgactggggcctggtaaaagaggtgggatttttagttggaaacaaagggcgcagatccataggtatttccattaataacgatgactttggagttttagccataaggcttgccagaaaaaattatacggtaggtattttcaatctgtcaggcaggcttctggataagaagcgggtggagctggatgtgaaccagcctccaagggtaacctttgaagccataatccatgaggccggagaactcatcagatcatctgaatccaggaaaatcatagccataggtatggccatacccggtccttacagtgaaaaaagagggcggattgagctgatgacaggcgttttgggatggaatgaaattcccatacaggagaaactgcaggatattttcaaaataccggtttttttagaacaggatgccaatgcaggtgccctggcccagtactggcataatgatgaagattataaaaatggagttgttgtatatattgcagttgggcagggtgttggtgccggtatcatcaataatggtgagctgctgaagggctgcatcggtgttgccggggaggtgggacatacctctatctgttacaatggacccagatgcgcatgcggcaattatgggtgtctggaaaattactgttcatccattgcatttaccaaagaggtgaaccgcgtattaagacctgaaatagaatataatttccgtcaggtatcccagctcctgagagatggagaccaggtggttacggatatttttctggatgcttgtgataaactttctgttggaatcgtgaatatcatcaacagttttaatccatcagtcatcgtaataggagatgaaatgtcccatatccttccttccgtcatgttggaaagggttaagagcaatgtaaaggaacgggtgctgccggaaatttatgccaatatgaatataaccatgagcgtagttagcaatgattctatggcacatggggcggcaattgtggcgataaatgatattttcaatcatccgttaacatattttgagagtaatcaaagagacgactaaattaggcgtgtgaagacgatacataaaagaggctgtggtctgtgaaagtgcacaaaccacagccttgtttttgtgcaaaatagcaaataataaaattggaatgctgtatttttaaaaacttattgacaaaatatctgatctgttgtaatataaactcaacttattaattaattcaattaatgaatatattcaaaaaaatgattattttggaggaggaaaaatcatgaaaaaaacattagcagttgttcttgcagctatgatggcagccagcttgacagcatgtggagggtctgcagctaaagatacaacggccgcggctgccaaagcaccggcagcagaaagtacagcagagaaaaccggagaaggtgcagggacagacgaaacggaaaaagcagcaggaacagaagagaagaaacaatataaatttgggtttacagaaatgagcgcaggctctttctttgatgcttgttacagcggtgttgaggaagtggtcaaagccaatggggatgagatcgtccacgtggaaggtaaagctgacagcgcataccagctgggtgtaattgaggattttatttcacagggatgcgacctggtattctataatccatcagatgcagcggcgtcagcggcagcggtcaaggcgcttaatgacgcgggtatccccattgtaaactttgactcagctgtcagtgacctttctaaggtgaactgttttgtagtgagcgacagctattcctgcggacagattgcaggcgaggaattgattaagaatcatcctgaaggcggaaaagtagctgtattggatttcccggcatcagctgccgctgctgacagggccaagggatttgtggacacagtcacggctgacggtttatttgaagtggtggcgcagatggatgcaggggcaaaacctgagaagggactgactgtaatgcaggatttactgcaggcccacagtgacctgaccgccgtgttctgcattaatgatgagtgcgcacagggtgcctattccgctatcacaacagcaggcgacaagattgaaatatacagtgtcaatgcaggacccgaagcaaaggcagccatgacaaaggacggagtggacggaatctggaagtgtactgctgcccagagcccaatcggtataggacaaaagagcgcagaggttgcgtataagattttaaatggcgaatcctatgagtccgaaatcaagattccatcctttgcggtaacacctgagaatatcgaccagtataacaagtcagactggcagtaggtgaggtggaggcctttgatgctggactggcgggaacgtgacagtacagtgtgggcccggagtgttcttaggagcgcttcgggccagcctccctttattatatagcatgaagagagcggggtgccaatggtgagtgcggttttggaaatgaaacacatagcaaaaagtttttccggcaacaaggtgctgctggatgtggatctgacggttgaggaaggcgaggtccatgctcttctgggagagaacggtgccggaaaatcgacccttatgaagattcttggcggaatttataccaaagacgccggcagtattctcataaacggcagggaagttcagatacataatgtagcagatgcccgtgataatggtatcagcattatccaccaggaactgatgctggccagacacatgaccatagcggaaaatgtatttatgggcagggaacagaaaaaggctggggggtttgtggacctggccaggcaggaagccgagacacagagattcctggaccattatggaataaagctaaaggctgatacaaggctggaccgcttgaccattgcccagcagcagatggtggaaatcatacgggcagtgtctttcggttcaagaataattgtaatggatgagcccacttcctcgctgtcagatgcggaggtggatatcctctacgagatgatccgcatattaaaggaacagaaggtatccattatttatatatcccacaggctcaatgaactatatgatattgcggacagaaccacggtgcttcgggatggggaacatgtgggtacagtcaggatgaaggagacggagagggccgagctcattgctatgatggtaggccgcgacctggccagttattatacgaagaatgacaatgcaaaggatgaagtggtcctggaggtaaaggagctgtctgacggcaaaatggtcaagaaagtaagctttgacctgagaaagggcgaaatcctgggagtgtccggcctggtaggggcaggcaggagtgaaacggtggaatgcctttttggaatcagaagaaaggtccgaggaactgtcaggttcaaaggcagggaagtggattttaggaatccaagggaggccatggccaatggattcggtatggtcccggagagcagaaaggaacagggattatttttacagtccggtgtgcggtttaatacaacgattaacgtagttcccagatttctaaagcatttcatttggaacaggcaggcagaggacggcatcgttgaaggcaagataaacgatatgcatattcgtgtcacggggccggaacaggtagtgggaaagctcagcggcggaaaccagcaaaaggtattaatcggaagatggctgtgttccacccagtcggtgcttatattggatgagcctaccagaggcgtggatgtaaagacaaaatccgagatatatgcgcttatcgaccagctggcagccagcggaatgtcaatcattatggtttcctcggagcttccggagattattaacatgagtgacagggtactggttatgtgcaatggatacagtacaggcattttaaacagagatgaactgacccaggagcggattatgactctggccactactgagataggcgcataagtttcaaaacaggaggataaaatggaagcaaaaaagagtgacggcattttgcctggttttggcaggaatgtggtttcaacagttaaatataatggcggaattatcattggccttttaatcatttgtctattgctgagtgtcatgactgactcattttgtacagtgagaaacctttccaacatcatgcggcaaatatccattaatgtgattctggcatgcggaatgactatggtaatcatattgggaggaatcgatctttctgttggttcggttatagcggtatccggatgtctttgctgcgggctgattaccaatgtgggagttccatctatcatagctattcctatttccatctgcgcaggaaccctggtaggggtgtttaatgggtttgtaatatccagaaccactatacctccttttatcgtgaccttggctatgatgaatatagggcggggatttgcccgcatatataccaaggcaactacaatattagtagatgacccattgtttacttttattggaagtggtaaaattttgggaggggtgccaatccaatttgtatacatgctggtagtcattgttatttcgggcctcatacttaacaggacaaaatttggaaggaatatttatgcggtaggagataacaagcaggccgcgtcttattcaggcattaattccagaagagtgaccatgacagtatttgtgattatgggaatctttgcatcctgcgcaggtattctgagttctgcccgtaccttctcggcacagtttaatgtaggagaaggttcggagatggatgccatatcagccgttgtactgggaggtaccagtatgagcggaggtgttgggcgcctcagcgggaccattattggctgtattgtaatcggagtattgaacaatggcatgaatatccttggaattgattcctcctggcagtatgtggtaaagggtgtagtggtcctcatagctgtatttattgactatatcaagaagatgaaagattaatctttcgccggaaaggatgaaatatgtcagttattctgggaattgatttggggacatcaagcgtgaaagccatgcttttagacagcgtcaaaggggttatctcggtagagagcagtccttatgaggtatctataccatttgaagggtatgcggagcagaatccggagacatggtggctggagacaaaacaggtactggggcgtttgagagataaaaatgaacaggaattcaacgagattcaggcagtgggtttttcaggtcagatgcatggaatcgtggtggcagactgtgagggaaagcctcttaggccagctattctatggctggaccagcgttccagaaaagaactggagtccattaacagcgtgctggatttcagggaaatgggagagatatttagaaacagggcatttacaggatttgctttcccgtcccttatgtggctgaaagagcatgagccggaagtgctgctaaaagccggggcagtcctgatgccaaaggattatatccgattcaggatgacgggcaatctggcgtcggatgtgacggatgcttcagctaccgcattgtttgacacagctaaaagagactgggcctttggtatcattaaaaagtttggacttcccgagaagatatttcctgcctgcaaagagtccatggaggtggcagggacagttaccagacaatgccatgaagaatgcggacttaaggaaggaattccggttgtatatggcagcggggaccagatggcccagagcattggaaatggagtattcagggaaggtgaggtcatctcaaatataggtaccgggggccagatatccgcttatataaaggaagcaaaatatgacagagagctgaggacccataccttttgccatgctctggataaggcatacactatatacggagctactctttgcagcggaatgtccttaaattggctgaagaataaagtgctgggcatagaggatttcaacagcatgagccacatggcccaggagatagatccgggctgcagaggtctgatatttctcccatatctgtccggagagaggacaccgcatatgaatcccagtgcaaaaggaatgttttttggtctcagtttatgtcaggacagacgttatctgacccgggccgtcatggaaggagtgacgtttagtctgagagattcgctgactatttttgaggagctggggatccagtgcgaaactgtcattgcttcaggaggcggttcccacagtgatgtgtggctgcagatacaggcggatgtattcaataaaaaggtaaaggtttgtgaagtggatgaacaggcctgtctgggtgcctgtattctggcaggaaccgggtgcgggatatttaacagtatagaggatgctgcccgcaggtttgttagttttcgtgaaaaggtgtatgagcccattccggagcatgtgggtctttatgaaaaacagtacagggtcttccgggaactgtatgtagccaatgagcggtttatgatttaatacagatggattccggaatcataaggagaatacatatgggaagagaaaagatattactggacacggatatcggtacagaggtggatgatgccattaccctggcatatctgctggctaatccggatgcggaaatcatgggaatcaccaccgttaccggagaggcggcagaacgggcaaggctggcaagcgtactgtgccacatagcggggagggaagacatacctatttatccgggatgtgaaaatcctatttttgttccccagattgagttgtatgcaccgcagaaaaaggtacttggcagatgggaacatcaaaaggaatttccggctaaccgtgcggttgcgttcatgcaggatgtaatacgaaggaatccaggggagattacattggtatgtattgcccctctcaccaatgtggggctgctttttgcaatggaccctgaaattgcttccttgttaaaacgtattgtgcttatgtgcggctcgcctacatataccagatacgataatacaggcgagaccatgagcgctatggaaaagagtgatgttattgttttgggaagtaagggagttattgaaaataacgcacttatcgaccctcacgcgacaaagattgtatatggggcagatgtgcgggaacacattacctgcggtttgaatgtgaccagccagttaattatgaagccggaggaagcggaaggtttgttccgccacccgattctggaaccagtattagatattgccagagagtggtttaaggatgaagagagagtcacattccatgacccgctggcagcagtttccctgtttcacgatgatgtgtgtttatttgaacagggggacttattcatagaaacagacagctctttgctttcaggattcacttactggaagaaaaagagcgatgggcgtcatagagtagccatgaaagttaataaagagaagttttttgaacatttgtttgaggtattttaaagaggaggtagctgggatgaaatatggtatttattttgcttattggacgaaggaatggtttgctgattataagaagtatatggataaggtgtctgctttggggtttgatgtcctggaaatttcctgtgcagccctcagagatgtatacacaaccaaggaacagctgattgagctacgtgaatacgccaaagaaaaagggcttgttctaacagctggttatggacctactaaagcagaaaatctgtgttcagaagacccggaggcagtgagacgggccatgacattcttcaaggacctgcttccaaagctgcagttaatggatatccatatcctgggagggggattatattcctactggcccgtggattttaccattaataatgacaagcagggagaccgggccagggctgtcaggaatctgagggaattgtccaaaacagcggaggaatgtgacgtggtgcttggaatggaggtactgaaccgctatgaggggtatattcttaatacctgtgaagaggcaattgattttgtcgatgagattggaagcagccatgtaaaaatcatgctggatactttccatatgaatattgaagagacaaatatggctgatgcaatccgcaaggcgggagacaggctgggacatctccatctgggagaacagaaccgcctggtgccgggaaaaggcagcctgccatgggctgagatagggcaggcgctccgtgatattaactatcagggagccgctgtcatggaaccttttgtcatgcagggagggaccatcggttctgagataaaggtatggagagacatggtgccggatctttctgaggaagcactggacagggatgcaaagggtgcgctggaattctgcaggcatgtgtttggtatctaaacggctgtttcgcaaccattacagtattaacgaatttttcctgtccagatactcattcagatatcccgtaaagagagccatgttctccagcgatatcctggaaggggtattatgtttcagcatatagagggtacgccggggaggagccggtgacaggggcagtatccggacagggtactgcttttttagtcccatggccgtggtggagggcatgatggtccagtaatccccggcttccaggaaatcattcaatatggaaatactggtggctgtcaccaggggtcgggagccggatctgatataccggtcgtgccacagcttaaactggggaccccatccgatgttgctgttggcggaggagccggtaaaaagctccctgtcaggagggaggacggacggatgaaccggttgagcagggcaatcctctgccggtatcagaccggagccttccggaaccacaagcaccatgtcatcctctgagagaggggtcacatttacatggggggtgctgatgtcatagagggcaaatcccacatcagcctgtttgctgcttacaagggagtaaatcatgtccgcgggatagcatttgatatccagggaaaaaccgtgcagggatatgagctccctgtaaaacggcgtcagattatagtccagaaagctgtccactgtggcaatggtcaggaagggggaatcgctcattccccctatctggtccgcttcattccaaagggccagcatctgggacgcgatatgggaaaaggcaagtcccctggatgtaggcagggcggacttgactccctttctgcgctcaaaaagcgggtagcccagctcttcctccatggctctcagccgagatccggcagtggatggtgagaggtagagctgttcggctgcctttattagattattttcttccagtatggtcataaaaagctgtaaatcatcccggttcaaggcaaaatccccctttatcagatatccagcatggaaatatactgcgcatgttccagaatgaaatttttccggggctccacttcgtctcccattaggatggagaaggtctggcaggtttcatggtacatttccatgtcatttatggttacgcgcaggagcgtgcgcctggaggggtccatggtggtttcccagagctgtccggcatccatttctcccagccccttgtagcgctggattttgtaggtgccgtcccgcccgatggcgtttatggtctgctcaagctcgctgtcactataagcataccagagtttctttcctttttctacccggtaaagaggaggctgggccaaaaatacgtgtccctcctcgatcagcttcggcatgaaccgaaagaggaaggtcagcagaagcgtggtgatatgggcgccgtccacatccgcgtcagtcataaggatgattttgttgtaccgcaggttttcaagggaaaatgtgtccagtatgcctgtgccgaaggcggaaatcatggccttaatttccgcgttggcgctgattctgtccagggacgccttctccacattgagtatcttgccccggagggggagaaccgcctggttttcgcggcttctggccagcttggctgatccgcctgccgagtcgccttccacgatgaacagctcacattctccgggatttttgctggaacagtccgccagcttgccgggaagggagagtccggacagcgcggttttgcggcgggccatttccctggcggttctggcagcggttctggccttcctggctaacatggccttgtcgcatatggcctttgccgccgcgggattttgttccaggaacagcgtgagacgtgtatacaccatctgctccaccaccggacgcacatggctgcttcccagtttttgctttgtctggccttcaaactgggcgtcctggagacgtacacttaagaccgcggtcagaccctcggagagctcgtcccggctcagggaggaatccgtgtcctttaaaagctttgcgtttcgggcatagtcattgactgccctggacagcgcctggcggaaacccgtcacatgggtgccgccctctggtgtggaaatgttattggcaaagcttaagagctgctcgctgtaggaggagttgtgcacaagggcaaattccgcctgcaccttatctgtctcatggcggccggaaatgattcctgtataaaggggttcaccgtcctgctccagccaggatacaaagtccttaagcccgttctggaaacagaaggtacgggaccaggcggtcaccggacaggttgcctcgccggccgggtctctccgcaaatcgtacagggatatctccagaccctgtgtcaggaacgctgtctcccggagccgttcctccagaatattcctgtcccaggcaatggaagggaaaatgtcctggtccggcataaaggtcaccgtggtgccgtgggtcccctgacggcacggacccagttgttttacaggggctgcaggtatgccgcgttcataagactgggcgtaggaaaagccgtcctggtccacctgcacatgcagatgggaggacagcgcattgactacagaagcccccacaccgtgaaggcctcctgaaaccttatagttgctgtcgtcgaactttccgccggcatggagaactgtaaataccacctggatggcggacagtcctgtttttgtctggattcccgccggaatccccctgccgttgtcgcggaccgttacagagccgtccttgttcaggtatacctgaatcagggtgcagtggcctgccagagcttcatccacggcattgtccacgatttcatataccatgtggtgaagcccctgtgaggacgtgctgccgatgtacatgctggggcgcttgcgcactgcttccaacccctccagtatctgtatctgggcagcgccgtagtcttctgttaccggggataaggctgatgtctgattcataaggcaattctcctgaaattagttagaatattgccattatatcagaaagagtaagggaaacattggttgatttcctgggattatatggcgggaaaatcctgtttctaattgattctttttctatttatccttttccgcctccagccactctatggccgcctcatactgctccctggtaaaggttatcttccccttgcatatggaaaagaatccctcctcctttagctggcgtatggtacggttgagggtttttacgttgacgccgatttcttcctgcagcatctgccgggtgcgcagcacagtgacggatgccggggcgcgggatgtccccatgccacgggacgaccccatgccgcgggaggattccatgccgttttggcgtccgtactttaccatataatccaacagaagataggagggcgggtagaacagcttggccccgttattgtaagaggaacggtaaagcttgaaggcggtgtggcgggcagccaggttcaatatgtttatgtcggatgccagccagcgctcggcatccctgcggcttatgtaggccaccacgttgtcggtcacggcctcgatggtcaccgaggtgtggctcattccggccagaatggtgacctccccgataaagtcaatggctttattgctctcaatcatatagacatttccattttcaaattcattgatgacccggttttcaccttttgcaacaattccgaaataccctaattccatatttttctggtgaatgatggagcccgccgcatgggtccttacggtgcagcggctgcggatgtcctcgggcatgttctttgtatattctttcagggcgggcgcggccgcttccaattctgtcagtgtcatttgtattccccgctttattcagtcatttattgtaagtatatcattttatatttcttaaaatcaatgtattttcttgttaaaagtgctcatttgtccttttttaatcttgggaatttgtctaaaatattcaatacaaggtgattgtaacagccggccggggtgaaaataaataaaatatggccggctggaaaggaggggctcttatgagcggcaaaaaagaaacatatgtgtatggttcccttaaggaacggtttgcactggaatggaagatttacgccctggcatttggattcatcctcatagcggataatatcggccagattaagattccggtggggaaaggaatgtttatcctgttcccgattttctatgcaattattctgggggtattaagcgggccacaggtgcttaaaatcgtggataacaggcatgtgaaggcggcttccaaactggtggtggtgggtatatgtccctttatcgccaaactggggattacggcaggggcaaacatcgacaccattcttcagtccggtccggtccttctgcttcatggttttggaaatcttttggggccgctcctggcactgcctgttgcaatcctgctgggcatgaaacgggaggccatcggttcctgtcattccatcaacagggagtaccacatggcgctgattaacaacatctacggacctgactcggcagaggccagaggaagcctttccatctacatcgtaggcggtatggtaggtaccatctacttcggtctcatggcatctgtggtgggaatgacaggatggttccatccacaggctctgggacttggctccggtgtaggagcgggaattatgatggcaagctcaagcgccagcctgtgcgctatttatccggaatggaccgataccatttcagccatggccagcgtgggtgaaaccattgccggaatcacgggcatgtatattaccatgtttatcgccatacccatgacggacaaattatatacgattctggaaccaaagctgggacggtttgctttaaagaacaaagagggcagggatattaaggaggagacggtatgagatacatagaatggcttgtgttgtttgtattggcggcatgcggaaccggtcttgccaatctgattggctatggggtgggaatcacggattccattcccggactggcagtacttattgtgatatccatggcagcggtggtactcactaaagtgcttccgctgaagcttcccatcgtggcttactgctccatcatagggctgctttccgcgtcccctatttcaccggtaagggattttgtgatacaggcagcctccaacattaattttacggccccctttaccatggttggagcgtttgcgggcctggccatcagcgaccagttaaagacgttcatcagccagggctggaagatactgatagtggggatcttcgttatgacaggaacctttcttggctcctgcctctgggaccagatgcttctcagcctggcaggcgttatctgatagcgtgaagagatgacggcggggtgcgagatatctgacaggccgtccgattgaaaaaggagaagataagatgcagacatgtgatttgttaataaaagatggttccctgttgataaagtatgaccaattggaggaacatgtggatatggcggtttccgggggaaggattctggagaccggtaaggagctgtggaaaaaatatcaggccgttgagacaataaacggaaaaggaaagctgtttatgcccggccttattgacagccatatgcacacgggacagcagctgctaaaagggctggtgctggatgcaaagcccataatctggaccagaatcatgcttccctttgagagcacgctgactccggataaaatgcgtctctgcgcccaggcagctgctctggagatgataaaatgcggtacggcaggattcatcgacgcgggcagctaccatatggagacagcggcttctgtctacgaggaaagcggccttcgcggcgcactgtcctattccaccatggatgaggaggggctgccggagtccatagccatggacgcggaggaagcgttaaagcgtacggattccctctatgacaggttccatggaaagggaaaccttaaggtgtattactctctccgggcactgaattcctgttccagccgtcttgtggagctggaagctatgcgggccagggaacggggcaccatgcttcaagcccatatgaacgagtacatgggggaaatcaacggtatcgtggaccgggagggaatgcggccctatgagtatctggagaaaatgcatgtgctgggaagcaatttcctgggcgcccacagcctgatactttccgagcaggaaaaatccctggtgatggagcggggcgtaaagacctgccactgtcccttcagcaactgcggcaaggcagtgccggatacgccgcagcttctggaaatggggattccggtgggcctgggttcggacggagcggcccacggcggcttaagcctctggaatgagatgaagatattccgctctgtcatgaatatataccacggtgttcccaacggaaatcccaaggtgatgccggctgagaccattttaaagattgtgctggaaggcggggccgcagcccttaacgaggaaggaagcctgggccgtctggaagccggatacaaggcggatatcatcagcattaacatggaccagccccatttgtgccccaccggaaacaagattcacacactgtttgaatgtgtaaatgcaggcgatgtggaggatatgatagtgggaggccggattctcatgaagaacagggaggtcctgtctctggacgaggagcgtattatgtacgaatcccggaagtatatggaagaaaatgcagatacattttaaatgattctataaagatatagcaaggaggaaaactggttcatggtgttctggatgattgttatggcagcgaacctggtagttggcgcgtttgtaggacttacgggggtggcaggctttctgcttcccatcgtgtatacaggtcctctgggaatgggggtgacggaggggctggcgctgagctttgcggcattcattgtgtcgggggccctgggatccgtcaattataacaaggcgggaaacctggatatcccattcggcatccgcctcagtctgggaagccttgcaggcgctgtcctgggagtgaaattgaatctcatcattccggaatccacggtaaaggttatcctgtacgtggtggtccttctctcgggtatttccatcctgctccgcaaggataagagccaggaggagggcggcagggcatatgtcatctcagatcacctggcagccacactgattctgggatttgtcacaggagccgtgtgctccctgtcaggcgccgggggaccggtgctggtcatgccccttttggtggttctgggaatcggcatcaggaccgcggtgggagtggccctctttaactctgtgttcatcggcatacctgcctgtatcggatacatgatgcagtgctccgtcaaggagcttctgcctgttatggcggcggcccttgtgttccacggcataggagttgtatacggaagcaggaatgcggttaaaatcaaccagattcttctgaaaaaaggcattgctgtattttctatattgatagctatatggaagctggccctctaaagaggcaggaaaatggaaaagaggacggatttatcatgaataatatagtaggtaaaggcgttacccgtgttgacgcttacgcaaaagtcacaggagaggcaaagtacacatcggatctggaaccaagggactgcctgtgcgccagggtggtccattccaccattgccaatgggcttgttaagaggtttgaccttgaggacgcccttaaggtgccgggcgttgtgaaaatcgtcacctgttttgatgtgccggattaccagtttcccacagccggtcatccgtggagtgtggaggccgcccaccaggatatcggggacagaaagcttctgaaccggcgcgtcaggctctatggggatgacattgctgccgttattgcctcggatgatgtggcctgccagcaggcggcccgactcataaaggtggaatatgaggaatacaaaccaatggtcacagtggaacaggccatggcagaggatgccacgcctctccaccctgatctgagaaaggacaatgtaattgtccattcccatctcaccatggggccagaggattttacctttgaggaagggctcagggaggctgaggagaagtacggaaaggagaatctggtggtcctggaacgggagtaccacaccccgcgtatttcccactgccatattgaactgccggtatcctgggcttatcaggagccggggggcaagataacagtcacgtcctccacgcagattccccatattgtgcgccgcgtcatttcccaggcattgggactgccggttggaaagataagagtcatcaagccctacatcggcggcggcttcggcaacaaacaggatgtgctctatgagcccttaaatgcctatctgaccacagtggtgggagggcgtccggtccgcctggaaatcagcagggaggaaaccatttacggcaccaggacccgccatgccattgacgggaaatgcagggccctggccacaaaagacggaaaaatgcttgccaggaagctggaagcctatgccaacaacggcggttatgcgtcccacggtcacgccatctgcgccaactgcggcaatgtattcaaggatatttaccaggaccggctgggggctgagattgactgctacacggtatggacctccactgccactgcgggagccatgaggggatacggtattccccaggcagcctttttatcggaatgccttacagacgatgtgtgccgggcaatcggcgcagaccccctggctttccgcatggaaaactgcatgggagagggattcgtggaccctgccaacggcattaccttccattcctacggccttaagaagtgtatggaggaaggggcgaagtacattggatgggaggagaaacgcagggcttatgccaaccagacaggccccgtgagaaggggagttggaatggctatcttctgttataagacaggggtatatcccatttcactggagactgcctccgccaggatgatactgaatcaggacggctccatgcagcttcagctgggagccacggaaataggacagggtgctgacactgcattcagccagatggcagctgagacaaccggcatttccctggaaaaagtgtatattgtatccacacaggacacagatacagccccatttgacacaggggcgtatgcatcccgccagacctatgtgaccggtatggctgtcaagaaatgcgcgcagcagctgaaggccaggattctggattatgccgggtttatgctgggaggccgcccggcagaagagatggacgtggctcacgatcacattgtggagaaggccacgggaaaagagcttcttgacatggaaaccctggctcttaccgccttttactccctggagcgctctgagcacatcactgcggaggtcaccaaccaatgcagggacaattcattttcctccggctgctgttttgtggaggtggaagtggatatgcccctgggacaggtgacggtaaaggatattgtaaatgtccatgactccggaatgctgatcaaccctgagctggcagaggcgcaggtgcacggcggcatgtccatgggcctgggatacggcctgtccgaggaattcttatataatgacgccggcaggcctctcaatgataatctgctggattataagattcccacagccatggatacgccggaccttcgtgtgaagtttatccagcttgaggaccccaccggcccttacggaaataagtccctgggagaaccgccggccatcccggtggcgccggccctgcgcaatgcagtgctccatgccacaggcgttgccatggataccatacccatgacgccacagaggctcatagagacatttcaggcaaagggtttgatatagagctgtaatggctgatgtaaaacagcaggtcaggtaagtataaaggagagtcatcatgtttgatataaagtcattttacgaagcagattcggtggaggacgccattgccgccctcaccgcagaccctcagtcccaggtcatcagcggggggacggatgtgctcatacgcgtcagggagggaaaggatgcaggcaggggcctggtatccatccacaatatcccggagttaaaaggcgtcagcctggaggaggacgggaccatcatcatccggcctgcaacttccttttcccatataaccaatgaccccattataaagaaacacctcagcatgctgggggaggcagtggaccaggtgggaggacctcaggtgagaaatacggccaccatcggagggaatatctgcaatggggccacctctgcggactctgcctccaccatgtgcgccctgaatgctacagtggtgttaaaagggccggagggagtacgggaagtgccggttacagaattctatacaggccccggacgtacggtcaggaagcagaatgaggtctgcacggcatttaagattaccagggaaaactatgagggatgggaaggccattatattaaatacggaaaacgcagggccatggaaattgcaacactgggatgtgcggtgagggtaaagctgtcgcctgataaaacagtgctggaagacgtacgtctggcttacggcgtggcggcccccactccggtgcgctgttacgaggcggaggaagcccttcgcgggaaacaggtgtcagatgcgaccatatatgacctgtttgcagataaagccctgtcccaggtaaatccccgcacatcctggagggccagccgggaattccgcctgcagctcatcggggagctggccaggcgcgctctaaaaacatccatcacactggcaggaggtaaggcagatgcttaaagtaatcaagctgaaaattaacgggaaggaacaggagactgctgtggatgacagggaatctcttctggatacccttcgccgcctgggcttcacatccgtaaaaaagggttgcgaggttggggagtgcggggcctgtacggtccttgtaaatggagaggccattgattcctgcatctatctgtccatgtgggcggacggcaaaagtatcatgaccgtggagggcttaaagggtcccaacggcgagctgagtcccatccagaaagccttcatagaagaggcggccgtgcagtgcggattctgcacccccggtcttattatgtcggccgtggagattgtaggcacaggaaagaagtacaaccgggaggagctgaaaaagctgatatccgggcatctctgccgctgtaccggctatgagaacatactcaacgccatggagcgcattgtggaggagacatacagggtagtgggagaataagggtagtgggagaataggaagctgctgctgcaaaaagggtagtgtgcagatttgtctgattgtcgtgaaaaaactgaaaatttatacagtatatacgaaaaagactattaaaatttaaatattaataaaaaagtattgacaaataacctccttttgagtatactaaaactatcaaaaagaacgaaatctaaaaaaggaggtacagaccaccggaaagtgatttttcgttttccatataatcaaatgattattatagaaaacagagaataaggaatctgcctgatgaaatgttcaaaaggaaactgatacaatacgagtcccgttatattttcaaatactgagtagatgatcaaggaacgggaacatttataatgatatgacgagaaagtatcattaaaatgtacttgataatgaaaggtgaaaataaacagaccgtataagtaaaggaaatccaaaagaacagagtaaagagagcagaaaaacaaaaaacaggtatcgaggaggagaaatctgaatcggtacttgttttttagtggaataaaagcggtggcgcacagaatatagggcctgcttcccatatgggaatcctgagtatcgttacaggccggagccggatggctttcagataatgaaaaccatccggctttttttgtccttttggccaggctgtgatccgggtatctcaatcattccaatatattgtaaatttaagggaatacagatgtaaaattgcacagaaaagtttgcctgtatttagcaagatttaacgattctatgggtgaatgtaaaattgggatttacaaatataataaatcatgctacattttagataacttgttaaacaagttaagtaacatatacacactaaaataaaataggtataaaacggaggggaacatgatgaagaaaagaatcagacagtgggcagcattatgtgcggcagttggcattgcaggcagtgcagtgatgggatgcggttcgtctgcaccgaagccagacgcagggagcgggcagacttcccgggaagcagcagatgggaccggaactggttccgggggaggagcacacataggaatcattttcacagaggcaggactgggaggcaattcctttaacgacctggccctggagggtgttaaaaaggctgccgctgattacggaatcacttacgatgaggtggagccaaagtctgtgtcagatgaggaaatcatccaggatgagatggctgcgtccggggactatgatttaattatctgcgtgggggcagaacaggtggatgccctgaccaatgtggcttccacgtatccggaacagcggtttgccctcttggatgccacttctgatcttcccaatgtagcctcctattcctgtaaggagcaggagggagcgtttctggcaggcgccctggcagccctggcaaagcaggaaaagacagatgacaagctgggagacggaaagaccatcggattcatcggcggtgtggataatccccttatcaaccgcttcgcagcaggatacaaggcaggggctgagtatattgaaccggaaatgaaggtgcttgtagattacgcgggcggcttcaatgaccccaccactgccaagaccattgccaacacctttgtggaaaagggagccgacgtaatcttccatgcagcgggtgcttcgggaatgggcatgttccaggccgccgaggaaaaaggctttgctgccatcggcgtgaacttaaaccagaacagcatcgctccggactatattatggccagtatgcttaaaaagctggattcctgcgcataccacgccattgccagcattgtggaggacacctacacaggggagaaccagatgctgggccttagcgacggaggcgtggatgtgacggtggagggaagcaatatcaaggtttccgatgatatcctggccagactggacgagctgaagcagaaaattatatcaggagagattcaggttccctctgagcttaattaagataggccggataaatagaggaggaagatatggacgcaatcagaatgattggaatcgtcaaatgttttgggccggtacgcgccaatgacgggattgatctcatcgtgggacagcaggaaatccactgcctcctgggtgagaacggaactggtaagagcactctgatgaacattctctttgggctgtaccatccggatgcgggagagatattcatcaatgaaaaaaaggccgccatagccaatcccaacgatgcctatgccctgggaatcggaatggttcatcagcattttatgctggtgaatcagctgacggttcttgaaaacattattttgggaaaggaatccggaggattgttcctcaaccggaaggaaagccggaaaaaggtggaggagctggtggaacggttcggattcaggattgaccttcaggagaaggtggtgaacctgtccgtgggcatgaagcagagggtggagatacttaagaccctgtaccgcggagcggacatcattatcctggatgagcccaccgcggttctcacgccccaggaggtggacgagctgtttaagattctgcgccagctaaaggaaaacggcaagaccatcatattcatcacccataagctgaatgagaccatgtcactgtctgaccgcattacagtcatcagaaaggggacggtggtgttccggtgcgacaccagctccaccaatgagaaggagctggccacccagatggtgggcaggcaggtggagaacatcgtggcaaagaggggacagaagaccggccaggccgttctggagctgaaaggtgtgcgccttcatgagagggccggggaaactgtcagcctgaaggtccgtgccggagaaatcctgggcattgccggggtggatggcaacgggcagcaggagctggaggaaatgatcgtgggaaaccgcagggtcagggaaggcgaaatttttataaatggaattccggtccagaacatggctgtcaaggacaggaaggccatgggcctgggatacatcccatcagaccgccataagaatgccatgattcccagcttttccattacagagaatttcctgctgggctatcaggaaacgccggagtattgcaggaagggtttcattgattatgagaggctgagacaggacgcagagaaacaggttgaggagtttgaaatcaaggtggccggtgtggaccaggagataggacagctttcaggcggcaaccagcagaaggtgatactgggaagggaaatcagccatgatcccgggctggtggtggtggcccagcctgtgagaggtctggatatcggagccattgagagggtgcataagacacttcttcagttaaaggagcagggaaaggcaatcctgcttatatcggcagagctttcagaggtcatgaacctgagcgaccgcatcgctgtattctacgagggagaggtcagcgcccagtttgacaacggggagtatacaaaggaagaaatcggactgttcatggcaggaaaaaaacaggaggtgcgggctcatgaaatggaacagcaataagaacgcccaggcagacggaggtgaccggacaggtgagaaagcccggaccgttggaaaaatccgcggcggcaggcacacagcggaaataggcaaatccctggcatccatagggcttgcgcttctgataggagccctttttatcctcctggcaggggaatcccctgttaaagcctacggttccctgattcagggagctctgggcacaccgcagtccctggccaatacaatcagcaagagcattccgctggcctttacaggcctggccgtggccatgggttccaggtgcggtatgttgaatatcggtgcagagggccagcttcacgcaggagccatggccagtgtcatcaccgccctttactttagcgcgctccctgctcccctgctgcttgtaatcagtatcctggccggaatcgcggcgggcatgcttgtgggcagcgttcccggcatttttaaggccagattcagcaccaatgaagtaatcgtggccattatgctgaactatatctgtactctttttacatcctatctggtaaacgggccctttaagacagagggttccacggcccagactgagcttatagccgagggaatctggttcggaaagctggtgcccaggacccagctcacctatgcactgttcctgctgctctttgtggcggcagccatgtacatattcctgtggaagacatcggtgggataccagctgagggcagtgggagccaatccctctgcctccggaacagccggaatccgtgtcaacatgtttctgattatgtccatgaccatcagcggcggaatcgcggcccttgcgggcattacagaggtgtttggaaaataccaccgctttatagagggtttttccccatccttcggctttacgggaatcgccgtggccatattgggaaggaatcatccggccggtgtgcttttgaccgcattgcttttcggaatcatggatatggggtcgctgcgaatgagccgcgagaccatggtaagcaccaacatggtgacggtaatacagagtctggtgatactcctggtagcggctccggaactgattaagtggagcagaaagagaggatgacatatggatatgattaataattttatcggacttacccttcagctttcagtgcccattatattgggggccctgtgcggcaccatcgctgagcgcgggggcatcatcctcctgggtgtggagggaatcatgctcatcggcgcgtttgccggggcagccggttcctatgcagccggatcagccatggccggggtgcttctgtccgtggtcctgggcggtatgattggctggttttatgcccttttctgtctgaaatggaaggcccaccagtcagtggtaggtgtgggcatcaatctttttgccagcggtatcacggccgtaatgttaaaggcaatctggcagacagaaggaatgtcggaatccgttccctccatttccaatctgaccatacccggcctttccggtattccggttatcggggccttgtttaaagaccagtccccctatctctacgctatgttccttattgtggctgcggtgtggattgtgttttataagaccaagttcggactcaggtaccgggccatcggagaccagccctacgcggttcagactgccggtgtgcaggtgaaccgttaccgttacattgccatgatagccgcaggaagcattgcagggctggcaggttcctacctgtccatttcccagaacaacctgtttgtggcggatatgacggcaggcaggggctttatgggactggcagccaacattttcggcggatggcagcccctgggctccatgggagccggaatgatatttgcggtggcccaggcagccagattctatctgacggatgcgtctgtcccgtcccagtttgtccagatgctgccctatggggtgacgctgctggtactgctgtttgtgggaaagagggtgaaaggtccggaggcacttggcaaattggtggattagttctatactaatctatagtgagctatagtgaggactgcccgccgggcgcgcgaaaggagcaagcagacctgtgaaggacaatgtgataaatgaaaagaatgtaaagataccgttgtatgtgactgcctatgagaccatcagccaatggctgaaagagggaaagtataaggctggggataagctgcctggagagaacattctggcagaacagcttgcagtcagcagaggcacattgcggcaggccatgctgcttcttcaggaggatggtttaatcataaaccatcagggaaagggcaacattgtgctttccaaccaggatatgagcaaaagcgggctggagaaggtgggaaatcccattgtggatttctgcagcaggcccattgataaggtggtgaccgccatagggttccagccggccacccaaaagcaccagcaggtgcttaagctgcggccctccagcgtggtggcggtcattgacataacctattactgcggtgatacgccggccggctttgccatggtgtatatgcctcatgaggtacttgacaacagcgatgtggacctggagaatccggataccgtttaccagtattataccgggctgctgtccgaaggcggcctgtacagcgatgccaaaatccggctgggacaggccagggagcgtctggcaaatatactgaacatgcaggagggagacccaatcctgattctggaggaggtgctctattccgagtatgatacgcctgtcctgtcccaaaagctgttctttggttccgagcagcatgagctgagcatacgaagaaagaatgacaggaatataataaagaaatcggagtaatcaaatatgaaaacattccataatgaagcgggaccaggacagattggcaaggctgtcctgatgccgggtgaccctttgcgcgcaaaatacattgcagagacctatctgaccgacgtattctgctacaaccgggtaaggggcatgaatggatatacaggatattataagggtaagaaactatcggtccagggcagcggcatgggcattccctctatgggtatctatgcgtacgagctctatcacaattatgatgtggacacaatcatccgggtggggaccgcgggcgcgattcaccgcaatgtggaggtgggggatttggtgctggccatgggctgctgcaccaactctaactttccctcccagtaccatttgccgggaacctttgcacccatagcggatttcggccttctggaggccgctgcggcccatgccagaaacagccatacctccttccgggcagggaatgtatacagttcggatgtgttctatgaggactgtcagggagaaaaaggacagtgggaaaaaatgggggttctggtccaggaaatggagacattgtccctctactgcacagcggcaagagcaggcaggagagcgctcagcatggtgactgtggggagcagcatccaccatgacagggctcttaccaacgaggaacgggagcagagcctggacagcatgatccggtgcgccctggaactggcggctgaggcagcagaggcggcagaggaagccgtgacagcagacaggatattggcgccgggatataccgcatgacataatgaaagaggagaggcagatgaaggttttactggatgtggatacaggtgtggatgattccatcgccctattatacgcgctttttaatcctgagatagagatagtgggcatatctgcggtgtgcggcaatgtagaggcatggctggcagcggagaataccatgaagatactggacctggcaggagcgcccgatataccggtggcagtgggggcggagaagccatcctgccgggaatgggacggccgggttgcctttatacacggcaaaaacgggctgggcaatgtggaattacctcccagccgccgcagtacaagagacgtggacgtgagccggttccacatggatctggctgagcagtatgggggagagcttatggtcatcacccttggccctctgaccaatatagcccgcaccattagggaatatcccggttttgtgcataaggtaaagggccttgtgatgatgggcggtaccctgaccatgcgcggaaatgtatctcctgtggccgaggccaatgtggcctgcgatccccaggcctgcgaccaggtgtttacctccggtatggatatcacggtagtgggactggatgtcaccatgaggacaaggcttaaaatggagcatctggactggctgtcgggctgctgcaagccggcctgccgtccggcagtggattatatgaggcaggccatggtccattatctcaggggaaaccagacccagaactactgcatgggtgactgtcctctccatgatcccctggctgttatgtgcgccgtgacgcccagcctggtccgtaccgagagcaggaaggccagggtggagtgcggcggcacctattgcaggggaatgattgtgacggatctgagggagcacccgttccaggcggaatacgtgcgttttgcggtggaggtggacagtgagagggctgtcagggagctcatgtcggtattttgggaataatggaataaaaaatattgtgataagctgcggctgtatccatgtatatcgcatacatggatgcagccgcattatgtttttgcgacagaggacggagcgtatttcttttatattaacattatatttatacaaagcagccagctcccatatggaatctttatcaccatctgtggtaccatacccctatcttgaaaagaggaggaatcatccatggcattactgttaggtatcataggaataaccgcggttattatactggcttacctggtaatcattttattgagaggtgataaacaatgatgaatgtggcgttgcagatgataatttactgtgtcatactggtagtgttagcaataccccttgggtcctatatgggaaaggtgatgaacggggagcgggtgtttttgtcaaggcttctgctgcctgtggaaaacctgatttacagggtcctgaggattgataaagaggaggagatgggctggaagaaatattccgtgtgcacagccgtattcagcgtgatgagcctggcggtgctctgggccattctgtgctttcaaaacctgctcccccttaatccccagggaatgggcggaatgagctggcatctgggctttaatacggcctccagcttcaccaccaacacaaactggcaggcctattcaggagagtccagtctgagctatttcagccagatgatcgggctgaatttccagaatttcgtgtctgccgctgtgggaattgtagtgttgttcgcattgatccgcggattcgtccgcgtgaaggagaggggactgggaaacttctacaccgacatgacaaggacagtcctttacatactgattccgctgtcagtggtggtatctcttgccattgcctcccagggtgttccgcagacctttaagcagtacgatgaggtacagctggtggaaccggtggtggtggaacaggaggacggcaccgccgcagaggtcacaaagggagtcgttcctctgggaccggctgccagccagattgccattaagcagctgggaaccaacggcggcggtttctggggcaacaactcggcgcacccctttgagaaccccactccgttatccaacttatttgaaatgatttccctgcttctcataccggcgggcctgtgctttacctttggcaggaatgtgaaggacaagagacagggcgtggcggtgttcctggccatgttcatcatgctggcggcagcgctggccattgtgggctgcagtgaacaggccggcaccccccagatagcccaggacggcgcggtctatatggggactgagggacaggcaggcggtaatatggaaggtaaggaaaccagatttggcatagccacatccgggacatgggctgtatttaccacggctgcttccaacggctcggtcaattccatgcacgacagctacacgccgtttggcggacttgttcctatgctgctgatgcagctgggagaggtggtattcggcggtacgggctgcgggctctacggtatgctggggtttgccatccttacagtgtttatagcggggctgatggtggggcgtacgccggagtacctgtgcaaaaagatagaaccctttgagatgaagatggctgtgctggtctgccttgcgccccctgtggctatcctggtgggcagcggtatcgccacgctgcttccgtccacccatgacagcctgaataatccgggagcccatggattgtcagaggtcctttacgcgtattcatccgcaggcggcaacaatggttccgcatttgcaggatttaacgcaaatacccccttcctgaatgtgagcatcggactgattatgctgtttgtaaggttcctgcccatgtttgccaccctggccattgcaggcagtctggcggcaaagaaaaaggtagcggtcagctccggcacccttcccacccataatgccatgtttatcttccttttgattttcgtggtactgctggtaggggccctcagctttttcccggccctgtcacttggcccggtggctgagtttttccagatgatagcatagggaggtcaatgagacatgaatgaacaaaaaaagagtatattttccaatcatgagattatgtgcagggcccttaaggattcctttattaaactgaatccaaggacccagataaagaatccggtcatgtttatggtttttgtatccgccatcctgacctttgtgatgttcctgttttctctggcaggtatcagggacgctgcgccgggttatatactggccatatccgtcatcctctggtttacggttttattcggtaactttgcggaagccatagcagagggaaggggaaaggcccaggcagatgccctgcgtgcaggcagaaaggataccatggcatccaggattccttcggctgaccgcaaaagcgaggccgtcagggtgaaatccacggaactgaaaaagggggaccttgtctatattaaggcaggggaacagataccggcagacggcgacgtggtggagggcgccgcgtcggtggatgagagcgccattaccggcgagtcagctcctgtaatccgggaaagcggcggtgacagaagtgccgtcacaggaggcaccacggttatatccgactggatcgtggtgcgggtcagcagcaatccgggcgagggcttcatggataaaatgattgcaatggtggaaggagcttcccgcaaaaagacccccaatgagctggcactgcagatttttctggtggcattgtccattatctttgtgcttgttaccatgtccctgtactcctattccgtgttctcctccgtggaggcaggagcagccaatcccacatccatcaccaatctggtagcgcttttaatctgtctggcgcccactaccattggcgctctgctgtctgccatcggtatcgcgggaatgagccgcctgaaccaggccaatgtgctggccatgagcggcagggccattgaggcggccggagacgtagatacccttttgctggataagacgggtaccataacacttggaaaccgccaggcagacgcctttattccggtggacggccacaaggaaatggagctggcagatgcggcccagctgtcatccctggcagacgaaactcctgaggggcgcagcattgtggttctggcaaaggagcgcttcggaatccgcgcaaggaatatggaggagcttcaggcctccttcgtgcccttcactgccaagaccaggatgagcggcattgactacaatggaaatgagatcagaaagggcgcggctgacgccattaaagcctatgtggaccggcatggaggcgcgttcagcagggaatgcgaggacatcgtaaagcggattgcaaaccagggaggaacacctcttgtggtggcaaagaacggacgcgttatgggcgtggtggagcttaaggatattgtgaagcagggtgtgaaggaaaagtttgcggatttaaggaaaatgggaatcagaaccattatgattaccggcgataatccgctgaccgctgcctccattgcggctgaggccggtgtggacgattttctggcagaggcaaccccggaggccaaattagacatgatacgggattaccaggccaggggccatctggtagccatgaccggcgacggtaccaatgatgccccggccctggcccaggcagatgtggcggtggccatgaatacaggcacacaggcagccaaggaagccggaaacatggtggacctggattcatcccccaccaagttgattgagatagtgaagataggcaagcagcttctcatgacaaggggatccctgaccaccttcagcattgccaatgacgttgccaagtattttgctatcatcccggcactgtttatgggattgtatccgggactgtcagccctcaatataatggggcttcacagtgcaaacagcgccgtgttctcggctatcatatataacgccctgattatcgtggccctgattcccctggctcttaagggggtcaggtacagggaagtctctgcggcccggatgctgtccgggaatctcctggtctatggcctggggggaatcatcattccgttcatagcaatcaaggcaatcgacgtgctgatcacggccgcagggctggtggtgtgatgtgtgaaggaagcagatgcagacagcagaatcagtcaaagttaggagaatgttcatgaaaacagtaaaatcagtattgccaaaaatggcaggttttttcctggtcatgttaatcataacaagcgtcatttacccggcggtcatcacggctgcggccaatgtggcatttggccatgaggccaacggatcggtgattgtgggcaaggacggcactaaatatggaagcgcccttctggcccaggagtttaccggaaaccagtatctttggggcagagtcatgaatgtggatacagggacatttacagacgaaaacggagagcctctggcatatgcaggtgcctccaacaagacaccggcaggcagtgagcttgaagccatgatagctgagcgggtggagaaaatcagggcagcccatccggaaaagggagaggagcccattcctgtggaccttgtaacctgctcaggcagcggactggacccggaaatttctcccgcggcagccggctaccaggcagagcggattgccagggaacggaatatggcggtggaggatgtggaggccgtcatcagcaggtataccacgggcaggttcctgggaatgttcggagaacccagggtgaatgtgctgaaagtgaatctggctctggatggactgatttaaacatgatttgcttatggtgtatagagttgccgtgcattgcggcagctctacagctgttttagagaacggagcaatagaaaggagaaatggcttatggacgggcagcgggatgagagaccggaccctgagctgcttttaaagcagaatttccccagggaaagtgacaagggaaggggacggcttaaaatattcttcggatacgcggccggagtaggcaagacatacgccatgctggaggctgcccggcaggaaaaggcagcgggacgggatgtggtggccggatacatagagccccatgacaggccggatacaatggagctgctggccggaatggagctgctgaccccaatggcggtaacgtataagggaatcatcctgaaggaatttgacctggatgcggcccttatgagaaggccggatttgattctggtggatgagctggcccataccaatgcccagggctgccgtcacaaaaagcgctaccaggatgtgattgagctgctggacgccggaatcaacgtgtacaccacggtcaatgtgcagcacctggagagccttcatgacatcgtggcatccattacccatgtgcgggtatatgaacgaatcccggacgatatttttgatgatgccggacaggtggagctggtggacattgcgccggaggaactgagacagcgcctggaggacgggaagatttaccacaaagaccaggcggacaaggcgtctgtccgcttttttacagtggaaaacctgtctgccctgcgtgaaatagccttaaggcggacagcggaccgggtcaaccgggaggtggtcagggagcgggatgcggcgggcaaggattattacaccggtgagcacgtgctggtctgcctgtccccctcccccaccaatgcaagggtaatcaggaccgcggccaggatggcaggggcgtttcacgcggattttacagcggttctggtggaaacagcggatatgaaaagggaacatgcaaaaatcagcaggagcatggaggccaatattaatctggccaagcagttcagggccaatgtgattaccctttacggggatgatattgtacagcagattgcgggctatgccagaaggaacggcatttccaagattgtcataggcaggacggtgagaaaacgcagcttcctccacttgaagtccaccataattgaccgtctcatcaaggccgtacccaacatggatgtatacgtgataccggatgccgcggccagggagaacggaaagattaaaaagccggaaaacggacggaaatacagcatggatatcttaaagacaggccttatcatggcgggatgtacctttctttccatggtactggaccactacaagctgggcatcatcaatgtggccatgatttacatgatggggaccatgctggcagcttatgtcaccagggccggtacctatggttttctggcttccgtggcatcggtgctgctgttcaacttctttttcacgccgccgcgctacacctttcaggcagacggcagtatttatccttttacctttgcggccatgcttgtctgtgccctgattaccagctccatggcggccaggcttaagcgggaagcagagaaaagtgaggctgaatcggggtatatgcagattctgtttggtatcaaccggaatctgagaaagggaaccacccgtgaagagatactggatatatgcggaaggctggtacagagcttattaaaacgcaacattgttatatacgatatgctggacgggaaaatgaaccggatgaagatatatccggcctcggaaagagaggacgcgtcctctcttacctccctgtttaagaacccggacgagatggctgtggcggcctgggtctataaaaaccatcataaggccggagccaccacagatacactgccgggagccagggccagatatacgccggtatataaggatgatacggtctatgcggtcattggtgtggagatgaaagggggagacatcattaagcccaatgacaagaatgtcttaaatatcattgccgaggagacttcctaccggttaaaggatatgagcgggccgcgtatttgcagataatttatacaataccgtgaaccatggatggaatctttacgctatctggtagtatcctttaagcaggaagagagggaattgccatgacagctaaaatgatatttaagttaaagagtcccgtgggacagaagatagataatttgtgtgaacgctttccgctgatttccagcgtaattgtgcagctggccgcggccatatttatggtaggggtggtgacctctgtgggactgataggggggaccgtcatatggctgttttataaggcattcggagtcatgtaggcatggcggagggaacggtttgatttgacatggccggtattcatggtatagtatttagtataaagagggggataaagatatctttatagaatctttatgcccccttaatacattttctctagtttctttatatggttctcttttacaatagaattgggaacatataaatgaaaggaggagatcgtatgttattccataaaaataaatgtatcgtaatcgcgggctgcggaccgttgggggctgcgctggcaaagtcattatataagaaaggccataaagttgtggtgctggataaggacagggaaagcttccgttacctgccggaggagttcagggggtatgagatggaaggggacccaacggatccccaggtcttaaaggcagccgggattgaggatgcaggtctgtttatcgcatccacccaggatgacaataccaatctcctgctggctcagattgccagccgtattttccatgtgagccaggtctatgcccgtctggatgacaccggaaggcaccagctggttacggatctgcctgttaaacccatcagtctctatgatttgtcagcggatgattatggacgtctggcagagacagtgagcagggaggtggctgtgtgagcatgaagatagcggtggcgctggggggagaatatgcggattttctcatcggccttctgatggagaaaaaatataaggtaactgtgatcgatccggacaaagcattctgtgagcatctctgcgcctcctacaatgtgaacgcggttctgggagatccctgcaggcagtttattctggaggaagcaggtatccgcaattatgatgttatcctggccctgggccgggaggacacggataattttgagatatgccagatgggcaggaaggttctgggaatcaaacggtccgtctgcctggtgcacaaccccaggaacgcggctctgtttgaggagctgggagtggacagggcagtgaacctgcccatgatccttgcccaggccattttagggcaaaagcaggaagagggagagtaaaaggagttatgttatatagttgggactgggttctggactttgtaaaggcatgtgcaaaaatggctgtcatatgggtgatttccaccatactggccattgtgctggacagctgcgggatcagggcggagaacctgcttttagtatatctgctgggggtgctcatcagcatactggctaccagcagcctggcctgggccctgtgcgcggccattgtctttacctttacgttcaactatctctttacggagccaaagcttacgttccatatggatgatgtgaactacgtggtatcctccattgtctttgtggcggctgcctctattgtggccaccctggtggtgaagctgcagaagcagatgcagattgccaacaaaaagagagagattacggccaggatgaatgagataggaagcggattcctgaatctgtccggttaccagcagattaaggagtacagcgaagaaagcctgtccaatctgaccggaaagccggtgagcgtcctgttgaaggaggacgagaaaaaggaatttcccaattacatggcggaatggtgctacaggcagtccattccctgcggtcatggagaatgccagtttccggatgacaatgggctgtacgtgcctatccgcaaccgggaaaagacctacggtgtgattatatttgactgtgagggctggaccttaagcgaagaggaaaagatatatgtggacacggtcatttcccagctgaccctggttattgagagggagctgctcagccgggagaaggaaaataccaggattcaggtagagcgggaacggttaaagagcacccttttaaggagcatatcccacgacctgcgcacgcctcttacaggaattaccggcagtgcgggatttcttctggacaatctgggcatcatggatgaagctacgattaagagcatgctgaaggatatatgctcggattccgaatggctcagcaccatggtggaaaacctgctgaacctgacgcgaatccaggagggccgtctggatatcaataaaaagaaggaagtggtggacgaccttgtggcctctgctgtccggctggtttccaaccgggtggggaaccatacacttaagatggagacgccggaggacatacttctggtatctgtggacgggagactgttcatccaggttctggtcaatcttctggacaatgcgttccgccattccgggaccggcaccacggtgaccctcagggtaaaacaggatggaaattgcctgaagtttgtggtttcagataatggaatagggattcccaatgataagatagataagattttcgataatttctttaccactgcttatgagaacggggataagcagaggggcgtgggcctggggcttaccatatgcaaggccatggtggaggcccagggcggcaccatcagggccttcaacagcccccaggggggagctgtatttgaagtatcaatgccaatggaggacaggaaggatgaatgagacaacgatccttgtcattgaggatgacaagagcatacagaattttatgaagatatccctgaagacaaggggttacgcttatatattggctgataacggactgtccggcatatccctcttttacgcggatcatccggacctgattctgctggatttgggactgccggatatcgacggcatggaggtgctgcgccagatccgccagaagtccgatgtgcccattatcgtggtttccgccaggggacaggagcgggagaaaataagcgccctggaccagggagcggacgactacgtgactaagcccttcagcgccgaggagctgctggccagaatccgcgtggggctgcgccataagagctccacggtgaaccaccaggagcaggagttctgtctggactatttccggctggattttgaaaagcgtaaactgtatgtccatgaccaggaagtacatctgactcccctggaatataagatgatggtccttctggtgaataacagcggcaaggtgctgacccatcattatatccagcaggaggtgtggggatatgacaccacggatgattaccagtccctgcgggtgttcatggcaaatatacggagaaagattgaggataacacggccaatcccaggttcatactcacagaggtgggcgtggggtacaggtttgtggatgaatagaaggaacccaagggtgcagcagttcagatacgttccaggatataccgggaagcaggcgtcaaaagaggcaggcggaccggtatttttttgaatattttttctggaagtaaaatagtcttgaaaaaatcccctaaactgattaaactgataccatgagaatattatatgaaaaaacgctggacggggtatgcctccagcgttgttatggtttggacaaaattctggagataccggggacggttgatggcatgcctgtgaccgagtttgcaggctaccttttttcggatacggtgcgcaggcgggaaccgccgccctgtgaatatctgggggagccggagctttgcggcagccgggtggaggaaatcatactgcctgatacaatcaggaaggtgggagcctatggtttctataactgcagcggcctgaagcggctctcatgcagcagcgccgtggaggactggggagccggggtatttaccggctgtacaggtctcaggtgcctggatatccgcgttgcggagggcaggaagtcctgttttaaggatatcctgtcggagcttcaccagaccctgtccgtaaattacaggtccggttcggggacgctcctggcaaagcttatatttccggaattttttgaggagtccgtggagaacacaccggcccgcatcatcatgagggaaatgcacggctgcggccatatgtaccggtactgttttgacggaggggatttccgttttgatgaatatgacaggctgtttccacatgtaaaggtccaggaaaagccggagctggcagtgcgtctggccctgtaccgcctgtactggccctgcggtttaagggaaagtgcagaggatgagtactgggattatgtaaggactcatgccggtgaaggcgcaaaggggctgatagagcggggagagcgggatatcctgggctttatggcccggtcggcccggctgggagaggatgagattaagaagatgatagaagccgctgccgggtccggtgatgcccaatcctccgcgcttttgttggatgtgaagcacagacgcctcagcccggcaggaagaaacggacagggggaggaagcgaagcgctgcgggcggaagcggacatttgaattatagatggcggaaccgtcataacttaagtcagtaaagcatcagattatataaataaaatataccaggaggaaaataatggctaagaagacaaaaggacaggaattacaggagcagcttacatgggcgttccctcatattggaaaggataaaccggagcaggcggaaaaggcgtttaaatactgcgagggctataaggaatttctggatgtgggaaagaccgagcgggagtgtgtgaaggaagcggtaaagatgcttaaaaaggcaggctataagccctttgactcaggggaatcctatgagccgggagataaggtgtattatgtgaaccggggcaaatcgctgattgccaccacctttggaaagaagcccctggaccagggcctgagaatcaacggagcccatattgattcccccaggctggacttaaagcccaatcccctgtacgagaaggaggatatagcatttttcaaaacccattattacggcggaatccgcaaataccagtgggggaccattcccctggccatgcacggcgtggtggtgaagaaaaacggagagacggtggaggtttccattggagaggatgagaaggagccggtattctgcgtgacggacctgcttccccacctggctgccaggcagaacgagcgtcccttaaaggacgggttaaagggcgaggagctgaatattgtggttggatccctccccttccaggatgaggaggtaaaagagcctgtaaagctgatggccttaagtcttttaaatgaaaagtacggaattacggaaaaagactttttccgcgctgaaattgaaatggtacccgctgtaaaggccagggacgttggctttgacaccagcatgataggcgcttacggacaggatgacagggtttgcgcttatacggctctgacggctgagatagacgcaaagaagcctgcccacacaaccgtgaccattctggctgacaaggaagagatcggatccaccggcaacacgggtctgaattcggattttgtgcttcattacatagaagatttggcggaacaggcaggtgtcagccccagggaagtattgagaaaatccctgtgcctttcttcggatgtgaatgctgcgttcgaccccaacttcccggatgtgtacgagggacgcaacacaagctatatcaacaaaggctgtgtgctgacaaagtatacgggggccaggggaaagtccggctccaacgacgccagcgccgagaccatggcaaaggtcattgccattatggaggaggaaggcgtgtattggcaggccggtgagctgggagccgtggatgtgggcggcggcggtaccattgcccagtttgtggcgcacatggatgtggatactgtggatttgggcgtgcccatcctgtccatgcattctccttttgagctggcttccaagctggatgtctatcatacgtataaggcgtttaaggcattctacaaatagtctgcggaccgttgcttaaattttcatgaaattggtggaaagtcttttttttcacggacaggtatgatataactatgtacagcgcacgctatttggggatgaatggaaaaataaggataattcaaggtcctgcgtgtgaaatcaggatagaaaagggatatgtaaaatgaaaaaattagcactcatatgtttatgcggactggttgcagcttccatcatgacaggctgcggggccagccagacggaaggaaaggagaatctgggcacggtagagctgtcagagtataagggcgtaaaggtaaatgtaccggctgtcatggtaacagatgccgaggtggagtcaaaaatcaaccaggtactcagccagaatcctaaaattgaggaagtggacaggcctgccgcagaaggcgatattgtcaacattgattatgtgggaaaacaggacggtgtggaatttgcaggcggcaccggcgaaggacaggacctgaccctgggatccggcaggatgatcgatggatttgaggacggactgattggcacaaagaagggcgataagaaggaactgaacctgacgttccctgaggactacagcgagaaagccctggcaggacaggccgttgtatttgaggtgactgtgaatgctgtaaaggaaaagcagtctgctgtactggatgacgcgtttgtacagagtgtttctgattttaagacagtggatgagtacagggccagtgttaaggaagaccttttaaagcagaagcagcagtctgccgaccttcagatccagcagtatgtacttaagaatgtggttgagaactccaagttcaagctgaacaagaacaccctttccagacgttataatgaccgcatcaagcagtatgaagagcaggctaagatgtacggcaccaacctgtccggcatggctaaggccaatggcatggatgtgcccggattacaggaagctgtttacgcgtcagtgaaggatgatgtgaagaaccagctggttatccttaaggttgccgagctggagggcataaccctggaggatgctgaccgccaggcatttgcggagatgaacggccagactcttgaggccgcagtggaatatttcggccaggagaccctggatgaaatggccttgaaccagaaggttatgaagttcatggcggacaacgcagtcaacgaggcccaggacgcagatgctccggctgaggagacaacagccgcaggggaaactgctgccgcagaggaaacaacagaagcagagacaacagccgcacagtaaagaaggattgccaaaagaagaaggaggactcgtacatgcagattttaaaggacaggatacgcaaggacggcaagataaaagccggaaacgttctgaaggtggacagcttcttgaaccatcagatggacattaagctttttggagagattggaaaagaatttaagcgcaggtttgccgatgtggaggtcaccaagattcttaccattgaggcctccggaatcggaattgcatgtattgtggcccagtattttgatgtgccggttgtatttgccaaaaagacacagaccaagaatattgcaggcgaggtttataccaccaaggtggagtcctacacccatggcagggtttatgatattatcgtgtcaagagagtttctgggagccggcgacaaggtgctgctcattgatgacttcctggccaatggaaaggctctggagggcctggctgccctggtacgggattccggcgctgaactggtaggcgcgggcattgtcatcgagaagggatttcaggtaggcggagacctgctgcgttcagagggaatcagactggagtcactggcaatcgtggagagcatggacgaggaagcacagaccattgtgttcagagatgatgaataatagaacgaaagctttattttatgatattgacggaaccctcctgtctgaaaagacgggccgggttcctgaaagtgcggtacaggcactgaaggaggcgcgcgcaaaaggacatctggtgttcatcaatacgggccgcgtatatgcccatctgggcgaaattaagaagctggtggaagcagacggatatctgtgcggctgcgggacctatatccttgcagagggcagggtcatgtacagctaccacattcctcatgagagagggctggaaatcaagagccatattgatgcgtgcggactggacggagcccttgaggcgtcggacggaatccacatccacaggtcacagtcgcctattccaagggtggagcagatgaaggcgtcgctcaggcgttcagactgtgtgtctgaatatgactgggaggacgactgctatgactatgataagttttatcttatctcgggtgaaaacagcaggcccaaggagcttttcggacggctcagggacatggaaatcatagaccgcggaaacggggaatatgaatgtgtgcccagaggacattccaaggcaacggccattgatttggtattgaagcattacggcatctctctggatgatgcctatgtgttcggcgacagcggcaatgaccttgccatgttccgctacgcaagcaactgtatcctgatgggaaagcatgacgaagttctggagccctacgccacgtttgagacaaaggatgtggaggaggacggaatcgcgtatgccatgaaggaactgggcataatataacacagcgatagttaatacagaaagagcagactgcatgaagagaaagacctggatgataagtgccctgatgtatgccatggtatttatggcatgcttcggggtactgcacgttttaaagactttaatggagccttcagggcctgtatcggttgagagcagggaaagcggggggcctgagggcacccgggaagcaaagacaggggaggaatgggaggaaccggccgggccggcattggctacggattcccaggcacaggaaccccaggatgaagtaatcaggcaggagggctataaggagtggaagaagaaatttcccggtatgtggactcctccgcaagcccctgaggaaccctacataccgcccaggctgatcctggcaacagaccttcactatcaaagcgctttagccggagacggcggggaagctttccggctgtttgtggaacggagtgacggaaaggtgatccagtatctgcctgagcttttggaagcatttctggacgaggtcatagaggaacggccctctgccctggttctcagcggcgatattactatgaacggggagcggctgaaccatgaggagctggcggcaaggcttaaaagggtccaggacgcaggcatacaggtcctggtgataccgggaaaccatgatatcaataaccatgacgcttcggtgtactacggcgtccggaaagagccggctccctatattgacggacctgaattccatgagatttaccatgaatacggttatgaccaggcactgagccgggacgacagctcactgagctatgtctacgccctggatgacagaaactggcttctgatgctggactcctgccaatatgagccggataacaaggtggagggaagactgaaagacagcaccatgacctgggccgatgaacagctggccagggcaaaggaggagggagtgtttgtgatacccattgcccaccataatctgctggcccagagcaggatgtataccacccagtgcgccatggacaacaacaaagaggtgatttcccttcttcagaaatatgagctcccgctttttttcagcggacacctgcatgtgcagcgtatccgcaagcataagagcgagcccggagttccggaaggaaattacggcatacaggaaatcgtgacagatgccctcagcataccgccctgccagtatggagaggtgttatgggaggaggacggaagtatttcctatgccaccagggctgtggatgtatctgcctgggcacagaaaaacggaagcaccaatccggacctgctggattttgaagactggtcctaccggtacatacaaaagctgatcagcgatcagatacggggcgttgtgaagaacctgggggcagacgtggaacattccatggcagcaacctatgcaggggtatacattgattactatgcaggacgggaaattgacgtcaaaggtataaagagcaccaagggataccggttctgggagagaaacatgccggatagctatctgatccgggagctggacgccatgattgctgattcggacagggataataactatttcctgcttccggaggaggaaggatggataaccggagattaggcaggcagcatggaccatggaccggagatgagacattaaatcaactggcggtaaaacgtccgggatgttacaataggcatataccataatatgtaaggagggcctgctgtgaaaaacgaaatgtggaaaaggagtctaaggcgcggggcagcactggtcctggcattggtgatgtcactgacgatcacctcctgcagcgcgtctcagggaagcctgactgcccgggaaagggcccgggaaccggaatatgtcagcaaagccggcggaaaggtacatgaagccgttccctattcccggaggccatacgagcactatgacccggctgccatggaacaggccatggctgattttgaacaggcctgtgcttcgcaaggccgggaagaggaagtgctgaggctatacgatgccattgtggatgagtatgaccgtctggctaccctgacttatatggcccagctgaactatgacagggacgtgtcggatgagcaggctgccgcagaacaggcatataccacggacatctactccgagatgggggataaggctgcagcctgccttaagaaggggatgaactcatcctataaagaactcctgacagataagatggggattgaatatgcgccttacatcgaatattacagggaaaattccggggaactgaccgaactgaaccggagggagcaggagcttctcagggagtatgacaaactggctgccggcgattttacggtggagctggagggcggacagtggagctacagccggctggaacgggaaccggaccttgacgacgggcagtacgctgagattgaggatgcacttgtcagggaaaagaaccgggttctgggcagcaagttccgggaactggtccaggtgcgccgccggacagcagagcttaaaggctatgacaactatgcccgttattcctttgaggctgtttacggaagggactatacccttcaggacgcagaggggctttgctcggatgtaaagacccgtattgttccccttaataatgacatctggtatatggatgtggcccaggaatcctatgactccctggaccttgtggaagagagttccgcccaggacatactggccggtgttggaagggctgtcggatcggtgaatcctgagctgggtgagattttccggtatatgcaggacaacgagctgtatgatatccagtccggggaagacggacaggacaggatggataataattataccgtagggcttccaagctatggcgacgcatttattttcatcaacagaaaccatacatttacggattaccagtccctgattcatgaattcgggcatttcagctcctattattataattcggtgcctgaactgttccagggttacagtgtggatgtgtgcgaggtccagtcacaggggttggagatgctggtcaaccagtatgcgggggatatgtttggcgaaggggcagaggcctttgagtttgagactgttacggatatgctgtatgtgatcattatgtcctgcatgctgcaggaatttgaggaagctgtttacatggatccggacatgagtctggaggacatgaaccgcacattcaaagagatacaggattcctatcatggatggtattttgatgtctacgacgagggcgtgtgctatgactgggtggatgtgtcgcatctgttttacagccccctgtactatatgggatatggaacctcggctctgtcggcccttgatctctggaccatgtccaggagggactgggacggcgctgtggatacgtatatgggacttttgaatgaaggtctggatgcgccctaccgcgacaccatgtaccgctgcgggctgagggatgtgtttgacagcagcgagctggaagccctggcaggggatgtgcgcaggatccagggactggatcaggatggtgagggagctgaggacccgtcacaggagaacccatcacaggatatcccgtcacaggaggacccggaccaggcaggaacgaactctgagggaagctctggcagcggattaagggctgcgggctttctggtgctggcaggcatctgcgtcatccttgtatttcaggttatgattttatgtaccgggtttgtaattatctggctgcttgtcaggaaaaagagagaagagtaatcatggcaatacagatacagagtccgggaggcagatgcttcccggactctgacattttatatatatagatatttctaccagatatggggtctgtcctccggcctgcggtacatcccgtcgccttccctgaccccaaaggcagtataaaagtcatcggtggcagacagcacggcatttaccctggtgatgccaggggaatgtgtgtcattggtcatgatgtaggaaaggtattcatccctgtattttgtggcccatatgacaccataggcatggtacagctccttcaggtcatatcccttttccctggctatttctgttatgcaggaaacacctcccaggtcagcgatattctccgtaacgctcagcgtaccgtttacctggatgccgtttacttccatggtatcatagtagtcaatgaccttttgggccaattccctgaaatgctgtttatcctgggcagtccaccaatccctcaggtttcccttttcatcatactgggatccgcttgtgtcaaacgcatgggtgatttcgtggccgataacagctccgatgccacccaggttggccacaggctcagcctgcgggtcataaaacggggcctgaaggattccggccggaaacacgatctcgttgtttccggggttataataggcattgactgtctggggcgtcatgctccattcattccggtccaccgggtcgtgtctggtcttaaaggagtaatcctgggatgccttaaggatttccatgatattgtcgatgtagacaccgccctggtccggggatttcagtaccaggttcaatttgtcctggggccattcatcgggataaccaaccttgacagtaatggctttcagctttttccttgcctcctgacgggtggattctgtcatccattccatataggcaaggcggttgtcgtatacatctatgatttgccggatgatggaagccacatcctgtttggcgtcctcgttaaaataggtttcacagaatacacggccgcactggaaaccaagtttttcctggactgtttcagatacggtccgctcaaaatcctttttcttttctatacctcctgctgctgtctgatactcctgggcagcgtccagggaagcggtgtctgtcatcatggacagatctgaatagagacatgtcttgacatattctttcaggaggggaaggttttcttccttcagatagcttccaagcttcctgcaggcatccggctgggagacaactgtcttttcaccttcctgtatgccgaaaatgctgtttagaaggcggaagggcagagccgaggaatagaggtttgccgcctcgccggccgtgcagacattgtatgttttttccgggtcatagacctcctctatcttaagggtggaggacgccagatctttcatcatatcagttacccgggcaacggtcacccctgcttcctccgggctcaggccgttattttcgtgaagctttgtgaggtattttttgtattcctccacccgcttctggttggatgcatcttcggagaaccagacttccctcctgagaccggaatccggctgtgagagatagaggactttaacggaggaatccccgctgtccccttcataataccagcccataaggctgaacagtccggtatccctctggaactggaggcatgcctttaaaagttcagagacagaacctgctgaatctacttcctttaaaaatgctccggctgtgcggccgtatccttccctgtccctggtctcccggtccaggccggtcagattcagggcgcgtatgttatacaggtcgcttcccgcttcctgctctgcctgtcctgcttcagatgaagcctggcgaatcaggtcatttaccttggaatagttgtcctcccgcgccttcctgaaccagctcatatcggcctgttcagccggaatttcccagccattaagtgtgtcatggtttaccgcatcataaaaatcatccacataggctgccgggccttggacggtttggcctccatggggccgctccgggctttcaggctggttaactgcaggtccggccgtgatttcagcctggctttccggttctgtttctgtccggcctgtaccggagcatccggtggcagtaatggcggctgccagtaccgcggctgtcagggccagggctttccgtggtgagactgcccgggctgcggtgatttgctccgccgggcttttactttttttcattcttctttattcctccttgattgcttgattacagagcgtatttgaaaactgcttaagtcctgccctgtataaattacagcgggcagagtaccctgcatctgtcacaatcattaatataccctggtatatgcaatgatataaaagttccgtgttgatgaaagcatgatggaatgccgggataattacgggattgacattttgccgggttacgattatagtataatacagaatacgaaggaagcaaatccttcatgagcaaaggagtggttgttatgttggcaggtcgtaatgataaagcagaggtgaaaacagtataacgaaacagtaggacaggaagcggcatactatgtttttttgatgcgcacggcttgttgtcgtgtttttttgtaccctttttttagggaaaatgacagaagtatgggctgagctgtcggcttatgaaggagaatttgatttggagaaagaaaattgcatattaatcagcagcggtaagaattggatggaacaggcggcaaaggaccagcttttggcagtgagcaggcttcctggcgttgtgaaggcagtggggcttccggacctgcatcccgggcggattcctgtgggaaccgctgtcctcagcaggggagtattatatccccatttacttggaaatgatatcggctgcggtatgagcctctttgacacaggggtaaagaaaaagaagtttaaacaggagaaatgggtatcaaggctggaggccgtccgggagctggaggatataccgttttccagcccatatgaggaggagtgcccgatacgggacttgggaaccctgggaggagggaaccattttgcggagttccaatgtgtggagcggatttatgaccaggaggcagccgggagcctggggctttgtgcggaccgtattctccttttggtccactgcggatccaggggatacggccaggagatcctgtcacggttttgggtgccggaggggcttgcggatggttctgaacaggcagaggcatatatggctgagcatgacagagctttaaggtgggcagtgagaaaccggagagcagcggcgcagaagctgcttgcgtggctgggaggcgcctctgagccggagcttctcatggacagctgccataattatctggaacggacaaaggacggccttctgcacagaaagggcagcgtatcagcctctaagggagcagtggtgattccggggtcaaggggaagcctgacctatgtgtgcatcccaagggaggatacggcggtgtcacttaattctctctctcatggcgcgggaagaaaatgggccaggagtatctgcaaaagccgcatagaccaaaaatatgaccgggattctatccggtgcacaggccttaagagccgtgtggtctgccacgataccaacctgctgttcgcagaggcgccagaggcatataaaaatgtggagcaggtcatgggggtattgcaggagtacggactgattgacatagcagccaccctgcgtcctctgatcacgtttaaaggataggagggagcctatgagagtacagattagttccggtcagggaccggcagaatgcgagctggcagtggctatgctctatgaggaactgagaaaggaagccggggatgtgcgcctggtaggctgtacccccggaaagaagcctggatgcatgtcatctgtggtgtttgagacggaccgggatttacgggagctggagggcagtgtgcagtggatttgcaaaagtccctaccgtcccggccacaggaggaagaactggtatgtggatgtcagcatactggaccaggtcccaaggatatcagaggaaagaatggtgcgttttgaaaccttccgcagcggaggaaagggaggacagcatgtgaataaggtggagaccggtgtacgggccatccatattcccacgggtacagccgtggtgtcaacccaggccaggagccagcatatgaataagcagattgccatggaccggctgtgcagcatactggcagaaatgaatgccagaaatcagcaaaaggaaaaaagccttgcgtggatggaacacgcaaggctggagcggggaaatccggtccgtatttatgaaggtatgaagtttgaacggagccggaaacattaattctccggaattcccccggtgagtatacccatttcgtcccggatttgtaccagcccggccagcgcttccccggatagatacgggacatcacggccggtgatatgggccagaataagggtgcgaaacaggatgcccgcctggtgttccagggcttccatgcggtaaagggcctggtaaaggtcctttccccagcttaaagccccatggtttgccagcaggacagcattgtaacggttgatgaaaggtgcaatgctgtcaggtacatcataagttccgggcttggcgtagggggcaatcagtatgttgcctgttaccagtacggcttctgccacaaccggctttttcatctccattcccatgacggaaaagctggtggcagatgccggatgggcgtgaaccaccccggttatgtcagggttttcctgataggcccgaagatgcattttcacttctgaggacggttttcctccatccaggatggctccgtctaaatccatctttacaagtgaatccggctccataaagcccttggaaacgcctgtgggcgtgacaagaatggtggtgtcgctgattttacagctgatatttccgtcattggcagccacatagcctctgtcataaatgcgttttcccacattcaggatggccctgcgcgcctcttgctcagataaatagtttttcatagtagtatctcccggacatgctctaaaatctcagacctaaagttgctaatacgacaatgacaagcgcggtggcaatgggaatgaccacggatgtgacaaacatgtccagatatccctctttgtgggtgatgccgcacagggacaaggtggttacggtagccccgttgtgcggaagtgagtccaggccgccggaagagatggaagcaattctgtgcagtacctgggggccgattcctatgcgggcaccctgttccaggaaggtgggagcaagcgcttctaaggtggctcccagtccgccggaggcagatgcagtcatgccgcacaacagattgacagccaggacctcggtaatcagcgggttggctgatatagagaggatgaaggcctgcacaatggcaaagatggccagccctttgattacggagccaaagcccacaactgcgcaggagttaataaggggcatcagagaattgcccgcagctgacttaaggctgtccttcaatgccttaaagcggggcagaccggttataatcaggtaaatgatggcaacgagcaatgcaatcaggacggaccaattgccggagacagcgctgatttttgtgttgtactgttccagataggccgtgttcaaacggggatatatgaccttggagcataagaggttgaccgctacaatcaggaggaaggcaataacaggatggatgatgccggggagatcggattccgatatctcctttttttcatcgtcatggtccccgtatccttcctcagcctgttttgcctttttggcccggtagttaagccagatcatgccgagggagaacatcatgatggcggctatgatgcccaggaccggagcggcaaatgcatccgtgccaaagtaggtcatgggtatggtgttctgtacctggggagagccaggaagagctgtcatggtaaaggtaaatgccccaagggcaatggagcctggaatcagccttttggggatgtcggccgccctgaaaagagagatggctatgggaagaaccacgaaggttaccacaaagagggaaacgcctccgtatgtaaggactgcgcagcacaggacaactgccagtatagctctttccttgccaagcctgctggcgataagatgggagatggcatccgcatacccgcttacctccattaatttcgcaaagacagccccaaataaatacaaggggaaatagttccttgcgtagtttgcaaaaccggtcatataaacttccgtataatttgccatgagatgggagtcaaagccggcagaaaaaattacagctaccatggcaacgattggtgcgatgattattacgctgtgtcccttaaatgccaggtataccagcaggaacagcgccaggaacaaaccggcaacgcttatggttgtagtcataaatccaccctcctatacaagattcattatagctgcggcaactgccttctgacagctgtccgaattgatattaccccttacttcaataatttttatatgctgttccagaagtggcttgatggtgcttataaaggcctcatccacctccgggtcatacatgggaccgcctttggccgcggcctcgcagaagccttcatccggcaggataagggttacaggggcagtgcttttgttcaggcgcccggccaggacgcgggccagctttactgcctcttccctgtaaattttggtgtgggcgatacttgaattgtgatagaccttctttctgcggtcaatatcatccggtaatccccgcccgtcctcgtcaatgaagaaatcaagcatgtccagggcaccgggcacgacgaccatagggacgtgatgcctaacggctgcctccagccggttgtttgcaccggtacaatacccgcccaggacttcgcaggtaagttcgtggagtgttatatccgcaatcaggtcaaaggcaccttcctcaatcagtttttccatgcagcgcccccctacgccattggcgtggaagcaggttttttcataagtgccgtcaggcaggaggcgcagtgctccctcaacgcctttggatgtaattccaagcattgttgcggcaatctttttacgggaatcaggagtcacctgtctttggtgttggagcatgcccagggcagcgtggcagacattgtgaatcacagtttttgtggtataattaagcccggaaatgtctgcaaccgtgtggacgaccatgatatccttgtctcccacatattgttccatggttcttctgccgcaggccagggaagaggccacaattttaggtacgccaaatggcagggacttcatggccgcggcagccatccgggcattctgtcctcccccgatggaaatgacggcatcaaataatccttccgcatacaaagcaggcatgactgcggtcagggcatttgacatggtttcgatactctgggccttatctaagggaccgaattcttcccaggtcatcccgtaacgggccaggatatcggcaggccccaccgcagcgccggcgtccaccagggttttggtgctgatatcaattatgagtccctgtcccccacatgattcaatctcatgtttggcatataaggtttcctgcagtttggtatcaagagaggctatcagggcgattctgttgtgttccatgttgcctcctaatttccgtacactctttttgagtctacaatttcaatcatctcaggcgcgtgagttggaaggatgaattcctggctctttgcccgtttcttcagttctacaatgctgttccattcatccacgatatctaagaagcgtcctggaggcgtgatgtcataatgcatttccggtacaggctttaggttgtcataggtaaagataaggtcgccgcagcagtgatactgtccctcgctggtattaaccacaacggtttgaagaccaacggaatgtcctggggtggggtatacgctgataccgtcaaaaatctctgcctccccgtcataaagcttaaagcttctgccgtcaaactgaggtttcagtcccagaaccggatactcataggatttatagtaaagaggaatgggatttacggcaaactggtattctgttctctggacatgaagatcagcatttacaaagcggtccagataatagacatggtcccagtggagatgggtaaaaataatatccgttatctcactgcacttgattcccagatttttcagctgttcataaacagcataaccctctggctgcacagagccgggatggtgatattttccggcaatttctgtatcagacattcctgtatcgatcataattttctttccgccgccctgtaccagaaatacagtgacagggagctttacaaagccctccacatcatagaatttgtgtacgctgtggtgatataagtactggcccttgcttgtgttggtgaatcctgtattaataggtgtgatggtatagtttgtcatatctgttctcctttactttctgagttttttctgttcccacgcaatcatagcggtttcttcaatcagttcggcgatctgccctgctttcactgcactggacgatatggcgacaatgccgtggccctttaagatgatggcagcggtctccggctctgtatccagaactttaaacaccttaggcagttcctcctgagttacggcctgggtggtgacatccactaccttgaccggttttttcaatttgagctgggaatgaagggtgattaattccagctgtctgtcattcagagaaatgaggatggaataggggctgtgtgtatgtacaatgcctcctattttggggtatcgggcatacaggttgccgtgaagggtggattccctggtgggtttgtacagaccctcctgaaggtttccctggaaatcagttatggttatattctcctcactgcactgcccgtaggaaaatccgctgggcttgacaatcatcaggtcagttcccggaatacggacactcaggtttccgccggttccggtttgaatcctgctctcgtatgtgcgggatgcggcggctaagaaatcatcttttgcttttaaaaattccctgtacattgtatctccttttcatgtgttttcgcgcgcttttataccaaaagcatatatatttttgtataaaaaatcaatatattaaagataaaaagaccggatagtatataagttatacaaaataaaatgatatattggtataaaatataaatattggtatgaatttaagagatataatggtataatatataccaaaatacatgtatgcgggattaaaaatataccgggaggggcgaattgatggcaagacaaaaattgagtgaggtcatattagaagatctaaagaaacgaatattaacaggagaataccggacaaatcagaagcttcccacggagcgggaactggcaaactattatgataccagccgcattccggtgagggaagccttaagacagctggcagacgcaggaatcgtgaggacatcggcgggttccgggaccgtggtgatatcatccggcagcaccctgtcagacacatcctatggaacaccttttatggaaaatgttacgttattaaaggagacaattatactaagaagacttatcgaatcccaggcagccagagaggcggcccagaaccggtcggcagatgatataaaagaacttcagaatgctctgttcgacagcattaaccagatacgtaagctgaaggcaaaggagaacaattcattttttgaagcagacgcctggtttcataaggctatagcaaaggcatcccacaaccagctccttgtggactgcctggatgcaataccctatattacagccaaccatcagttcctttccctgaaatacactactccacgggatgaggtggtgtcataccatacacagatatatgaaaacatcctggatatgaatggcgagcgcgcctatgaatccatgtacaaccatctgtaccgggtggagacattgatgatgaaccacaagcaggaagtagggggactgggaggggaggacggcatataagcggaaagggaggatttaacctaatcctcccttaattggtccttataatatgccagcatcaaatccaccatccgtccatagcttctgacgccgtcctcctggctgtgggctttgagatatctgtcattcatctgggtggaggcttctgccacaggtccttcaaagcgttcccagaactggttgttccaggccaggtcctgagcggcctgaggggacagctttgtataaaggtcataataactttcggggtccaccctggccagggcattgccggcgtagacccagccggtcagatagccgctgtagcgaaagtccggggagtcggagccgatacatgccaggtatccgatgaagttggcttcatcttcccgcataaatcccttcagatgagacaattcatggcagatggtatgggggatgttatagtaaggcatttccctgctgtagtttgcctctatggtgaaaggggaataaatgccgcagagctgctgcacggacagcagtctggagttgataagaggctttggatagggataataaccttccagctgggggtaggactggcccagccggaccatggctgccctgccgtcccttccaagctttgaaagctcccgggctgatggcgcgggggttgcctcggtctgtcccgggtagaggccgtccaggatttcgccggagtggtctatttctgtcagagagctgttgatttggtttgtaagataacggcacagcgccagcagctcctcggtggaggttttttctgcggcaatgcctgcctcataggaaaaggggttccggtaatagttgatgccgcagtttatggtgaacacgaataacaggacacagcaaagaaaaaaggcacgggagaacaccacaacaggctgcctgatatgcagaatcatgtagcatatgcagaacaggcagagggaatacagcccgatttcggaaagggaaaatggaaacaggctgcacaaccgtcccaatgtaccggccaggagcgggtacacggtgacggagtaaaactgggcgaacccgggcactgtccgggcacagagtcccagcaggccggagacagcggccagaaccaggccggctgcaaaaaatctaaaagaacggactttcttttctgtcctttcaggcgccttgttctggggggcggtggattttaatgcggctttagaggaaaatgccggcgcaatcttggctgtaacgttatggaagaacttcatatacaacacctgcctttggggtatggttgtgttcttgcctggtgggatgctgcaggttaaacctggttctgggcggggaggttatttccgctgtgcagttcggccagtacggtggcggctatggggaacaggaatataccggtcaggcccagaagcttgccgcctgcaaagatgcacaggagggtggctatgggggacaggcccatctgatggccgatgattttgggctccagggtctggcggaccactgctatgagcagatacaggcacacaagacccatggccaggctttcggagccggtcgtccaggctatgaatgcccagggaagaagcacggtgcctgtgccaaggaccggcagaatatccaccagcgaggtgatgcaggcaagcgtgaatccggccggaatgcccagcaccaggaaaccgatataaagttccgtaaatgtcaggagcatcaggagcgcataagcccgcagaagccggcaggcgactttacggatatggagaagtacctgtaagagcatttgccgtctgtcatcaggaatctgatacagcaggaaatccagcgtctccctgtaattgcctgtcaggaaaaaggatgcgatcacagcgatgacaaaatcaaggaccagggcaggaataccgcttatggcagaagcgccccacccaagcagtccggaggagatgcccacagaagcattttccatgaaacgctccaggctttgtccaagggctgatatgtggatgctgtgtccggggaaactgttttccaacagggaaaagaaatgggacagacctggttcgatggtctggctgtagatgccgggcagcttttttgcctgttcctggatggatgacaggatttgactgccagacacgcacatgattgtcagaatggaaccataaaagaccagcagcacaactgcggcggccgcgccctttccgcccttcatgtgtctgtccagtagagacactgccggttccagcatggctgcaatagccatggcggccatgaagggaatcagtatgggcaggagtttctttaaccctatatagcagagcacacctatgattccaaagtaaataaagctgatgatgaatgtcctgcgtttttgaatgtccatatatgtatcctgttgtttgcttagttccattataggctcaggagacacggcagtcaagaaagaatccccagaaaatgggggacatgcactggaagatatttctagggcagagccatattccggggaatgattttatgagagggaaagggattgctgcattatgatgggagcgcaggtgtcagccggatattctgcctgtcaaagctatgagaaagcacagggtgataccgagaatgaataccagcagccgcccccaaaaaaagtacggagtatggccggggcttctgcgcatcttcagacagacagtgatgcttggaaagcgggtcagagccatgagacaggtgcacagggcagtgcgccaggtccacccgtgatttgccagcacctgtccgaggatgaagggggatgaaggggaagggattcctcctgttttcagatatatcatcatcatggcgggaagcgccattccatgggaaaaaatacccaggataaaagcagccagtatggtgccgtccagtccaaggagacgggccggatgctcaagaaaatgtgtgatggcagttaacaggttccctccggctatatccgaaaacagtagggtgccgtaacctgtttccggtccggcatatgccatgctgccaagaaaccatatgagaatgccggacgggacagctgctgccgctgccttgtcaaggaccggaatggtgtgatctgcggtacttgagaaaagggtggaaaagataccgtatgacttgtaatggctggcggtattacaaggtttttcaataaaaaactctgtcagcaggtctgacagatatacggcccagggaaagcagctgcatcttcccagcaaacccaacaggggaaacagcagaaaaagcattgggagcattaccagtatggtgcatgacacggcgcgaaatgcaccatgaaccatgggggcagccagccaggcaggtattccaaaccattctgcccaggcccacaggacggtttcagtttcaaaaaataacggccagagacagtctgtaagccggatggacagacaggcggtaagtccaattaagagcaatagcagcagcgcttcacatattcttcggatccatcctgcttccgggcttatattccgcttttttccctgagacgggcttatttcaggcatcatgcactcatgagccaggcggcagggagaaaagtccagacagtcgtagagaaaatcgtgcctgtgatggggctggagagcatagtggagggctgcttttaagtcgtccatctgttccctgccgtatccgtggagggggacgaccggaatctggagtacatcgtggagaagtgaaaaatcaatgcggatgccctgccgtctggcttcttcacagcggctgacacacaggacaacgggaatggaggagtccctgaccggtccaagactcaggatttcttttaaaagtcccagaaggatttccagatgaagcgcgtggcctatcaccagaatggcgtccgggtgtccggagcagagataggatgccgtgcagctggcttcctctgacggggagctgagggacaggactccgggaaggttcactgccttatagcggcggctgtcatatgaaaaatcaccatgggggcaggacatgtcccgcatacaggaaggcatagcagggcccttttgggcggtgagctttttaaacaagacctccttgccggtctgttcattaccggtaaaagcgatgataaaatgtgggtgttccatccagtcactcctgaaatataaaatctgcctatagtcgggcagattgagtcttaggatagcgtatgtgccgcaaaacctttggtgcatggcagtcaggtccctatctgccattggttcatcattgtggccacagactgcttgacggaggaaaggttatcaactatactaagtttaaatgtgcaaaaaacagaatccactaaattcaggagatgaaatgacatgggatatcaggacgattatgttatgagaacaatcagcgatctggtgagggcgattgccaggctggttcttggaaagagcgatattgattatgaccttcccgaggatgaggacaagtatacggaccttgaccgggtatataagcggcttaaggatctggtggatgagggaaacatcaatgacgcggagaaccttcttaccgacgagctggacacggacagcctggactgtctggagatggccctcacgttttatatgtacctcaaccagctgaaggatgaggaactctacaccgccaattactcacgggaggaaatcgtggatggaatcaacagcgtgtgtgcagaatatggtatatcggggtttgaacattttgtagatacaaccatggtataatgtgctgccagatggatatggaaacatatgcgtctggctgcttttacgaatatttggaagaaagaggaaatccatggagataaaaaaggagtgcgagcagtatctggcggaatattaccagggcctgttctttgggaatgtgaacaaacgctaccgggccatgacaggtgccgaactcaggaaacgcatgagccggttgaccgaggccaacctgaagccgctggtgaagtccaacgaactcagcgatgtccacgccatgctgtcaaaggtgtgcgcctatctcatgcgcagggaaggacacctgacagggcctgccctggagcagtgggagtccggctgccgtcagatgaatgaattctgtgaagcccttgccagaaaggacctggaatatgtaaacggcctgtcccttgaggatttggagcaggtgctgaagatgcagggcatccgccgttatctcctcactaattctctggagagggcataccagctgttctacattccgaaaaccatcaagaaggggatcctggagtctgtgaaacagaagccggagcaggaatacccaggggccagggagatgaaacgcaggttcatccttcatgtgggccctaccaacagcggcaagacccacgacgcgctggagcgtcttaaggagtgtaggcatggagcttacttcgggccgttaagactgctggccctggaggtctatgacaagcttaacacagagggcctgtcctgttccatggtcacaggcgaggagacgctggaggtgcctggagcggtctgccagtcctgtaccgtagagatgttaaacgaccatgaatatttcgatatcgtggtggtggacgagtgccagatgatagccgacccctaccgcggacataactggaccagggcagtgctggggcttcgggcagaggaaatccacctgtgcatggctcccgaggcagaggatattgtggttcagatgattaagcggtgcggcgaccagtacagggtggtgcgccataagcggaacacccggctgaccatggagaaaaagccctataatctgaaacaggatttaaaaaagggcgatgccctcattgtgttttccaaaaaatcagtgctggccctggcagcccacctggagaacgaaggaatccactgcagcgttatttacggaagcctgcctcccgccaccaggcgtgaacaggtgcgcaggttcctggccagggagacagaggtggtggtcagcactgacgccatcggcatggggctaaacctgcccatacgcagaatcgtatttgtggaaacacgcaaatttgacggggtaaataagcgtaccctgaatccggaggagataaaacagattgccggacgggccggaagatacggtctttacgacgagggattcgtggctgccatcgacgagccggaggtcattgaggacggtctttccagaatgcccatgcctattatgaaggcatatgtgggattccctgagcagcttctcaaccttcctgctgagattgatacgctggttaagatatgggccggcatggacacgccttccatttatgagaagatggaggtggacgagctgctggcgctgtatatgagttttgagcatgtacaccgggatgatatgggggaatactcccggcaggaaatttataagctcatcacctgttccattgacatagacaataagatggtcatggacctgtggaaggattactgcagggaataccgtgacgtgacggaactggagtttccttacagcccgggagaggacctgtatgatttggagagctactataagatgctggacctttatttccagttctccagaaaggtggggcttcctgttcaggccgagaacctggccgaggagagacgcagcacagaggaggaaatcagccgtattttaaggacagaatgtgccagctacacccgtaaatgttcagcctgcgggaaggagctgtcatgggattatccgttctccatctgcgaacggtgttttgagaggggtaagataagccggggacataaccgctcagggcggagacgcgcggcaggaaacagagtatgaaacaagtggacaacaaaggaggaagacaatggaaaatcaacgcatcattcaagtagaggacaaggtaccctttaacctgttggtacccctcagcatccagcacatgttcgccatgttcggcgcatccatcctggtgccgtttatatttggcataaacccggctgtggtgctgtttatgaacggtgtgggcaccctgctttttatcggagtgacaaagggaaaggccccggcctatctgggatccagctttgcatttctggcgccggcaggcgtggtcatcagtaatttcggatatgaatatgccctgggtggattcgtggcagtggggttctgcggttgtatcctggcctttattgtatataaattcgggacagaatggattgaggtggtccttccgccggcagccatgggcccggtggtggcgctcataggactggagctctccggttcagctgccagcaatgcagggcttctggacgaggtgctggaccccagaaagacaatcgtgtttgttcttaccctgggaactgctgtatttggttccatcctgttcagaaagttcttctcggttatccctatcctcatagcggtcattgtgggctacgcgtctgcccttgccgcgggtatcgtggattttgccgaggtggcagcggctcctgtttttgccctgcctaatttcagcacgcctaagtttaatctggaggctatcatgattatccttccggtgctcctggtcatcacctctgagcacatcggacaccaggtggtcaccagcaagattgtgggaagggatctgttaaaggatccgggtcttcaccgttccctgttcggagataatttttccaccatgatatcaggactgataggctctgtgcccaccaccacctatggagagaatatcggcgtcatggcaatcacccgtgtgtacagcgtgcgcgtgattgcgggagcggccgtgctgtccattgtgtgctcctttatcggcaagttctccactcttatcagcaccatacccggtcctgttatcggcggtatttccttcctgctttacggtatgattggtacctcaggtctgcgtattctggtggattccagggtggattacggaaattccagaaatctggcccttacctcagtcatatttgtcacgggtctgtcgggaattgccgtgaagtttggaaatgtgcagcttaccggtatggtgctggcctgcgtggtaggcatgattttaagtctggtattttatgttctggattactttaagcttaccaatgatcagtagattcaggctaaaaaatgtttgacatctgcgggaaaacttgtataatatctagtaagctgaatcttaaacagcagcctgtctgctggggtattctgagccgtactatactcaggatggggattgaaataaaccgttgaagcggagatcaaaccgtagagggcgttcacagagagcaggggatggtggaatccctgtaacaggccggccggcaaatggaccgctgagggaaaggggaaaggccgtcagccgacagcttacgcgccaagtatccggaccgcaggcctgcgttaagggcagagcatgtaccgtaccgttgtaccgcgcatgtttgagagcgtattaaaaagttaaggtggcatcacaggcattttgggattcaggcctgtcctttcttgaaaggacaggcctttttgcgtataatgataccaaaacataacagaatgtatgggatcagaagggtctaaagcctgtctgaacgtatatctgacaaacaaaacacggttgggaaggagaaggggaatgtccaaatcatttttaatgggaaatgaggcaatcggcctgggcgctgtccgggcaggagttaaggtggtttccggttatccgggtacaccctcgacggaagtactggagacggtggccaagcataatcccggagatatctatgtagagtggtctgtcaatgaaaaggcaggtatggaggtggcggccgcggctgcatacaccggagccaggaccatggtcaccatgaagcaggtagggctgaatgtggcttcagaccctctgatgagcctggcttatgtgggggtaaagggaggcatggtggtagtggtggccgacgatccggggcccatatcttcccagacagaacaggatacacgcaggttcggccagttttccaagctgccggtatttgatcccagctctccggaagaggcatacgagatgattaaggatgcctttgaatattctgagaaatatcatactcctgtgttgttccgccctaccacaaggctatgccacggatgcgccagcgtggagcttaaggaacgggtcaagcttccggcgccagagggctttgtcaaggattccggcaaatgggtcattttccccaggctgtcccatgcaaaccacaggatgattgaggcgcgcaatcccattataggggaggacttttcaagctacaggttcaacctgctgcatagggaagagggaaacacggtcaagggcatcatcactcatggcatcagctatgagtttgtcatggaagccctgaacggatacagaggagcaagggtgattaaggtatccacccccaatcccatgcctgagcgtctgcttctggaattcgcagaaggactggaccaggtgatggctgtggaggaactggatccggttctggaacaggagctgctgcttcttagcggcaggcaccatctgcctctggaagtaaagggcaagcttacaggggaagtgcagaccgccggtgaaaactccgtggagtctgtcagaagggttctggaagagtatctgggagaagcctatatccggtatctggaaggactggaaggcggtgcagcggagccggaagcagccctgccggttccgccgctgccggtgcgtccgccggtcctctgtgccggatgtccccaccgggcatccttctacgcggtaaagagagccatggagaagttaaatgaaggcctgggggagggcgcggcgcccatagagggagtctactgcggcgatatcggctgctatactctgggcaatgcaaagcctctggatatggtggacacctgcctgtgcatgggcgccgggattaccatggcccaggggctgcagcgggtggagccggacaaacggtatttttcctttgtgggagattccaccttctttgcctccggtctcacaggtattgtcaatgcggtatacaatgaggccagcctgaccctgtgcatcctggacaactccaccacggccatgacaggccaccagccccatccgggtacaggccgtaccatgatgggaaatgtagtggagaaagtggatattacaaaggtgctggagggcattggcgtaaagaataccgttacagtggacgcgctggatttaaatgcgtgtgtggacgccgtgcttaagctgtccgccatgaagggcgtgaaagccattattttcaagtccccctgtgcggctatcataaaaagcttccggacgtgcaggattgcggaggacagatgtgtgaactgccggacctgcatcaatgagattggctgtcccgcattggtgctggacggggatatggtgcgcatagacagcggcctgtgcaccggatgcggcctgtgcagccagatctgttccgtagacgccattgaaacggttaaatagtcctgctccagacggacaggacagggaagatgcttggagagcgaggtatataagatgacaaaaaatgtattgctgtgcggagtgggcggtcagggcactgtcctggcatcccgtctcatagccctggcggccatggagaagggaatggaggccaggggagctgaaaccatcggcatggcccagaggggcggaagcgtggtgagtcatgtgcgtatcggtgagaagatatattctccgctgataccccacggcggggcagacgtgatcatcggctttgaaccggcagaggctgtccggtgcctgccttacctgaaaaagggcggctgtgtggtggtatccccggcccccatacggccggtgaccgcttccctgacaggaggtgcctacacgggccgggagatgatggaatacctggaacatgccggggagaacctggtggtggtggatgcagcgtccattggcatggagtgcggttccccgaaggtgatgaatgtggccctgctgggagcagccattgccagcggactgataggaatttccctggaggagatggaggcagccattgaaaaaagagtgccggaaaagtttaaggacatgaatatgaaggccctgaagctgggcgcggcagccagcgccatgataagataaacggaggattaaccagatgaagatgaaagaatcccagttccttctcattaaggaacagctcaagaaactgacagccaaggagtgcttttacaagcataagctggaaggcgtcaatgtgaatcagatacagtcccaggaggatttcgagaagctcccttttacctggaagggtgatttgagggaagcgtatcctctgggcctgatggctgctccggaagagaaaatcgtgcgtattcattcttcctcaggcaccaccggaacaccggtcatcattccctatacccagaaggatgtggatgactgggctctgatgtttgcgcgctgctatgagatggcgggcatcacaaacctggaccgtatccagattacgccgggatatggtctgtggacagccggaatcggtttccagctgggagcggagcgtctgggcgcgatgaccgttcccatgggacccggcaacacggataagcagctgcgcatgatgatggatatgaagtccacggtcctgtgcgccacgtcctcctatgctcttttgctggcggaggagattgccaagagaggcattggagagcgcatccatctgaaaaagggtgttattggttccgagcgctggggcgagaagatgaggaacaggatagcggctgagctgggagtggatctgttcgacatttacggccttacagaggtgtacgggccgggaattgccattaactgcgagaaacagggagccatgcactactgggatgactacatatatatcgagattgtggaccccaagacaggtgaggtgctgcctgacggcgaggtgggagaaattgtcatcactaccctgaaaaaggaaggtgctcccctgattcgctaccgcactcacgacctgtccagaatcgtgccgggagactgtccctgcggttcgccttatcccagaatcggcaccctcattgggcgtaccgacgatatggtcaaggtaaagggcgtgaacatattcccaagccagatagaggagcttttaagctccatagaaggtgcctccagcgaataccaggtcatggtggaccacctgatgggcaaggatgtgctgaccttatttgtggagacaaatccatccattaacaaatacgccctggaaatcgaaatccagaatcagtttaaggggcggattggcctgactcctgtggtgaagctggtggagctgggcgagcttccaagaagcgagaagaagtctacccgtgtatttgacaaccggtattaaggcagtcatggaggtttaaactggctgcaaaggccgcaccagcacttccctggcattttggggcctgagggcgatgaccgtgtcctgtatctggtaggcggacatgcggccgcgcctccccttcagaatacaggtcaccagtgccggggctgtaaaaaccagctcttccagccgcagcgacataggcggttcgctgataacccagacgatttcggcccgttctcccggtttcagttcatgtagcggatagaccatagtgaatcaccgttcaggtttgttatgatattatatgcagagtacgtatctgtgggaataaaaggagggttgtcacacttttggcccagccccgtataataaagtacaacctagatgaaaggagattaacactatgaattataataattgtaatggttggaatgaatatgcaggaacttatgagggagcttattatgcaggggatgcagcgtttgccagaacggccgctgcaggcggaaactgcggaagtactgcggccgcagccgcagcaggcactgccgggtcatgcggcggaacaggccggacctgcgatttatactggcagggctatatggcagggttctatgccaacaacagatgtaatcagtcggctgaggcaaggacggctgcccaggcagcagaccggaccgctgcggcttcaaactgccgctgctcctgcaataactgcaataattgcggtaattggaacaattgcggcaactgcggcaactgccgctcttaaaaactgccgctcttaaaataactgtcgctcttaaaatacctgaagtttggggattatattattcaacatgaatgctgaaacggccagggcttcccaaagggaggccctggcccggagcattaaaagggtatattgcggcatgttctaatccagaatgacctttaccggtgaatccacaatcatggtatcgggtgttacgagacagtcatatgccagcacatggacgccggcttcacgggcctgcctgagcgcgtccccaaaggccggatgggtcatgtcattgggggtaaagccacggatgcccttcatctggatgacaaacaggacataagcctcataaccttcctcatgggcccttataaggccctttaagtgtttgatgccccgttccgtgggcgcgtcaggaaacatggccacaccgttttcctccagggttacgcctttgacttccataaaggccggggacactgcctttgtatcccagtctctcagggagaatgccaggtcaaaccgtgagtcgccgtgggtgacctcccgccgtatgtcacagggcacataaggtccaagaggggaaaagggggagccggctttttccgcacagccgcggctgtccatgctgccgtccagtgaggtcagccactcccatgcagccttgttgggggcctgggagtccatattgatgaacagatcatttttatatacgccaatcaggtcatactcggtctttcttccggaaacagctgcgtccggatggaattccagtataaccgcggctccgggaatcagaagctcccggcaccggccggtgttttttacatggcataccactgttctgttccctgtctttacatgggcgataaagcggttgggccggcttacaaaggttccggcaactatgtgttcataggtcatgataatgttcctcccgggcttattgggcctgtacggataccgcggctgatgaggcccggccggtatggggacaggctgtatcagtataccagataaagggcggaaaaggaaggtatccgtgtttgcagttgcgtctgtccgggaaatatgttaatattttggtaacattactaattgagaatttcaaaagcgaggaaaaagagtatgggattaacctatcagagtacaagaggcggtgaaaaggaagtgacagcttccatggccatcttacagggccttgcaaaggacggcggcctgttcatgccgtcctgtattccgcagctggatgtgccccttgaaaagctggcgtccatgacataccaggaaacagcgtatgaggtcatgaagctgttcctgacagattatacggaaaaggaactaaaggactgtatcgccagggcctatgacagcaagtttgatacagaggagatagcgcctctggcaaaggctgacggggcatattatcttgaactgtaccatggaagcaccatagcattcaaggacatggctctgtccatcctgccgcaccttatggcgacagcggccaggaagaaccatgtggaccgggaaatcgtcattctcacggccacatccggggatacgggcaaggcggccatggccggatttgcagatgtgcccggcacgcggatcattgtattctatcccaaggacggagtcagcaaggtccaggagcttcagatgcgcacccagaaaggggacaacacctctgtggtggcaatccacggcaattttgatgacgctcagaccggcgtgaagaaaatgttcggggacaaggacctggaagcagagcttatgggaaaggggttccagttttcctctgcaaattccattaacattggccgtctggttcctcagattgtatactatgtatatgcttatgccaaactgttagaagcaggagagatagagaagagcgagaatatcaatgtggtggtgcccacaggtaatttcggcaacatcctggcagcctattttgccaaacgcatgggacttcctgtaaagactctggtatgcgcctccaatgacaataaagtcttgtatgacttttttaccacaggaatttatgacaggaaaagagagtttatcctcaccaattcaccgtccatggatatccttatatccagcaatctggagcgcctcatctacatgagtacaggatgtgacgcccttgcaagcggaaacctgatgcgggggctttcccaggaaggaagatatgaggttacgcctgaaatgcgcgccttcatgtctgattttgtgggaggttttgccacccaggagcagaacgctgccaccatcaaaaaactgtttgatgatacgggctatctcattgacacccatacaggcgttgcggcttctgtatatggaaattacagaaaggaaagcggggatgacacaaagacagtcatagcgtccactgccagtccgtataaattctcccacagtgtcatggaagccattgcaggcagagaaggactggagggcaaggatgaatttgaaattgtggatgcgttaagcgccctgtccggcgtcgctgttccccaggctgtggaggaaatccgccatgcagccgtccgccataacagggaatgcggcgtggatgatatgaagaacgaggtaaaggacatcctgggcatcagctgatttaatgaaaaacatcttcctttttgttcgcgtatgcgatataatgggtgagatagttaataaaataacaaagttataaggaggtataatatgttagtttcagcaaaagacatgcttgaaaaagcaagggaaggcaagtacgcagttggccagtttaacatcaacaacctggagtggaccaagtccgtactgctgacagcagaagaactgaaatctccggttatcctgggcgtatccgagggcgcaggaaagtatatgacaggatttaagacagttgctgccatggttgaggccatgatggaagaactgaacatcacggttccggttgccctgcatctggaccatggtacttacgatggctgctataaatgtatcaaagcaggattttcctccatcatgtttgatggttcccactatccaatcgaagagaacatcgagaagacaaaggagctggttaaggtagcacatgccatgggtctgtccctggaggcagaggttggctccatcggcggtgaggaagacggcgtggtaggcttaggcgagtgcgctgatcctcaggagtgcaaggccatcgctgatctgggaattgacttcctggcagccggtatcggcaatatccacggcaaatatcctgagaactggccgggcctgcgcttcgatgtactggagcaggtaaaggcagccgtaggcgacatgcctctggttcttcacggcggtacaggtatccctgaggatatgattaaaaaggctatcagcctgggcgttgcaaaaatcaatgtaaacacagagtgccagctgtccttcgcagcagccaccagggaatacatcgaggcaggcaaggacctgaagggcaagggctttgacccaagaaagcttctggctccgggcgctgatgctatccgggcaactgttaaggaaaagatggagctgttcggttccgtcggcaaggcctaatatatgatgtaccggctgatttataacctacatcactataacagatgccagttattaatgcagcttcataatccttattagaataaaaatgcatatttatttaaaaaccacttgcaatttcagtggaaatggtttattttaataaagaacaaaggtgttctctctcagagggggaacacctttttattatatatccgcgcggacttaatataattacgtgagaagagatgtatgacccgggagaactgtgacctgaggatttgggaaacgattttggaaaaggaagataaaaagagaggatggataattctatgagcgatgtattgaatgtatcggagatgttcggtaaaaatgtattcaatgacgcggtgatgagggaccgtctgccaaagagtgtgtacaagaagctgaagaaaaccattgaagacggggcagagctggaccccagtattgcggatgtggttgcccatgccatgaaggactgggcaattgagaggggagccacccactatacccactggttccagccgctgacaggcgtgactgcagagaagcatgattcctttatctctgctccctccgacggtaaggtaatcatggaattctccggcaaggagctgatcaagggcgagccggacgcatcctcatttccatccggcggccttcgcgctacctttgaagccaggggatatacggtttgggactgtacctcaccggcctttttgcgggaagacgccatcggcgtgacactgtgcatccccacttccttttgttcctataagggagaggcgctggacaaaaagaccccgctgctgcgttccatgcaggctgtcaatgagcaggcattaaggatactgcgcttattcggcaacaccacagccaagcgggtcgcaccgtccgtgggcgcggagcaggaatattttctggtagacagagaaaaatatctgcagcgcaaggacctgatttacaccggacgcaccttattcggcgcaatgcctcccaagggccaggagctggaggaccattacttcggcgccatccgtgagagaatcggttcttacatgaatgatgtaaataaagagctgtggaaattaggcgtgcctgccaagacacagcacaatgaggtggctcctgcccagcatgagcttgctcccatctacgagggtgtgaaccaggccgttgaccacaaccagattgtgatggagacccttaagaaggtggccggacgccacggcatggcctgtctccttcatgagaagccctttgcaggcgtcaatggttccggtaagcacgacaactggtcactgaccggggatgacggcaccaatctcctgaaccccggcgacacgccccacgaaaacatccagttccttctggtactggcatgtatcatcaaggccgtggatatccatgcagaccttctcagggaatccgcctccgatgtgggaaatgaccacagactgggagccaacgaggcgccgcccgccatcatatccatcttcctgggagagcagctggaggatgtaatcgaccagctgtgcagcaccggcgaagccacccactccaaacagggcggtaccttaaagaccggcgtagacattcttccggacctggataaggatgccacggacaggaaccgtacatcaccctttgcctttacaggcaataaatttgagttccgcatggtggggtcctcggattccatcgcctcccccaatactgtgctgaacaccattgtggccgaggcctttaaggaagcagcagacatgctggaaaaggcagaggactttgatatggctgtacatgatttcatcaaggagaccctggctgcccataagagaattatttttaacggaaatggctattcagacgagtgggtggctgaggctgagaggagaggacttccaaacatccgctccatggtggatgccatcccggccctgacaacggataaggcggtgaagctgtttgaggcgttcggggtattcacaagagctgagctggaatccaggtctgaggtggaatatgagaactattccaaagccattaacattgaggccaggaccatgtatgacatggccagcaagtctattataccggcagttatcaagtataccacacagctggcttcctccattgcagccgtgaagggggtatgccaggaagccgatgtaagcacccagacagagctgctgatagagacctcaaagctgctggcagagataaagacagcccttgcccgccttttggaggtgacagaaaaggctgccgccgctgagggcggtaaggttcaggcactcgtctaccacagccaggtggtgccggccatggaagcactcagagcacctgtggaccagctggagatgattgtggataaggaactgtggccaatgcccagttatggggatttgatatttgaagtgtaatgattattttgcaaaaaggctcttctggaaaaccagaagggccttttaaatataactatctataacatattctgaagcagtaatacattaataaatatgcgattgcaaatgcgcctttatcttttcaatatcatgggtttttatatattgaagatattcccgatgctcgtcaggaactatatgtaaagattctttgataattccctgaagcagtaaacgggagtggattcttgcaatgacactattccataaggcataaatagtaggactgccgcagtgttcgaccagataggaatgaaattttatatctaaatccgtaagctgatacaggttatcttcattatcagcccattccatttgctgaattaattcctctaagttctgatagtcttcatcatcaagtttgaaagaagctttttctgctacatattcttcgataattcttcgtgtaggaacaaagaccttttcagtttcctccgggtccatttcaagaactacggttccacgatgcgggtgagaataggtaaggccttcctggtcaagctgtctgatagcctcacggactggaccgcggctgattcccatttgagatgcaatctcagtctccagcaatctctgccctggaggtaaatcaccttttacaatagcggttttaattgattcatatgctaaattttttaaagattgcttaggggtctttgaaaatgtaaacgcttctgacatatgtgcggatcctcctgaggtaagtatcgaacggccaatctgtaagtaaactcagactggtaggggcatataagactattctcatacatttttttgcaaatgtcaataagaaaaagatttaatgtaagttgttaacaagataatgttgacaacttacattgggcggtgtatagtggaagtataaaaaataagcaactaatttttaatattaataataaaattgtgcaaatcatacaaaagtaaaatggcaaggaggt

SEQ ID NO: 3306 - DNA, 18047 bp, Unknown
  gut microbiota DNA sequence
caggggattccggtgtgttttgatgccaaggaatgcgcggtaaagacatttccccttcaaaatatccatccccaccagattgaatttatgggggaatttgagaaacagggcggaattgcatttatcatcctctattttaccggcctggatgaaatatattatctgccttttgaacagatagagggatattggaaacggatggaggagggagggcgcaaaagctttacctacgacgaggtggacaagagctggcgggtccgttcccatgccggctttctggtccattatctggaagaaatacaaaaagacctggacagaaggtcataggaggttttgcgtgaagcgccgcgccttccatgctgcctgtgcaggtcctttcttggtccgtacgtctttttcatatcctgtattctaatcctgttttcacaccttcttttatgcgctcctttcagccccatcttccgtaccaccccgcataccaccccgcaggtacattttcattgaccagccctgtaaataaaagtataataaggtatattgcacgatgggcagaatggaattttaaaactgctttggggacgcgaaaatatgattgacagctccatggttttcctctataatgaaacaatcacgttaatgaattagcactttaccatagaaaagcaaaacggggtaaatgtgcgagaaaacataaaggcagggaacaggatggcagggaataatcgtttgattcatacgccggagggcgtaaaggacagttataacggagaatgcaggaaaaagctggcagttcaggacaagattctggataccttttatctgtacggatatgagcatatccagactccgagttttgaatattttgatattttcagcaaggacaggggaagcgtgccggacagggagatgtttaagttctttgaccgggacaacaacaccctggtgctgaggccggatatgacgccggcggttgcgcggtgtgtggccaagtactttatggacgatcccatgcctcttagactctgctacctggaacgcacttttaagaataacagcagttatcagggccgccttaaggagcgggctgagacaggggccgagctgattggggatgattccgaggatgcggatgccgagatgattgccatggtcattgacagcctgagacaggccggccttaaggagttccaggtggagctgggccaggtggccttttacagaagccttcttaaggaggccgggctggaggaggaagttgaggaagagctgaatcagtacattgaaaataaaaattattttgccgtggagggtctgctcaagaaccagcccgtggacgaagggcttaagaaggtttttctgaagcttccggagctgttcggctccctggagcagatgcaggaggcgaaaaagcttaccgccaatccgggggcactggctgccattgaacggctggagaaggtacattccattttggagagcaggggactggaagcctatgtgtcctatgacctggggatgctcagcagataccagtactatacaggtattatttttaaggcatatacctatggaaccggggattatattgttacaggaggccggtatgacaagctgctggtgcagtttggaaaggatacgcctgctgtgggatttgtgattgttgtggaccagctgatggctgccctttccaggcagcagattgatgttcctgtgacgctggtgaacacggtgatactctatgagacttcggccagatcccgggccctgtggctgggcagctatttcagggacaaggggctggccgtccagtccatgaagaagaaggagcaggtggcgcttgaggattacaaggccatggcaatacagaggggcatgcgcaatgtcctgtacctgaagggggacgggaccgtagtgacagccatggacacggtgaacgggaatacagaccagatacccattaccgcttacgagtaaacgcagggaggccgtgaagaagatgagatatttgaccatagcgttagccaaaggaaggcttgcggacaaagccatggagatgtttgaggcaatcggcatttcctgtgatgagatgaaggataaggcttccaggaagcttatctttgtaaatgaggacctgggagtgcgttttttccttgcaaaggccaatgatgtgcccacatacgtggagtacggggcggccgatatcggaatagtgggcagggataccatattggaggagggccgcaagctctatgaggtcatggaccttggggtgggaaaatgcaggatgtgcgtctgcggacctgaatcagccagggaaaggctggagcaccatgagctgattcgggtggccaccaagtatcccaacatagcaaaggactatttttataaccagaagtatcagactgtggaaattattaagctgaacggttccattgagctggcccccatcgtgggtctgtccgaggtaatcgtggatattgtggagactgggtccaccctgcgggagaacggacttatggtgttggaggaagtgtgcagcctgtcagccaggatggtggtaaaccaggtgagcatgaagacggaaaatgaacgcatcacggccattatcaagaaattccaggcatatcttaaggagaatgccggaaggtaggtacaggagcaaagtcaggaaagcggaggaatgttaggcatgagaatcgtgacattagataataagtccatggagaatattctggcggacatgttgaaaagggaccccaataattacgacagctatacccagaccgtacaggccattgtggacgatgtaaaggcaaggggagacgaggcgctgtttgagtatacaaagcggtttgacggagcgtccctggatgggagcagtatacgggtgaccagggaggaaattgatgaggccatgaaacaggtggaaccgggccttttaaaggtcatggagaggtccatggacaatatccgccgttatcatgagaagcagaggcagaacagctggtttgacgcccagcctgacggcaccatcctgggccagaaggtgactgccttggagagtgtgggagtgtatgtgcccggcggcaaggcggcatatccttcctccgtcctgatgaatattattccggctgaggtggcaggggtgaagcgcatcgccatggtgacgccgcccggtaaggacggaaaggtaaatccggtgactctgacagcggcttacatggcaggagccacagaggtctataaggcaggcggggcacaggcagtggcggccctggctttcggcacggcatccattcccagggtaaataaaatcgtgggaccgggcaatatctttgtggccctggcaaaaaaggctgtctatggccatgtgagcattgacagcatagcaggccccagcgaaatcctggtgatagccgatgacagcgccaatccgcgttttgtggccgcggacctgttaagccaggcagaacacgatgagctggccagctctattttggttaccaccagcatggaactggccaggaaggtatccgacgaggtggacggattcctgaaggtgctgtcacgcagcgacatcattaaaaaatccctggacaattacggttatatcctggtggcggaatccatggaaaaggcagtggagacagccaacagcattgcgccggagcacatggaaatcgtcaccaggaatccctttgaggtcatgaccaaaattcagaacgcgggcgccatctttatcggtgagtacagctcagaaccattgggagactattttgccggccccaaccacatcctgccaaccaatgggacagccaaatttttctcgcccctgggcgtggatgactttatcaagaaatccagcattatctattattccagggaggcccttgaggcagcccataaggacatagagacatttgccgagtcagagcacctgacagctcacgcgaattccgtcagagtgcgttttgaacaatagcagggaggtatgacagttatggaacggattgcatccatcacccgggacaccaatgaaacacagatatccatgagccttaacctggatggctccggcagggggaatatcaacacaggcatcggattctttgaccacatgttaaacagctttgcgcgccacggcttttttgacctggaccttgcggtaaagggggatttggaggtggatacccaccacaccatagaggatacgggaatcgtgctgggacaggctatccggaaggcggtaggggataaaaaggggattgtgcgctacggctcccaaatcctgcccatggatgaatccctggtgctctgtgccctggacctttgcggaaggccctacctggtctgggacctggttttggaccgggaaaaggtgggggatttggagactgagatggtgcgggaatttttttacgcggtttcctatggggcggagatgaaccttcatttgaagcagctttcagggacaaacaaccaccatatcattgaggctgcctttaaggcattcgccaaggccctggacggcgcagtggccgcggaaccccgtctctcaggcgtgctttccaccaaggggagtctttaggatggaagatatgcctgccctgtcccccggagcctgcgtccgaagacatggagaaaataatagaataaaaggagattcatatgcagttatatccggctattgatatgaagaacggacagtgtgtccggttaagacagggggcatttaaggacatcaccatatactcggacgcccctgaaaaggtggctgcccactggcaggagaagggggcatccttcctgcatctggtggacctggacggcgccctggcaggttattctgtcaatgaagaggtcatacgaaggattgcggacacggtttccatacccattgagattggcggcggcatccgttccaaagaagcagtggagcgtatgctggacctgggggtcaggcgtgttattatcggaaccaaggcagcggaacacccggaatttctcagggatatggtcagaacatttggcgaggaggccattgtggcaggcgtggacgcgaaggacggcatggtggcagtggaaggatgggagaaagtcagctcccttaccgcctcggacctgtgtcttaccatgaaggaatacggtgtcaggcacattgtctataccgacatatccagggacggcatgctgtccggccctaatgtggaggctacaaggaagcttacagaggagacaggacttgacatcatagcctccggcggggtatcctgtatggaggatttaaaatgcctgcatgaggctggtatcaggggagccatcatcggaaaggccctctatgagaaccggattgatcttgctgaggctgtaaggctttatgaggcttaagtaccagagaaaatggagagattcaaatgactgattgcaagaagctgattatgggatttggttacaggaatggaaagactttttcctggaacggaaagcttgagtatgagggcgggcttaaggagcttgccaggacagcctgtgacaacggggcagatgaaatatttatctgcgaccgttctttttcagatgaggaccatgaggctgtcataggcgccatcaaggaaaccgcccgcaccgtggatgaacccatactggcgggaggacgaatcaggcgcctggaggatgtgaaaaagtacctctacgcaggagccagcgccgtattcctggatgtgagctatgaagacaacgtagatatgatgaaggaggcagcagaccggtttggcagtgaaaagatttatgcctatatgccggacctgtcctatctgaaccgggtggaggaatacattcagctgggcgcgtccgtgatgatatgcagggcatccggtccggttttatccctggctgagctgggtgaaatcggggagatatcctgcagaagccttattttctgcggcggtcatgaaaatgtccaggagatggccggggatctgaagctgagtctggggtgtccccaggtggagggcgctgtcctgactttggcggaggataacctggacaaggtgatggagctgaagcagattttaaaaggtgcgggtattgtcacggacacctttgagagttcgctggaatggaagaatttcaaactgggaagtgacggccttatccctgtcattgtccaggattataagaccctggaggttctgatgatggcctatatgaatgaggaatcatttcaggccacactggcgtcaggaaggatgacctattttagcaggagcaggcagaagctgtggctgaagggtgagaccagcggccacttccagtatgtaaaatccctgaagattgactgtgacaacgacaccattctggcgtcagtaaagcaggtgggagctgcctgccataccggaaaccgatcctgtttctttaccacgctggcggagaaggaatataaggaaaccaatcccctgaaggtatttgaggaggtatttggggtcatactggaccgtaaggagcatccgaaggaaggctcatacaccaattatctgtttgacaagggaattgacaagatacttaagaagctgggagaggaggctacggaaattgttatagcggccaagaaccctaacccggaagaaatcaaatacgagatttcggattttctctaccatatgatggtactcatggcggaccgcggcattacatgggaggaaatcacggaggaactggcaaaccgttagcggcgggaaacaggggaagtacagacacgccttggtaatataatgccggtaatataataatgaaaatcgcaggaggtaatggagaggtggcagaaatatcggaggttacagcgagactgctggattacgttttatacgacacccagtcagaggatgacagggagtccattcccagcaccaagaagcagtttgaactggcgcataagctggccggggagcttaaggagctgggggcatcccaggtgaggataagtgagcagggatatgtgtacgcatgtattcccgccaatctggaggagggaaaaacatgtccctccctgggttttatcgcccatatggatacagctccctccttctcgggcaaggatgtaaagccgcagttcatccgggactatgacggacaggacatctgtctgaacagggaacaggacctatggatgaggacagcggattttccggatttgaaggcatatgagggcaagacgttgattactacggatgggaccacgctgctgggagcagacgataaggccggtatcgctgaaatcatgaccatggccgcctattttcttggacatccggaagtaaaacacggaacaatctgtatcggcttcacaccggacgaggaggtgggccggggagcagacggctttgatgtggatggcttcggggctgatgtggcctacactgtggatggcggagcgctgggagagctggaatacgaaaacttcaatgccgcttccggcagggtgacggtccatggggccaatatccatccgggcacggccaagggacgtatgagaaacgccctgctcatggcaatggagttccagtcactgcttccggcaaatgagaaccctatgtatacagaagggtatgagggtttttatcatctggacaggatgacaggctgtgtggaggaagccaggatggattacatcatcagggaccatgacagggcgaagtttgagcgcaggaaggaattgttttcccaggcagcgggatttctgaaccagaaatatggttccggaaccgtggaggcagcggtgaaggattcctattataacatgaaagagaaaattgagcctcatatggacctgattgataaggccaaggcatccatggagaagctgggtatccagccaatcgtggttccgatccggggaggcacggatggagccagactgtcatatatggggctgccctgtccgaacctgtgcacaggaggccataatttccatggaaaatatgaatttattccggtacagtccatggaaaagataacagagcttcttatagagattgccaggtcgtttgcagaagcatagcgttggtttgttctttcctgatttaacaaaagaaacatccctcccgcctgtaaagggggagggatgaattgcaggaaacaaacttaacggcagtgccggtcgcggattgaaacaattacggaagacgcagcatatctctgtcttccggatgcaccagcaccttaatctgtgtgatgccggaggacttataggaatgaagctgccgtgcctttaaatcctttaaaaacaggtctttgtttctcataaaacgttcaaagtcatcggatatatcataactgtctatacccacatagctgccctctgagtattccacataggggcggacagcggcagcgttataggtgacctgaaagcggattatgccgcggggaacggagttatcggccacaatatcctcttctgattcaggcaggcggtctgtccggataatatccagacaggtatcctccggggattccagttcagatgtctcctcagagtgatgggactggcccatatcataatccaatatctctgttttcatgtcaacagggcctgcatctgcatcgcccatataggtaaaggatgaaaactcggaaaatgttattccggtgcccaggcctgcggcgaaaacgcctgtgcagaacagggctatcatatatgactgcagtttacgcatgctgcacctcctctgaagcgttctggtccatgtccgtggaaagggcggtgttcccggtattgcggcggagccttaacaggcttatgcacaggatggaaaatgagcctgcgcagagaacaacacccaggcttagcagggcagggcctgcaaagggatatccctgaaccgtccataccagaaatactgccagaagatataatgaaaacagggtaagacatccattaaacaatgtcaggataaaaagcagaatgttccaggtccagcgcaagcagaagtacatgcaccacagggccagggaaaggcaggaggagaaaagaactcccagaccgcataacataccctttatcacgcggcatatggatgatccggcgcgtttaaatgcgtttcgcaccgtattttggacagtgctttggtcatggacatggtctgtccttggaacaggcggtatcctgggaacgcctgtctgggagtgttcggatgatggtgtgaagtctgctccgtttatatttacaacctccatctttgtcctgagatgacggaggaagcggggccggcgggccggaatccgtgaaaagaaggtccgtgttttccctatcaggacaccggtattctgcacggctgccgctgctattctatgtaagaaccgtccggctgcccgggcaatacccagaaagccggatcgggccctgcggattaagtctctgactctcaaaacgggggatagggtccggtttccgctataatccgggtttacgtggtatgcctccagaatctctgccgccagctggccgagatcaccgaaatccccgatggcttcctcctcgctgaggcccctttccatcttcatgtcaatatgctgggtgtattcctccagaatatcctgctgttccttttcttccagcacagccaggccgttcttaagttcatctaaaaactctgttttattcatctccatgctcctttaaaaatgtacatactttctgctggaactcgtcccattcccgctccagaacatcccggtacaggatgccggcggcagtcagatggtaatattttctgggaggcccttccgtggattcccgcaagtatgtttcaaaataatgttcattggtcagtctctttaagagagggtagatggtcccttcattgacatcaatgaccttggatacttcctctaccagttcatagccatacatatccctttttcgtactgattcaaggaccaccagctcaaggactccttttttaaattgtggattcatggtcagtaaccctccttgtgattactatattatacatactactatgtattgtcaagtactataaataaattaatatttaacttatccttaacaaatctttccaaagcctgtataatgattacgtagctgcatttttagaacaataagacctcaggggaggggagacatggagagaatccgtcaatttctcaataagaatatttatatattttcagtgcgtcaggggcttttgctgaccattccatttttgattctcggctccttttccatggtcattatgcagtttccgctgaaggcctggcaggagcttttgcctgggtttgcagggggcagtgtgaagctgctgctcatggctgtgtaccaggccaccttcggctccctttcctttatctttgcattaatgatatcctactcctacggggaagagcagactgtgtataagaatacccatatatttttcccggcagtggccctgtgctcattcattgcatttacctatccatcaggcgggctgtccatatgggggccggagtggagctttacggccatatgcattaccctcatcagctgcttcctcctgaccggaatttaccattgggtggagggataccgtcatctgtataccatgggagtggcctataatttcaacgcctctatgcagagcatgattcctgctgttgtcacgattgggctgtgcgggctttccggcctggttctgagtctggcttttgacgatgtgaatatcatgaatttcggttcttatctgtttctcaagctgttcggccagatgggaaacggcctgttttccatacttttatatatcctgttgtcccatgtgctgtggttttttggaatacacgggaccaatacgctggaggctgtatcccgcaggctgtttgagtcagaggtgacggccaaccaggctatggcagcccaggggctggagcccacccatatgttcagcaaaacgtttctggatacctttgtgttcatcggaggcagcggatgtgccctgtgcatggttctggccctgtttcttgctgccaggaagaataataaccgcagactggccaaactttcccttcctgcggttgtattcaatatcaatgagttggtattgtttggatttcccatcatattcagtgcagatatgattctgccttttatactgactcctatggttctgtcggtcatcagcagttttgccatgtggtttggcctggtgcccgtggcttcccggagtgtggaatggactgtgccggtgcttgccagcggctatctggcaacaggaagtgtaagcggaagcctgctacaagcctttaacctgattgtgggtaccatgatttatattccctttattaaacagagcgaacgggtccaggaccgtgaatttctgggaaaaatcaagagactggaggcatccatgaatgaggatgaacgctcggtttgggtcagggatttccgctggaatacctacgaaaaccagcagacagccaagctgctggcgtcagacctggaatatgccctgtccaagggagcgctggagttatactaccagccccaggtgaaacgtgacggaaccctctatggatgcgaggcactgctgcgttggaactacatgggccagggctttgtgtatccgccccttatcattgcgctggctgtccagggggatttcatcggatctctgggcatgtatattgtagagaaggcctgccgtgacatggcgggggcgcacactcaggcaggctgcccggtatccttttccgtaaatatcctgcctctggagctggaggatccgtcctttgcagatcatgttttgagaattttgaaggataccggtgtggagggcagtaatttgaccattgaactgacagagcaggtggcgctgaatcccggccccaatctggaacgccagttggagaaactgagagagtcccgggtgcgtatcagcatggatgactttggaatgggccatggttcccttaactatctgaattctgcccattatgacgaggttaagattgacggatcccttatccggcgcctgccggaacatacccagacatgtgaactggtgggcaacattatgaacatgtcccggattctgggagtcagcacagtggctgagtgcgtggagacgccggagcagattcagatgctggagaagctgggatgcagcatttaccagggatactattacagcaggcctctgccgctggacgcattcattgagtatgtgaaaggtctgtagtgtgtgtctggagctggtggtttccggcagcctgggagtacagctgagcgtgtcagtccagcctggagagcacgtctgacagtgtcagcacagcctgctccagccgctccatatcttcagaccccagttcctgtttcagtttatctgcaaaagaggtgtctttataaatcgtatttatcatataatccttggcgcgttcagtcacttctatgacgatgcagcgccggtcgtgttctgttggaagccttctgacaaagtcgtggctgcacaggatttctatgagcttggttgcctgttgtttgctgacatttaagtgccgggtgagctctgtcatggtcatgggacctttgcggagcagtacctgcagacagtaataggtttccagactcatcttatccttcataaatgccttgaagggtttatcaatcctgtaatgccaataggggagcagacggagcagttcctcggtgaagtttttgttattcattttctgacctccttgatccatctgcagccattctgctgaaggccgggataaagccggcgggataaagccatcctgcgcaaccggatagggccgccttatccggtcattgacaaacagactggatatgtttataataattagtaaaccaaagtggactatctattaaagtgtacttaatgactgcttttagattacaacatttttaaaacagaatcaaggggaagaaggataagaatggcggaaaatgaaaagaaaaagagaactttatgggaacaggccgtggaaaatgcgctccattttgcatttaacctggcctttgtatttatatttcaatccatatttggtgtacagaatgtgcttccgggggtggctatcagtgtgggcatgaccatgttcccggatggatatatcggggtgaggcccgtgaccatggcggggattatcataggattgtactgcggctgtgttattgccgggcagacagccctgatgctgccggcagcagcccttgtgattgattttctttttgtccttcttattatggccctgacctgtgaacccaccatgtacaaaccagctatcagtttcctgctgtgcttcgtgttcgcacagtccacacctgtaccgccagcggcatttcctatgcgtctggcaggcgcagcagcaggtgctgcagcggtggcggttactacggttatcaagtggtattggcagggacacgggaaggaaggacgcggtttaaaggaacagataaggctgtgcacggtacggaaaggctatatattgcggatgtctatggggatagcggcagctatgtttataggtatggtccttcacctgagaaagcccctgtggattagtattgtggtaatgtccctgactcagctgcattaccatgaaacattggagcgcatacgccaccgctttctcggaaatgtcctgggcattctgttctttgtggtggtattccgcatgctggtgcctgagagctgggcttttggcatggtattgtttttgggatatatcagtttttttacctcagaatataaatataagcagattgtcaatgcagtgagcgccatcaacgcgtctctggtgctcttagatacatccacggccattgaaaacaggcttctctgtctggcaggcggggcatgcattgtgctgattctgtatctggcgcagaaactcggaaggggaatcatgggccatacaggagctgcggcggcctgccgtataaagtgatgtgggaattatcggtacgattcaatggaattctgtaaatggatttggtataatggagaaaaatggtacaatatcatttaaagagcgaacgggaaaccaacgcttcgcggatgtgaagggatttacacacaaattacggtttttagctatggggataaagatttttaaaagcaatagacagggcgccagaacgcgccggataggggtatggtaatatggatttacgttatatagacataggtgtgaacctgatgggaaaacagtttgacaaggatcgggaggaggtggtccgtgattcccttaaggagggagtggggctaatcataacaggtactgatctgaaatcaaaccaggcagcggttgactatataggggagaagatgcctgagaaaacctggtgtacctgcggtatccatccccacaatgccgacagatggaatgatgattaccgcagcaagctggaagccctgattcgccgtaaccgccagagcatcgtggcgctgggagaagccggacttgattatgacaggatgttttcggccagggaaaaccaaaagaaatgtttttctgatatcctggagatggccggtgacctggacctcccgctgtttctgcatgagcgggcagcggagcaggattttatcaggctgttgaagaaccgccgtgaattgtgcaggagatccgtggttcattgctttaccggcaccagggagaccgcttacaggtacctgcagcttggctgttatatcggaatcacaggatggatatgcgatgatcggaggaacagggatgtggtggaggcagtcagggtgattcctttggaacggctgatgatagagacagacgcgccctatcttacgcctctgaatatccggggcctgtcaaggagaaatgtaccctccaatatcgtgtatgtggcggaacggattgctgaaatcaagggagtggatgtggagactgtgaagaagattgccttggaaaccaccaggacatttttttcagtgtaaggtgtaccgaatgaggaacagggaatgaggaaagcatagatgtacagggtacgttatctggtggaaatagaagacagaggggattgccggtttataatcatttgaaaaacaggagagaatatgggaaataaaaaagcaggaagcagcgaagaaaggctgagcgtattcctgagtcttgtgctgcggcatcagccggaagcagccggtatcacattggacgaacacggatgggcagatgtggaggatttgattcagggcatcagcggcacaggcagaccgatggatatggagctgctggaggatatcgtcaggacggatgaaaagggccggtacagtttcaatgaagaccggactctgatacgcgccaaccaggggcacagtataccagtggatgtggagctgacagagacagcaccgcctcaggtcctttatcatgggactgccagccgttttgagcaggccattctggaacagggcttaaagcctatgagccgtctttatgtacacttgtccggggatgccaagacagcattaacggtgggaagaaggcatggaaatccggtggtatttgaggtggactccggccgcatgagccgggatggtgaacatttttacatatcacaaaacggggtatggctgacaaaacgtgtaaagccggaatacctgaaacggaatatctgaaatggaatacctgtaaccgatgagtaaagacggatgactgtaaaaggtccaaaacatgaaggtgatgcattatgaagaacccgaagcgccgccgacagggatatttgaggagatggctgcgggccggtgtctatgcaggcggacattgtgaatgctgcaatcagccgcttgtccttattttcagatacgatgctgtctgctgtccccaatgcaaccaatggattgatgaaaaatgcggtgacccggactgctgtttttgcggcagcagaccggatacaccggcagaatcattgatatatgaatgcccgactataggcaaagactactatataaaaaagtatgagaagagaaagcggcagtattttaaaggcatgggggaccgtgggcaggccggatgggaccgccctccctcacacccgctgcccgtaaaaaggaacctgtgaaaattgaaccatcattccacatcctgctttaacagggccacatagccgtccacggttcctgcgggctcatatccctgttcccggcagtctgccagaatctgttccaggtccttttcataaccctttcttaagtccaccaccatatagtcagccggatggctgcttgtgagaagatagacttcatcccgcatggaaagctgggggaggaagaaggtggaggattttacagaggcatccggaggaatctggtccagaagagtcctggcctgggcagcttcctcatgatggcggtgatacaggacggcatattttgacttactgtacatcacgcctcccatgaggacgaggccgcacagcaggccccaggcacagacagtggccggaagccgtccgtcatacccgtcacctcctttgcgcctgcggccgggtgcattttttatatcccggaaattcaccaacgccagataaatgagcagggctcctgaaccgtaggtatactgaaagtatatggagtgctggtatatataattggacatcaggttgatgagtacaaaggggatgagcagtgtccatttctgccagtcttttgtcatgagcggaaggaaacccagcggaaggagcatttcaaggaagaacatgattttatccttcaccgcaatctgggacagcacataggcaggattgaccagtatggttttaaacatgctggccaagcccagacgtttgtccgatatgaaattgtcaaaccggttaatcatggccccgtccccaaaccggttgatataccagacagccatgcagaaatatgcgcatgacgcaagaaagacaatggctccccaacggtactgttttttccaaaggaacaggtaaagtccgatacaggccgcatagacaggagcatcctccttcaccataaggagaagtgcggcagaggccagcatggatttaaaatggcctgtttccaaaaagtacatgcaccagagaatgatgacggccaggaatttattttcgtggaaatcgtaaaaacatccgcccataaacgccgggtaaaaacagtacatcagaccgaaacacagggtttgcaggcgggtgaagcaaaatgtcctggccaaaagacacaagggaaccattccgcttatgacaacaagggactggagcaccagcagggtctcaggacgggggactaatttgtaaaagggcagcagtacataaaagacaggtgagagatggaccgcaaaatgggataaaagcccgtcgcgctcacatgtggtaagaggagacaggcctttatccatgtagtaatacatctgtgaaaagattccgaaatcataagcagacgcgtaattcagccggtaccgcagcacggtcatgacggcggtgaacgagaaccagacagccgctgccatggtgaggattatcagcagccttttgccggtcagccattgttctatggtttttatcatagtataaatgtttcctttatcatcagagtggcaatgtacatgagcacgctgggagtcagggaaaaatgaatccgggagcggccgcagggaagtacatagggaatggccatgcagagaaagattccgagccagatgcccaagaagctttccagtgaaatctgtctcacaaagtccaatgtcacaaagggcacatgactggccaaaagaaacatggtatttgtcaacagccagctggccatggtcagttttccaaggcagcagcagaacagggacagctggaaatcgcgtttcatcatttgaatcataggttctcctcctttaaactgtatagtaatcatcccattggaaaatgtaaagatgcctgaggcaactgtaagaaaaattagaaaaaccttaataaaatctgccgttccggggagataagaacatgaggaaaaggacccgtatcatccaggacaagagacgcagaaccagatgtgcacagctggcag

SEQ ID NO: 3307 - DNA, 43176 bp, Unknown
  gut microbiota DNA sequence
cctttgacgaaaaactgatttctgtcagggaagaagatgggagaacagagattatcatggagggcgatgcggttactgacatgtgcggcagcaccctgtttattcaggagccggatacaggggatatcttttcggagaatttaaaaatcaatctctattcctataggcccggggagggaaagaaactggctgttcctaatatctatggcttttatcctgtacaaaaaggtgagagtttctgctttaccaggctgggtgaaaatacggatggacaggccctgtgccgctgtcaggaatattcctggtatatgacagagggaatcggagctcagtatatgacggtggcaaaggtggacgatgtgttccagccggccgaaagccgtatgtacagatttgctctgacagacaataagctcagcagtctctcggaatgcgcggcagagggatatgcaattgggatgactattgtccgggaaccttgtttgtgtcgggagacaaagaagaggaatattttgcattttgcggcagttctcaggaggcgcctgatcttgtgaggctgactaaagcaggttcttccaaggtgttcatggagaatgtggtccagtgcgaaccatatgcaggcgtcactggttttttccagcatggcggggagaggttcatggatgcagttccaaaggaatgggactggagcgggcgggcgttctatgaaatgggcttcaggtccaccaggaccaattccggaggattataaatgcggggcagcctgttgatacacagcccccggctgacaatcagagatgtggaacccagggcatactgtccccctgcatatcggggaaagaagccctggtgaggcgccagaagcccgccagggcagccgggcatgcggaactgccccccatgggcatgaccggccacaatcaggtcaaacccgctgtccctgtaatatttggtgagctccggccggtgtgacagcaggatggagtagatgtcaggggaggtgcgggaacagcagcgccagaactgttccttccatcgggagtccagtttaacggagtggtgggagtcggtaaatgcatgagggtcatccactcctcctatgatcagaggctgccctttgatggctgttcggattgtccggcctccaaggacagtgaccccatatccggtgaacattttcttgatgtcaggtatctggtgaatccaatgctcatgatttcccgtaacatagtaacaggggtactgtccctttaaaccctctaaaagcagtaaagtccctttgtgggggactttgtgatcagcaatatcgcctgccatgagaatcaggtcggggctgtggctgtgtacggccgtcagaagcggctcctgggcgctgccgtatatggtgctgtgcagatctgttatcagcgctgcccgcaggtgttttgtaatctttttagagtattccgtataacggtgtacggtaagaccgcagtaaaatgggtttacagcatgtgtttttttctgcatatcaggctcctgtttactcatcatcggacatctcatagggcagcagctctgccagatagtgctttttcctcagagcctcctctatctcgtccagtatctcctcctgctcggcgcagacatggtggaagtggtagccggaagtgacattcatgagcggggtggattttccggtttttatattgttcatgaacagctgtacgtcgcggcggttcttgatgttgagaggagctgacatttttccgtatacccggtgattgaccatgacatccaccacggtcccgcccaggtccacgatggtgaccagttcatcctctgtctgctcattggtgtggcagaccttaaaaaaacgtgacgcatgcttggatacattgagaacatacccgcgggcagtggagagaatgggataccccatggtgcgcaggagagcaatatcctggaccaccacctggcggctgacacctgtttccctgccaagggccccgccggataaaggggcggaagccagcctcatcatatccagaagcttcctgcgtctctgcgttccgttcatcgcattttccatttctcattccctcctgcaaaacatagttacgatttaatccgtcagcaccttcaagtgcttcaaactgatatccagaatcggggcagagtgggtcagtgcgccgctggatacataatccacgcccagctccgtgacggtccggatattttcttttgtcatgttgccggagcactcggttttggcccggccgtcaattaagcgtatggcttcagccatctgttccggagtcatgttatccagcatgataatgtcggcgcctgcatccactgcgtcctttaccatgtcaaggttctctgtctctacctcaatcttacggacaaagggagcgtatgcctttgcagcggcaaccgcctccctgacgcctccggctgcgtcaatgtggttatcctttaagagaacgccgtcagacaggttatagcggtgattctgtccgccgccaatccggacagcatatttttcaaaaacacgcatgcagggagtggttttccgggtgtccagaagctttgtccgggtcccttcaagcatccctgcaaccgtatgggtataagtggcaatgccgcttaaacgctgcagataatttaacgcggtccgttcgccggataaaaggacgcgcacatctcctgtgaccgtggccagatgctggcccttttttacttgttctccgtccctgacatcaaataccaccttggtttcaggatccagaagcgtaaatacgcgcttaaaaatctgtaacccggcaatgatgccgtcttccttgcagataagctgtacctgaccctttttatactcaggcatgactgcgttggtggatacgtcctcgctgctgatatcctcctccagggcaagacgtatgtatttgtcagcaataagctgcatggtaattggattcataatgtattctccctttctggctgttctctattctttttgcggcttttccggcaaacaccaggctttccaacaggctgttgctggccaggcggttctttccgtgaaccccgttgcagctggtttcacccactgcgtacagatgctccatggaggttctggaatccaggtccacccacacgcctcccataaaataatgctgggcaggcaccaccgggataggctcttttgtgatgtcataaccctcctcaagacatgtttcatatatgtggggaaaatgttccagtatggttttttggggtatgggcgcaaatgacagccatacatggcagcttccctcttttttcatctctgcttcaatggactgggataccgcgtccctgggcagcagctcattgacaaagcgttcgcctttgccgtttaagagcacagccccttcgccgcgggctgattccgagatgagaaaggacctgccgggcttttccgtgtaaaggctggtgggatgaatctggacgtaatccaggtgttccagctttacgccatgcttttgggcaacggtcagtgcgtcgcctgtgagacagggaaaattagtggaatgctgatagagccctccaatgcctccggtggccatgaccgtgtcacgggcatggatgaagagggagctgttgtcccttgtcctggcctggatgccggcacaggctccgtttgcggtcagaatatctgtcataacggtatattccatgatatccacattggggagcgcggctgtccgttcctggagtaccgtggtgatggccttaccggtgatatcctcatgaaaacagattctgggcctggaatgggcgccttcctttgtatattttaaactaccatccgggttcttgtcaaaccctaccccaagctctaacagatgccggatgataccggggctggtgcgtatcatcaaatccacgctttccttccggttttcgtaatggccagctctcatggtgtcctcaaagtacggctcatagtcatcctctccccggagcacacagatgcctccctgagccagcatggaatcacaggtatccatatcctccttgcatatcatcaggacatgcaggtcctccggcaggttcagggcagtgtataatcctgccaccccgcagcctgcaatcaccacatcacagtatatatgttttgtcatttcctatgcctccttttggaatcggctacctggaatcggctgcctgaaatctgcatcccggcagctaccgtgcaagcttaagcatctgctccagcgccctgccggctgacgggacataggcttcggggacaaatgcctggttttgccctgtgcgcaggacatggatgattttgtccagggttatctttttcatatcccggcagattggttctgtatcaggaaaataaaactgtttgtccggattctgctgttccagctcatgacgcacgccaatttctgtgcagataatgaattcccgggaggtgctgccggcagcatatttgagaatcccggtggtggaaccgatataatcagccagctcaagcacctgggcattgcattccgggtgggccagtaccagggcatttggatgtattttctttaagccggatacctccttgggggacatttggtcgtggacagggcagcagccttttaccagcatcacatgcttttcaggtacctggctggccacgtaccggcccagattcttatccggtatgaaaaggatgtcctggtttggcaggttccttacaatctgtaccgcattggcagatgtgacgcacacatcggaccaggacttgatttcggctgtggaattgatgtaacagaccactgcaaggccgggatattcttttctgtattgctccacttcctccttggttaccatgtgggccatggggcagtctgcctgggcgtcgggcatcaggaccaccttgtcgggactcaggagctttccgctttcgcccataaaggagactccgcagaacacaagcgttctgttttcaagaccggccgccaccttgctcaaatagaaagaatctcctatgtaatccgccagttcctgtacctggggatccacataataatgggccaggatgacggcatcctgctctgcttttaactgttttatttcttcctgcttagtcataatttcccctgttctgccggtattgcagcgccggcctttttaaattggctttttgtttacgtccgcaacagtataacacatatatttacatgtgacaagacatatagggcgttaaaattttagcataacaaagcggtcggcgtaattgtaaggattattaaagaaaagttcagcactggaaaatggggatatggtagaattaggataggaattatgccggacgttttctgacgtggcgcagcgttctaaacgaggaggattaatatgaaaaaaatccatgaaatattaactcacagaaaaagaatctgcaaaatacgaattcacagaatgacagctccgggatttgcggcatgtcttgtgttcatggctgtaagcctggcggcctgccaatcagcggacagcgggaccgggggacagaaagagaacatcgcggctgtccgggaacaggacggcgcaggacagacagaccaggagaatcatgccgcaaaaggagaaaacgcccaggacacagggacaccccgggggcaggaagttgtaccggatacaccggatatggaagccggacaggagacagccgcggagcagcagggggaggacggtttgatgacagcggaccagtggcagatggttcctggatacggcatatgcaaaaagggagaaccagtcctgtatgtattggacatggacgcaagccagatgaaaacagatgagaaaggagtcagcgccaggcttctttctgcggtgtttcaggacaatgtaatcagcgtcagggtgaaatttaaggatgataccgtgacactgataccggatgagaaggtaaaggagattctgaaacaggaggaggaaaaccggaaaaaacaggatcagggaattagcgtacaatgggatgacagttatttctgtattgacagcgaaaagaacatttacggccgcagtgcgtttcaggacagaatccgggcggagaagaaagagcagaaggcgcagggcgcaagggccgttacctttgaccggattaaaggaaagggtatagacggactgggttttacccggcagaggaacagcacatcttacaaagacaatggaaaaggcggcttctatatatcccaagtgtcagagaataccataggtaaggacaggtttacactggatgaaccggagggggtctatgaactctggctgaacggctttaaagaccccataaaaatcgtctttaaaaaagcgcctgcctatgattcactggaggatataaagggaatggtgaaccatgaaggattttatgggatggcagagggaatcgtggaggaggacggactcaggcttaccacctatacctactcagaagatggatataggattgggttcagccgcggaaaactgatggctacactgtcagacggaaggactgccgaactggtccctgtgctgggggaacagctgaccacatccctggaccagctgtccggcatacagcccagaagcatccaggagacactttacaggagaccggagggtactgtggttacggaagcatccctgcatgcagagaaacctgttgtcatatcgccggaacagggaagtgtgctggaaattcccattcccggagagcggcagcctttggatatggtggtggaattcagggactgcaggatatatctgaccggcatcagtcccatggatgagctttatgaatatggtacggatgacaacggagaccctcttaccaggcatatggtctacatcaatgccagggcagagatgagggatgcggataagaatttgtactacgtaaatgcagtacagccggaggaaggccaggagggcagctccggtgatcccataaaaaccgtatacgcactggcggatatggcgggggcagataaatataacgcaggtgagctggccgggttcaaggcattatatgaggagggggaatctgtaatccgtctgcagcttcaaaggcccacctacggatggaaccaggagtttgtactgccggtacagatgtgaccggataaaaaggaggagactgtttgcagaatcttcttccttttttcttaattatccggttgtgctattgattttgcctgcttcatgtgcaataatttatagatggattcagcggcagtatgtctgggccgttatcatgatggatatttaagagaggaacataaaatgagaagcagaaggagacggagaagatcaagggcggttattatcattcccctggttttggtgtgtcttatggccgctgctgcgggcatggcatttttatggtttgcaaagggacaggcgggtgtaaggcaggctgcgccggatgaacggttcatggagtatacaggatatctgaccgaggggaattacgaagccatgtaccggatgctggattccgggagccgaatggacatcagccaggaggattttatcaccaggaataagaagatatatgagggcatcggcgcctcctccatccgggtggatattaccggagtggaggaaaaggaggaccagggtattcagacggtcagctatgagaccagcatggagagcctggcaggcaccatccattttttcaaccaggcggattttaagctggaggcatcctcaggggctgccgggacagacagccatgacagtgaaaaggcaggaaagaaaaggaaggaagcaaaagacgaagaatacagattgatctggaacgaccgcgtcatatttcccaacctgagctggaacgataaggtaagggtcaccacggataaggccgtaaggggaagcgtcctggaccgaaacggtattatgctggccggaaagggaagcgcgtccatggtgggacttgtgccgggaaagatgagccgtgaggcagacaattattcagaggacgaaataaacatgctttcagagcttttaggtgtttccgctgacagtatccgcaaaaagctgtcggctaactgggtgaaggatgattcccttgttcccattaaaacattaaagaaggtggatgagctcaatctccaatccgctctccctgaggatgagaatgtacagaacagggcgcttcaggacgaacttctgaccattccgggcgtcatgatcacagatacgcctgtcagatattatcccctgggcgaaaaggctgcccatctggtgggttatgtacagaatgtaacggcagaggatcttgaggagcacaagggagaaggatacctgtcggacagcgtcatcggcaggagcggcatggaaggtctgtttgagaaggagctaaagggacagaatggccgcattatatccattgttacatcccagggagaagaaaagcaggttttggcagccattcccagaattgacggtcaggatatcaccctcaccatagacagcagcctgcaggagttggtgtatgatgcattccgggacagtaaaagctgcaccgtggccatgaatccctacacaggagaggttcttgctctggtgaacacgcccagctatgataacaatgactttatcctgggcatgtcggaggaaacctggaccggactgaatgaggatgagagaaagcctatgttaaaccgtttcaggcagcgctttgccccaggctcctcctttaagcccatcacaggcgttatcggccttacagcaggcgtccttacgccggatgagaattttggggaggacgcagcaggactaagctggcagaaggatgccggctggggcggctatcacgttaccacccttcacggttacagtccggtcaaccttaaaaatgcctatatctactcggataacatatattttgctaaagcagccctgaaaatcggatatgatgatttcatggcaggactggaccggctgggctttaaccagaagcttccctttgaaatctcggtggctgaatcccagtactccaatgctgaccggattgaaacggaaatccagctggcggacagcggatacggtcagggccaggtgctggtgaatcccatccatctggcatccctttataccatgttccccaaccagggaaaggttctgaaaccctatcttatatacaaggatacaccggtgccggagatctggattgaggacgcctgtacacaggaaacagcagagaccgtggaggacgcaatgaaggctgtaatcagttcggaacacggcacaggacatgcagccatgcgttcagacattactctggcaggaaagacaggaacggctgagataaaagcatccaaggaagatacaagcggcacggaactgggatggtttgccgtttacacggcggataaggacatacagaagccggttcttatggtcagcatggtggaagatgtgaagaatgccggaggaagcggcctggtggtcagaaaatccagggatgtgctgggagcctatataccgtcaggccagtaggacaatccgaagatacagacatatactattatggaggagggaatcagcataaactgtatatgggggattggaggggaaatcaatgcctatggattcattttcatcagaagggattttgcggaggcttatcaggcttccctatctcccgctgtatgtgggagtattgaacgcggcggtagagctggacgttttttcggaccttacccagcgtaagagcgtcagggagctttcagaggagagagggtggaatgaagataacacgcggtatttcctggacgccctttactgtcttggatttatttggaaaagggatggaatgtactgcaactgcagggaaacggaccgttatcttgtaaaaggcagaccggaatacatcggaggacatctggcttttcactgcgcagaggattgtatgggatgcagggatattaagaggctggttgaagaggggcccggcggagacagccaaccggaggggaagctggcctttgagcagtacgtacagaacatgcgggattcccaactgggcttccgccagaccgagatacagaaaatggtaaaggaacttccggaatatccggaaatccggaagattttggatttaggctgtgcaacgggactgctgggccttggcgtgattggagaacgggaggatgtgtacggtatcctctatgaccggccagctatggaaccggcaatccgggagtccatccgtctgtcaggcctggaagagagagcggtacctatgacaggagattatctgacggatgatataggaagtggctatgacctggttttggccattgccaccttaagctttgttgaacaggagatggccggcctgatgaagaaactttacaaggccatgaatccgggcggcgtgctgctttgctattcagagggaatcgagcgggatggctccggaccatgggacatgatgctgggctggcttccgtataatatgcagggatataaccttggagtgaagaagaatgaaataacagaggctgccatggcagccggcttcaggagtgctgagaaacggaccgggatctattccacaggcaacgtggatgtggatatattcagaaaataacattataagagccagatatgaaaataagctggatacgaaaaaacagagaggctgccggactttgcgggtacagcctctctgcctttgtgtgagctctcagcccagccagcgaaacatgatggtctccagctgtcggatatcaatgggctttgccatatgctggttcataccggcttccagagccagcttaatgtcttcggtaaacgcatttgcagtcatagccacgatggggatggaggctgcgtccgaacgttccatggcacgaatcctccgggtggcctggtaaccgtccatgtggggcatctgtatatccatgaagataaggtcatagtatcctgtaaaggaggccgcgaacatttcaactgcctcccggccatccatggctgtctctacatgggccccggtgttctgcaggaaagccatggctatttcctggttcaggggattgtcttccgccagcagaatccgcttgcgggaaaaatcagcgttgggaagcccgggaagggaggctgcagcggtttcttcctcctcatggagggcaaagcgccgcagcatgcatatgagcttggagggaaacaggggcttggaaatgaatccgttggctccggcttcttttgcggcggcctcgtattcagcagtgtcataggctgagataacgataatgggaacgtgacagcctgcctgggcacggatttgtctggtcacctcgatgccgtccatgtcaggcatacgcaaatccacgatgacagcaaaaaatccttttaggtcacggtgggcggaaaccactctggagacagcctccctgccggatgtcacaaaggagctgttcatgccaatctggttcagacaccggcatgtctcctcgcatacgattctgtcatcatccgccacaaggaccgggagctcggtaaggaccgaggaatctggcagaatctggtttctcagtctcaggttaaaggtaactgtaaaacgggaaccacggccgggcgtactctctacccaaatgtcgccgtccatcatcctggctatgttgcgggtgatagccatacccaggccggttccctgaacactccggattcgttcatcctcagctctttcaaaaggctcaaagacgcgctctatgaattcaggcgatattcccaccccgttgtcctcacataccagccggtaggtgctgtaaccctgctgcggactgcgtgtttctgacagctccagcgtaatggtcccgccgtggggcgtgtatttgatggcattggacagaagattattgatgatttgctgaagccgctgcatatcaccgcacacagcctcgtgttccagtgtttctatatggatattgagagtgtggcctctgcgctttaagtctggctgtatcatggagataacatccttaaagagggaatccagaagaaagtcctcctcagacaggacgatacgcccgctttctatctttgacatgtccagaacctcattaatcagtgagagaagaagcttggaggaactggtgatttttcctagacaatctatcacccggtccggatcatcggcgcaggaggcagcgatggctgtcagcccgatgatggcgttcatgggggtgcggatatcatggctcattctggacagaaaggtgcttttggcctggttggccacctgggcagcgttgagggcatcctgcaaaagctccttctggcgtttttcctccctgatttccgtgatgtcggagcgggtcagaaggatgatcttccgctgacggttgtagtaactgtagcgcagctttttatccctgaggataccattctggatggttcgggagtaaaggatgtattctttgttttgttccagctcctttattacattgtcaaggctcataagacgggtagtttcttcccattcatccacaggaagataggcccggttatattccatgagctcgttttcgtaattgtctcccacctccgggggaagcaggttttctgaactgtgggaagacaggtaccggatatggtggtttgtatttgcatctatgtaagtcacataatcatagtcatcctgggccgccatctccaccagatgggacctcatttctgactcaatccggcgggcgaataaaagaagcctgtcactgctgcatccggaatggggacaggtacttaaataaatttcatgccactcgaacccatagggcgctccgataaagcggatttctatgcgtttgtgcttccggccgcttgcaaaaaagctgcgcagggattctgtacagaagaattcattccatatggcctggtccggaccatatacattatgctctgacagctccctcagcgtttgctccaaatcaagggtctgccctgtggtggaggggagggtacggtccctccagacatatacttcctcctcctttagacggagttcccagatggtatcaatgataccatctgttgcatcaatataatcatttagtgacagaccggtcgatttcatttttatattcctttcccgtttcatgcttacagcatactgtgcatttatgataataacagaaatatccggaaaacacaatgaaagtaacagcatcgtcagggattacttggcaagggttttcagatatggtacaatagacaaagctgtgtatcatttgaaaagagggaaattaatgttcacacaaagaaaaattttagttgtggaagacaatgagataaaccgtatgatgctgagcgccattctttcgtcggaatatgaggtgctggaagcggagaacggacaggctgccctggcggttctgagaaaatacagggatggaatcgcgttgattcttctggatatcattatgcctgtgatggatgggtataccttccttgcccgtatgcaggaggatccggcgctggcatccataccggtcatcgtaaccacgcagagtgatgatgaatccgatgaagtgactgctctttcccacggggccacagactttgtggcaaagccttataaaccccaggttattttgcaccgtgttgccaatatcatcaagctcagggaaacagccgccatgataaatctgatccagtatgaccggctgaccggactctactcaaaagaatttttttaccagcgtgtaaaggaaaccctggccgctcatcctgagcaggagtatgacattatatattccaacatagagaattttaaacttgtcaacgacatattcggagtgccttccggggacaggcttctggtcaatgtggccgccatgttttcaaagcaggttggcagatggggtatctgcggccggattaatgcggatcagtttgcctgtctttcggagcgccgccttgactactcagagcagctgtttgcggaggcaggcaatcagattaatgccatgtccaatgtgaaaaatatggtgatgaaatggggagtttaccatattgatgaccgctccatatctgtggaacagatgtgcgaccgcgcactgctggcggtccgcagcattaaggggcagtacagaaggcattttgcagcctatgatgatgccttgcgcagtaagctgcttagggaacaggccatcacggacagtatggaagatgccctggctcaggggcagttcattgtgtacctgcagccaaagtacaggctgaaggatagggaattgtcaggagcagaggctctggtaaggtggattcatccggaatgggggttccagtcgcccggggaatttattcctctgttcgagagaaatggattcatcacacagctggaccagtatgtgtgggaccgcacctgcgcttttttgcgtgactgggacagtaaggggtatccgcagatacctgtgtccgtgaatgtgtccagggctgatatctacaatgcggaccttgccaacatccttctgaggactgtacataaatataatctgccgccgtcgcgccttcatctggaaattacagagagtgcttatactgaaaacccgggacaaatcattgatacagtaacccacctcagggagctgggattcatcattgagatggatgattttggaagcggttactcctccttaaacatgctgaaccagatgcctctcgatatactgaagctggatatgaagtttatccagagcgagacagccaagccagtgaatcagggaatcctgcgtttcatcatgagccttgcgcggtggatgaacctgagcgtggtggcggaaggcgtggagacagatgaacagctggaacggctcagagaaatcggatgtgattacgtacagggctatttttttgggaagcctatgcctgaggatgtctttgaggagctgatgaaaaagacggaccgggaaaagaccggggggagggaaccggcaaattataataacataaaggagaaacaaacaaatgaaaccgaatgaagctgcagaaaaacaggaaatcatgtaccgtcttaaaaatgcaggggagctatatgttctgctttccatgtgtacaggagaaccctatgtggtctgcgaccaggaaacatatgatgatgagatcatagttttctttgactcccaggcagctgtagaggaggcaaaagaacagacagaagcgggaacgcctgtcaggcccatgaagctggagaataagcagtttttaatcttttacaccagcctttacacccttggggttaatgctctgctggtgaaagacggcgggaggaacagcctgattcagctgcaggactttgtgaagcgcaataagcagcagggacaggagacaggggagaaggtgtgggtggagaatccgtcccttcatctgacgatgctgtattatatgcaggaacttagaaaaaaaccgggacaggagaatcttccggaaataaaagagtggcaggatgagatttccaatggtttcagcaagggcagttttattgttcctgtggagaaggagggaaaggggctggctgctgtcaaagtcaacgaacagttattccaggctatctttacagatatattggaatttcagaaatttaacagggagggaaaactgcgtccccttgtggtaacagctgataaaatacctcaaatcatgacagaagaggcaaagggcgtgattctcaatcctatgggggtcagaatgccgctgcaaattaagagggcgcccagtcagccaaaaaaagatgcttaaggcatgagaaaaaaactctatataaaccgtgaagcgaaaataaaaaaggtaaatacagaaaggctgcgatgagatttaattcatcgcagcctcgttacgttctgagttcaagggacagttggtcgaaatcaccgggattatcttttggtttatcaagagaagttactttttttaatatttcgttttgtgttttgttatattcttccttggcccgtttgaggatagccgcttgaccttcccggtatgtgttctggaaccaataaatgagcagcgattcatctgaagtcagcagcttggtgacagatgcccctgcctcgtccgggcgcagcgctgcggcaagaggcgtttccaacggaatgtcgaaaatggaatgaacggaagtgccaagtgcctttgcgatggattccatgtgaaccattttatccttttgattttctccgtttatgattctcttcaaagtgctggcaggtatgtgtgtctcctttgataaggttgcctgggtcatgccctttaaattcataagtgcaatcagtttctcgtttctcacagtacgtccccgtttcctggtaatcccatatgatatatgtctctaaccccgtagtattgccataaaatacctcttatggataattctaccatataaatgaagattcttcaagaaacgacattgatttaaggatattttttctcatgatattttttctcgcaaatttttcggtctgttttaccttgcgaagttttttctcataatgttcagcgcggttatgatgtccgatttattcttacatagagggatctgttcctgtatgaatttttgttacatattctttcaatttctttaaatccatggacagcgccgcttaatttgtttacaatagacgggctggtcaaaggctggctgcatttaaaatacacaggagaccagaatttatgtctaaagataccaaaaaaaatataaaagggactgacaacagaaaaaatacaaacagtaaaatccctaaaaacttaaaaacacaggacagacaaaatgcaatgaagcgaatcagtaagaccaggcaggcaaagatgcgggaggaggaagtaaagtccactctgaagtttggtgtgaaactggttttggttctggcagttgtgattggatgtgcacaactgtttttttatggaaagaatgtgatggcggacaggagcaatggtcccgctgcctggatagcggcagaaagcagtcaaacaaaggacaatccgtccgattcatccgttttatcaaaaacaggagaaccggagaaagaagaacaggaagagacagcaggtcctgaaacaaaagaaggcataacaggaggtctggcttccaaagaaatacaaacaggagaaccgccgtccggaatcgtcctggagccgtttctgcctgattctgaaaagggtcagcagcagacaccggagaccattgcacccttcgcggtctccagcgatggaccgggtaacgtggtgcaggcagcaccgcctttaggagaagcgtctttaggcccggcaggcggcggaaatgagctgttccctgtttccgggcctgcggatgtctccaagcccatgattgcatttacctttgatgacggtccttattacagtgtggacagcagaattctggacacgcttcaggcttacgggggcagggctaccttttttatagtaggaagccgcgttaatgactacaaggacactcttaagagaatccgggattccgggtccgagataggaaaccatacatttaaccacaagaatctggaaaaaatttctcccgaagaagtgacctcccagattgagatgaccaacgatgcggtggaggctgtaacaggtttccggccaaaactggtacgtgtgccttacggcgcctttaagggccaggtgccgggcctggtatcttaccccatgattcagtggaacatagatacacaggactggtccagtaaggataaggatgccattgcagcctctgtgctctcccaggcaagggatgggagcatcatactgatgcacgacctttattccgccacggctgaggcatttgagacggtcatcccccttctggctgcccagggctaccagtttgttacggtcagtgagatgtatgcggccaaaggagtgccgctggaggctggtcaggtctattttaatattcctaaggggtgatgattagaataccttattaacttccacaggaatcagcgcgcagatgaggattgtaaatcttttctgctggcagttaagttccgtgtaaagtttttcttgacacgaataccgtgtcgtgctttatacttaatttaggagaaaagtataaacactatggaacaaatgcagactgtcagcatggtatcaaaaaattaatcccggagacagcccgcttttcaggggaagctgagtatggagtggggccggaagccaccggtatgattgagaaatttgtttacgaaacggaattgctgaaactaaaacccgatgccagagggatgggatttgattgttccagagcagatttaagagtggaagccggagcagctcccaccgcatatgaagcatgggtatcaatccctgaggatatggaagttaagccgcctctggttaaaaaaacgtttggcggcgggatgtatgctgcccatgtattgagggactggagttttcaggattggagtttgcttcaggagtgggccagagaaagcgaaagatacgaagaggccggcggtccatgctttgaggaaatattaaattattacaaccttatgaataatggggcgaaaatggaagatacacagattgatctgctgctgcctgttaaggaaatgataaagtagaggacgcaggaaaaagtacaggcattctttgcttttagtccagagaacagtttatagcagcaggaggatttacatatggaacatttcaaatttgacttatatgcccgcgcatgtgatgcgtattttatttatggcgtaatcttagggtgagacaccgccatatttccattcctgccacacaacggatgggattgattacggaggatgcagcagaaaaagcggttgccttgaacagcaggcagggctggatggggatattcgtctgactaatttgtatttaagaaagggaaaggataatggcaaagacttcatttaatgaatttctattggcagttgcgccggagcatcgtgtatttgtggagaagctgaatgacaaacttttgaaacaggggtgtgaacttgtaatcaaggaagtcaaaagcggatacactgccacataccagctggagaagaaaaccgtaatgaattgggtgtttcgcaagaccggtatctgggcacgcatttacggagataatgccggcaggtatgaggaggtcatcgccgctctgcctgcccacatgcaaaagaaaatggcggcttcccgtgattgcaagagacttattgaccctgatgcatgcagtgatacatgcgtgaaaggtttcgtctattctctgaatggagagacacaaaaaaaatgccgtaatgacggaatgctcttccttctgacagaggaaacagcagagtatattgccgggctgatctgtgctgaggctgctgcgcgtaagccggctttgcagcagctgaatcgttaagaacggcatatagattaatttactaattgtcaagtatatccctcctgctattggcttatcctaaaagcggttatcataatatcagttatcataatatcatgagttttctgcaatgtattagaaaattttacaatatgatattttttcgcctgtatatatggtaaaacgaaagaacaatcaaagcttcggctttacaagcattacaagcccgcatatattgcgggcattggcgtattaacaagggtggaggggaattaacgagagcatcgcaggttgaacacactgtcacagatggagcacgttttctgtttataggcaacagccatacatttaccaatgatttgccgggtacattttgcgaacttgcttggacaagagaaggctggtgaattgcagacagtggcctggagttatatgcagacacagcgaaggctgaagaaacagaacgggctgacggcagttagacagagttttatcattatatttcaggaatgcgggactgattaaaaagatatgattaaagggataaccaattctaaataaaggtatagaggagcagttgatatgataacgatacgaaatgaagaagaacgtgattacaaggtcgttgaagaaattacaagaaaggcattttataatctatatataccgggatgtgcggaacattatctggttcacatcatgcgcggtcatgaggattttataccagagctggattttgtgattgaactggacggacaggtgattgggaatattatgtatacaaaagcccggctggttgatgaagccggaacagaaaaagaaatcctaacctttggtccggtcagtattgctcctgagtatcagagaagagggtacggaaggatgctgattgagcattcctttgaacaggccgttctgcttggctatgatgtggttgtcatactgggaagtccgatgaactatgtgggctgcggttttaaaagcagcaggaaattgaatatctgtatggaaaatgggaagtatccggctgcgatgatggtgaaggaactggtccccaatcaattggacggcagaaaatggttctattatgacagccctgttatggcaatctctgaggaagaagcacaggaatatgataataccttagaaaaaatggaaaagaaatatcagccgagccaggaagagttttatattatgagccatgcttttattgagtaagaaactaggtccgggctatcaatcacgaagtagtgaaccaaaggttatgccgtgaaaatgcatatggtaaaacgaaccgtggaagagtgacagcctgaagctttcgtatgaaaatatggattgctttataagggaagtaagggaagcaggggaaaataacaaaacaggaagactcatatcgcatgagtgcttataatgaaattaatcatatgaaatgaaactactgccgaatggtgttgcttaatactgtgaaatgccttataattaggcattgtggcataatgttttaacccgtgttatatagttggggtaaaaaatgtcgtaattaaaataaaggggcctgattttctttgaaaaaggggtgaaaaaggagcagaaaagagcaaaataaggacctgaactccggctcttttcgatttggaccggcccttgctacaagccaaaaatactgtgtaaacagcacaataaataaggaaaaaccatgagaaaactagctttaaatgatgagatattactaagcattcaacaacccgcccgctatatcggaggcgaggtaaatatggtgattaaggaccctgaaaaagtggatgtccgctttgccatgtgtttccccgacgtgtatgaaatcggtatgtcccacctgggcattcagattctgtattccatgttcaacagcagggaggacatctgctgtgagcgcgtttactccccgtggacagacttagaccccatactcagggagaagaagataccgctatttaccctggaaacccaggagccggtaaagaattttgattttctgggaatcactctccagtacgagatgtgctacaccaacgtgcttcagattctggacctttcacagattccgctccatacatgcgacagaacggaaaatgaccccattgttatcggaggcgggccctgcgcatacaatccggaaccgctggctgacttttttgacctgttttatatcggagagggcgaaaccgtatattttgagcttatggaccgctacaaggagaataagaaggccggcggcaccagaaagcagtttctggaaatggcggcggagataccgggcatctatgtgcctgctttttatgatgtgacctataaggaagacggtaccattgaatgttttctgccgaataatgaacatgccatgccggtggttaccaaacaagtggtaacggacatggacagtgtgggatatattgaaaagccgttggtgccatttatcaaagtgacccaggacagggtggtgctggaaattcagcggggctgtatccgcgggtgccggttctgccaggccggggatgtgtacaggcctctcagagagcacagcctggaatatctgaagcactatgccagcgacatgttaaagagcacgggccatgaggagatatccctaagttccttaagctccagcgattacagccagttagagggcctggtcaatttcctcattgacgaattcaagggcaaaggcgtgaatatatccctgccttccctgcgcatcgacgcattttctctggacgtcatgagcaaggtgcaggatgtgaaaaagagcagccttacctttgcgccggaggcgggttcccagagacttcgtgacgtcatcaataaggggctgaccgaagaagtgatactgaagggagcaacagatgcctttgaatcaggctggaaccgggtaaagctgtattttatgctgggtctgcccacggagacagtggaggatatggagggaattgcgctgctttctgaaaagattgcggaagcatactatgatatccccaaggaccggagaaacggaaaggtacagattgtagccagttcctccttctttgtgccaaagccctttacaccgttccagtgggccaggatgtgtacaaaggaagaatttattgagagagccaatatcgtccggggcaagttccgcgagatgaaaaacttcaagagccttaaatataactggcatgaggcggagcttaccgtgctggagggtgtgctggccagaggcgaccgcagggtcggggccgtgatagaagaagcttaccgcacaggggccatctatgactcctggtctgaatattttaagaatgatgtatggatgaaggcctttgagacctgcggcgtggatatcggattttataccaccagggagagaagcctggatgaggtattcccatgggatttcattgatgctggcgtatcaaaggaattcctgatccgtgagtggaaccatgccgtgaaggaagaagtgacgcctaactgccgtcagagatgttcaggctgcggagccagagattttggctgcggcgtctgttatgaaaccgtaaaggaataggataaatgaaaattcggattaaattcagaaaatatggaacaatgaaattcatcggtcacctggacgtgatgcgttatttccagaaggccatacgcagggcggatgtggatgtatgttacagcggaggattctcccctcatcagatcatgtcctttgcggcccctctgggagtgggaaataccagcaacggggaatacgtggacatagaggtgtcctccaccaaagattcggaaaccatgaagaaatgtctgaacggggtgatgtcggaaggctttgaggtcgtaagctacagaggtctgccggatgacgcggccaatgccatgtccatagtcggggccggggattataccctggccttcagaccgggatacgagccagaggacatggataaggaaacgtggtttcaggggcttattgccttttttgagcgtcccagcgtcatggtgacaaagaaaaccaagcgcggtgataaggagatggatctaaagcccctggtttatgagctcagaatctgtcctgagggggatggcgaaatggaaggcccccgtctgtttatgaaaatatccgcaggcagcgctgccaatgtgaaaccggaacaggtgctggatgcgtattacgggttcctgggaaaggagcggccgccctttgcctttatggtacagagggaagaagtatatgcggacagggcctctgatgctgagaaggaagccggtattcactcctttatctctctggaacagctgggtgaggaaatcagataatggacaaattagtagtgacccggcggggggataaggtctgtacggccgtggtatcagacggaaaggtaagccagctgatgctggagccggataccgccgactccctgctgggcaatatttatatcggcaaggtgcagaaggtggtaagcaatatcaatgccgcctttattgacataggaccgggatgtaccggatattacagcctgcaggaacggtggaagccggaacgtcttaagaccggcgacgagctggtggtgcaggtcagcaaagatgctgtgaaatcaaaggccccggtggtcacggaacgtctgtcctttacggggcggtactgtgtgctgactgtgggaaagaccggaatcggtttttccgcgaaaatacgtgatgcctcctacaaagccaggcttcgtgaacttctggaatgtgacctggcaggaactaaggacctgggcattattgtccggaccaacgcagttacggtggaggaatgtgctgtgcgggaggaactggctgagctgatgcggacatggcaaaggctttcggcggaagctgggtgcagagtctgctacagctgcctttacagggcgctgccgggctatatagcggctatacgggattccttcggcgggaccctggaagaaattattacagatgttcctgagtaccacagggagctgaaggcatatctggaaatgtgccagaaggaagacgcgggacgcctgaccctttatgaggacagccttctgccccttggcaagctttacagcctggaaactgcttttgaaaaggcactgggtaagaatgtatggctgaagtccgggggatacctggtcatagagcccacagaagccatgacggttattgatgttaatacagggaagtactcaggcagaaaaaagatgcaggacaccatatacaagataaatatggaggctgcggatgagattggacggcagattaggctgcgcaacctttccggtatcatcattgtggattttattgatatggagagggaggaggacaggaaggcccttcttgcccatttagtagaagttgtttcgagagacccggtaaagaccacggtggtggatatgacggctttgaacctggtggagctcaccagaaagaaagtgagaaagccgctccacgaacaggtctgaatatgacaatacacaggggataaaggggaagaaatatgaaaatcataattgtaggctgcggtaaggtgggaaccacactggcagagcagctgaacagggaaaaccacgatattacactgattgactgcgacagcgaagcgctccaatctatttcagacagtacagatgtcatgagcgttaccggaaatggggccgtgtaccaggtgcagatggaggcgggaatcaaggaagcggatttgctgattgccaccaccaattcagatgagcttaacatgctctgttgtttgattgcaaagaaagcaggcaactgccataccattgcccgtatccgcaatcctgagtactcagcggaaatcaactatatcagggaagaactgaacctttcactggccattaatccggagctggctgccgccagggagattgccagactgcttcgttttcccaatgccattaagattgagctgtttgccaagggcagaattgagctccttaaattcatgattcccaaggattccattctggaccgcatgaaggtaatggacgtggtgagccggttaaagagcaatgtgctgatctgcgccgtggagcgcggggatgatgtggtgataccggacggcaactttgagatgagaggcggagataagatatcctttattgcgccccatgcagactgtgctgatttcttccgcaaagcgggtatcgagaacaacacggttaattccgccatgtttgtgggcggaggaaagctgaccgtgtatctggccaaggccctggctgataccaagataaaaattaagattattgagcaggacgaggagcggtgcaggatcttaagtgagcttcttcctcatgcaatgattatacacggggatggttcggaccagaagctgctgctggaagaaggtatccgtcagacggaagcatttgcctcccttacggggtttgatgaggaaaatatactgctgtccttatatgcggccagccagtccagggccaagctgatcaccaaggttaataaaatagcctttgaaaatgtaatcaacgccctgaacctgggaagcgtcatataccccaagatgctgacagccgacatcatcctgcagtatgtaagggccatgcagaactccatgggcagcaacatagagactctgtataaaatcgtggccgacaaggccgaagcgctggagttcagggtaaggggagattcgcctgtgctggggattccgctggagaagctgaggaccaggaataatctgttggtggcatgcatcaaccgcaacggccgcattatcatgccccgaggcaaggataccctggaggcaggggacacagtcatcattgtgaccacccatacagggcttaatgatttgaaggatatcttaatgtaaaggcgggcgggacgacatgaatcgaagtataatcatttatatgctgggctggatcatgaatatggaagccattttcatgacactgccagttgttacagctgttgtctacagggaaagcattggctttatttatctgggcgttgcggctgtctgcggtctgctgggatttatgtgcaccaggaagaagccatgcacaaagatgttttttgccagggaaggatttgtgacggtttccctggggtggattgtattgagctttttcgggtgcatgccctttgtcataagcggggagattccccatatcattgacgccatgtttgaaatcgtatcaggttttaccactacagggtccagtattattcccaaggtagaggatatgtcacatgccaccctgatgtggagaagcttttcccactggattggcggcatgggaattctggtgttcatcctggcgattctgcccatggcaggggattataacatgcatattatgagggccgagagtccgggcccttccgtgggaaagctggtgcctaaaatccgtattaccgccaaactgctgtactccatctatttttgcatgaccattgtcatgatgatccttttgctgcttggaaaaatgcccttatttgacagcatatgcatgagcttcggggctgccggcacaggaggctttgcctgccgtaattcagggcaggcggattacacggtgtaccagcaggctgtcatcactatttttatgctgctctttggcgtgaacttcaatgtgtactacctgctgctcatacgcaggcccaaggatgcggggcggtgtgaggagctgaggggatatctggctgtggtggccattgccatcctgctcatcaccatcaatatcaggagcctgttcccgtccctgtttatggcattccaccaggcggcgttccaggtttcctccattatcaccacaacgggatactccaccattgattacaacagctggccggagttttccaaaacaatcctgctgctcatcatgtttatcggcgcctgtgccggcagtacgggcggaggcatgaaggtatcccgtgtcatgattgcgtttaaggaaataaaaaaggagatggcatcggttatccacccccgcagcgtaaaggtgctgaagtttgagggaaagcctctggagcataataccctcaggtcccttaacgcttatattattgtgtatttcatgatattcggcatatccaccctgattgtgagtctggacaattatgattttatgacatccttctccgcagtggccgccaacttaaacaacattggtccaggaatgtctgtggtgggtccggcatccaactattccatgatgtcctatctgtccaagaccgtgctcatatttgatatgctggccggaaggctggagctgttccccatgctggttcttctgtctccgggaacctggaaacgcagttgagatttgtgaaaaacaagtgaaaaaacagtgacttttattgacgaatccggaccggcggggtatgatttccataagaaatttatgatggtacgcctttggcgtgtatggaaatcaccgtgaaggaggagacggattggtaagatgtacaaagggtttaaaaggcataaagggcgccggcgccctgattctggcgttctccctgacgtttgcgtatccggctgtatcatgggccgttgagacggaggcttcggaaggcacagtcacctatggaccgggaagctatgtcgttggcgaggatattttgccgggagaatatgcggtttttacggaggacacatcggaacagaacgcctattccacctgtaccattactttatataaggatgatacggatgagcggcgcattggaaccttccagtttcagcaccacggactgattaccctttacaaaggacagcatctggtaatcacaaaagggtacgcggtggaggcagaccgggcgggcattaccctgggaaccaccggtatgtacaaggctggccgggatatggaaccgggcacataccgcattacgccccttacctttggcagcgggtattacgccctttataacgacgtgagatattattatgattatatagatgaatacgccgcgctgtttgagccggtcacggtcaacatcgcagaggggcagtatctggagctttttgatgccgggtcaatcgagcgggtgtctgactgaatgaggcccgtaaaagtgacaaaaaaatgacaaaaaaatatggaaattccggttgacatcggaaaaggaaaatgctatgatataccagtatgccgcacagcggggttgtaagagtctgccagtattccacggaagaaagcaggtcaccgaagctggcgagtaatgataataggaggtgcctttcatgtacgcgattatagcaacaggcggaaagcagtacaaggtagcagaaggcgatgtcattaaggtagagagactgggcgcaggcgcaggcgagaccgtaacatttgaccaggtgctggttgtaaataacggcgagctgcagattggatgcccaaccgtttccggcgcaactgttacagcaacagttgagaaggaaggtaaggctaaaaaagtgatcgtttacaagtataagagaaaaactggctatcacaagaagaacggccatagacagctctatacccaggtgaagattgaaaaaatcaacgcttaattgtaaatgatatgattaaagcaaccgtattcaagaattccacagattcaggcaatgctgtttacacagggattgtgatggagggacatgccggttatgccgatgagggtgaggatatcatctgtgcggcggtttcggctctggctcttaactttttcaattcagtggaggcatttacggaagatggatttgaaggcggggcgggagagagcggttcgtttgaattccgtttcacttcagatataagtcctgaatcaaaactcctgatgaactctcttattctgggacttcagaatattgagagggattatgggaaatcatatattaacgtgaagtttaaggaggtgtaacacatgttaaagatgaaccttcagttattcgctcataagaaaggtgttggttctaccaagaacggtagagactccgaggccaagagacttggcgctaagagagccgacggacagttcgtactggctggcaacattctgtacagacagcgcggaacccacattcatcctggcaacaacgtaggcaggggtggcgatgataccttatttgctttagtagacggagttgttaagtttgaaagaaagggcagagacagaaagcaggtttctgtatacccaagggcaatcaacgaataatttcgaagggctccatacttagcgtatggggctctttttcacaccacaggaggtactgtgtatgtttgccgatagcgcaaaaatatttattaaatccggtaagggcggagacggccatgtgtccttcagacgcgagctgtatgttcccaatggcggtcctgacggaggtgacggcggccgtggaggcgatgtcattttccaggtagacaaaggaaaaaataccctggtagatttcaggcatgtgcgtaagtatattgcaaaggatggccaggagggcggaaagaaacgctgccatggagcggatgccgatgacctgattgtgaaggtgcctgagggaaccgtgcttaaagatttcgagacgggtaaggtcattgccgacatgtcaggtgacaaccagagggaagtcatcttaaggggcggcaggggcggtcttggaaatatgcactttgcaacatcgaccatgcaggtgcccaagtacgcgcagcccgggcagcccggtgccgagctgtgggtgcagttggagcttaaggtcattgcggacgtgggcctggtgggctttcctaatgtgggaaaatccacgctgctgtctgttgtcagcaacgcaaagccggagatagccaattaccattttaccaccctgaatccccatttgggcgtggtggacctgggagacggagccggatttgtcatggctgatattccgggcctgattgaaggcgcctctgaaggcatcggcctgggacatgcgttcttaaagcatattgagcgcaccaaggtcctggtccatgtggtggacggagcttccgtggagggcagggatcctctggaggacataaggaccattaaccgggagctggaagcctataatccggagctgttaaagcgtccccaggtgattgccgccaacaagatggatgcggtgtatgcagaagaagacactgagattatacttgacgagctgagaaacgaattcgagccaaagggaatcagggtgttccccatatccgctgtcagcagacagggagtgaaggagcttctgtaccatatcaatgaccttcttaaaacagtggatgatgcgcctgttgtgtttgagaaggaattcgaggtccagtaccagggcgacagaaacctgccttatacggttaccagggcggatgacggcgcttatgtggtggaaggtcccagaatcgacaagatgcttggatacaccaatctggattctgagaagggatttgatttcttccagaagttccttaagaatacgggagttctggacgacctggagaaggctggcatagaggaaggcgatacggtccgtatgtatgggctggagtttgattattacaaatagaaggagttattatgacaagcaagcagagagcctatttaaaaggcctggctatgaacatcgatcctgtgttccagattggtaaatccagccttacgcctgagattacccaggccgtggacgaggcactggaagcaagggaactgattaaggtgacagtgctgaaaaattgtctggacgacggcggttccatcgcggatgtccttgcagagcgcacacactcacaggtggtacaggtcattggcaggaaaatcgttctttaccgtcctgccaaagaggaaaagaaacgtaagattgtgctgccggagaaatagacaggcaggtatccggtaaaggtatgtgaagaagggatttgtttggcaaaaataggaatattgggcggcacctttgaccccatccacaatggtcatctgcggctgggcagggaagcttatgagcagtttggactggatgcagtctggttcatgcccacaggaaatccgccccataaaaaagatcataaaatcactgagggagagatgcgtgagcgtatggttaaactggccattgcagatactccctatttcctgtattcggattttgaactaaggcgtaagggtaatacctacaccgcccagaccctgtccctgctgcgtgaggaatatagggaggacgtgttctatttcatcataggagcagattccctgtatcagatcgaacagtggttccacccggagctggtcatgaagctggcagtgcttctggtggccgggcgtgcctatcatgatgaccaccagccctttgacaggcagattgaatacctgactgccaggtatggggcaaagatttaccccatccgctgccgtgagatggatgtgtcctcggaggaaataagggcatccgtgtctgacggacattccatccatggatttgtgccggatgcagtggaagaatatattaaggaccatggactgtacggtggcggcgtcaagaccccggtcctggccggcaaaggagaatgaatgtatggaaaaccaatgcagccagattatgttatacaggaaaagccttaagagaaagctggcgcccatgcgctacgagcattctctcagcgtgtcatacacctgcatgaacctggccatgcgttacggctgcagcctggacaaggcagagctggccggactgatgcatgactgcgggaagcggtattcggatgatatcatattgaagaaatgcctgaaacatggtctggaagtgacggacgcggagtacaaggccctgcctgtgctccatgcaaaatacggggcatggctggcggagcacaagtaccagattacggaccgggaaatactggatgccatcggctgccacaccacaggccggccggagatgacgactctggataaaatcctctatatagcggattatatagaacccaggcgctacaaggccgataatctgccaatgataaggcggatggcgtatgaggatctggatgagaccatgtatgccatattggcgggaactttagattacctggaaaaaaagggcggaagtattgaccccatgacagcccaggcatatgaatattttaagaaagtgaagggagaacgcgatgaactcaaaggaaatggtgaaactggcatatcaggctctcagcgataaaaagggagaggacattaaaattattgacatccagtccgtatcagttctggcagattattttataatcgctgacggcagcaaccccaatcaggtgcaggccatggctgataatgtggaggaaattctggaaaaggcaggctgcgagtgcaagcagattgaaggctaccagaacgcaaactggattctgatggattacaaggatgtgatagtccatatcttctgcagggaagacagattgttctatgatttggagcgaatctggagagatggaaagacatttgtggatgtaaatgagctgtaatgtgtaagagttggaaatgaatgaaaatgaattaaatccaatgagggacggatatatgaggtctggaatgataagaccttcgtatatccgttttttatatataagtgatactgttttctcctgttttcaatcaaatatgttaagcgaaaaacgacagatgtttatgttatgctataaaacgaagggagacaaatgaaatataaacagggctaatagaataaggccaataaaaataagaccggttttgctttttacaataatttaattattaggagaaaaaggtaatgagagtaaatatgttagaggaaacgattattgaagaagtaacaaagattataaaagttgctgagactaaaataatgaaagaaatgagcattcaatatttggcggattcgctgtgctacagtgaacagcaggttagattagtgtttaagatagctgcaggccagacaattggccaatatttaaaaagacgatacttaacacaaatatatctaactataggtagtgatgcatacaataagttgaagagaacagctgctgtcatgggatgcaggcgctataagcaaaaaatggagcatttctttggtaaagaaattgatgatgacaaactgcaaagacctcttacaacagaacaaatgagaataaatctgtttgatttggaaaacagcccatatgtagacagatggcttaaagagaaaatatgcggcaaaagacaacgggtggatattggcaatgatgtgaccaggctattactcttggatgagaataaccggatgccttatgattatgaccattgttattttaggcataagggccgtctctttattattgattcacgcttggcagttgatatgccgtataataatagtctttggattatgggaatggaattttgtatttacaaaacagagcaggcagagaacagatatgttttccaaataataaaaaaatttatggaaaatggtaccgtaaagaatatgaaaaaggaagatagtggaatacaggtccaggagctcagctatttctatgcacataaaaacaaatcgttccgtattgtgaatatcattgacggctcagatatggttggagaggcgctgacaacgctgatgataaaagaagaatacattatactggaatcaggtaaacttttcttcttattagataagtaatagtatgtatgctcatgtctctgagggcatagagatgaatcttaaaaacaggaactgcggtgtaaggataacaatacaccagcggttcctgtttgtgcagttgcagcagtgtgtgatagcggtatataacagtaacagatccggaatatattatgcctataaatcgttaggcctgctatatcatgatgcaaaagacacatcatccctgccgctacatcatacgaaccaggccaatgaccttgccaagaatctctacggtttccgtgatgataggctccatggcatcgttctccggctggaggcggtaatgtccgttctccttataaaaacgcttgaccgtggctgaatcatccaccagggccacaacaatctccccgtttgccgcagtgggacactgctccacaatcagcttgtcgccgggcaggattccggcgccaatcatgctttcgcccttaaccttcagcatgaacgtctcagagttgggaagaatctctgccgggaatgggaaatagtcctcaatccgctcttctgcaagaatgggttctccggctgctacggttccgacgagagggatattcaccatctctctgcggttaaaattaaaggtgtcgtccaaaatctcaatggtccttggtttggtggggtcacgccgtatgtagcccttatcctccagagcggacagatgggagtgaacggaagaggtggactttaaatgtactgcctcgcaaatctcccgcacagccggcggatatcccttctgtaaaatagtctctttgatgtattctaaaatctcctgctgcttagaagtaattttatcctgtgccataatcaacctcctgcgttttctatatttatagtaacatatgttcggtaaaaatgcaaacctttgttcgattttttgccgggaacacttgacaaacatttgttctggtagtatagtatgaatatacaaaagaacagacgttctgtattgcgcgcaagaaggaaccgccttagggaggttaccatatgagagtgagaaagagaaggttgtcagctacatgttttacggttttactgtttgtttccattattatgggacgtaccatgtttacttccatggccaaggaggaggggagcaggaccactccctattataaaagcgtccgcatccaggaaggggacagtctttgggggattgcccgtcagtacagggaaggcagttccatgagcatggatgagtatgtgaatcagctcaggcagatgaacggccttaagaaggataccatccatacagggcagtatctgaccgtagtatattttgagtaaacaggattagcttctgtacatataatatgatagtacgagatacattttaaacctttggagatatccggccagctccaagggtttttatcttttcacggattttctgtatattccggttacatttttgcccgaaaattcccagaagttccaaattatataattttgcagcgttttattgtgcaaaatgatacaaatttctttcttgatgttaagatgctgtgaaaatgcatatcatgagacgtgatatattacacaaattgcagaatgaaatcgtcatggatttgtaacattttcttttttataacatttatattatcaatttataaataatatgtatttgaaattattaaataaggtgtctataataggcaaaagcaaacgagaagagaaagggggttgtttagtatgaacggtttagtggaatcactgatggaagagcttaactgcaatgtggtgttcaccataccgctgtttggcggtattgatgtgatggaatccgtggtagtgacatggatcatcatggcgattatgatgatagcttccctgatactggtccatggcctgaaggtaaggaacataagtaagaaacaggctgctctggagagcggtatgtcttttatctatgatttttttgaagggcttttgggaaaggaaggaaaggcttatataccatatctgattacagtggtgatatacataggaattgccaatatgattggacttcttggcttcaagtcgccaaccaaggatttgaatgtgaccgtttccctggctgttatgagtattgttctggtggaagtggccggcatccgtaagaagggtgtcaggggatggattaaaagctttgcggagcccattgccatcatagcgccaatcaatgtgctggagctgtttatacggccattgtccctgtgcatgcggttgttcggcaacgtgctgggcgccattgttgtcatggcactcatcaagcatttgctgccgttaattgtgccgctgccattcagcttctattttgatatatttgatggagtgatacaggcatatgtattcgtgttcctcacatcactatatataaaagaagccattgaggattaagtttgcagccttatggaaaaagaaaatattgagagaaaaaggagagtcttattatgacaggattaatcgcattaggagcaggtgttgcagttgttacaggtattggagcaggtataggtatcggcttggccacttccaaggcagtggacgctattgcaagacagcctgaggcagacggcaagattacaaaggcacttctgttaggatgcgcccttgctgaggcaaccgccatttacggctttgtcatcggccttttaatcattctgttcttaaaataatttatagcaggaaggcgacttaatatgttaaatttaaacatttggaatgtagcctttacggttattaacctactggttttatatctgtttatgaagcacttcctgattggtccggtgcgcagtatactggatgagaggaagcagatgattgagcacgacctggacgaggcaaagaacagggaaacggaagcgcgtcagatgaaggagcagtatcaggcctccatcggcaatgcagatgaagaagcttcaagaatcatcgaggaagccaggaacagggctgccgcagagtacgagaaggttctggcccaggccagggcagacgctgccaaaaagatggaagaggcagaccgtactattgccctggagcgcgagaaagccatgaatgacctgaaggccggagtggccggtttggccatgacagctgctgccaagctgattagcgagcagagcgcaccggacggcgacaggaacctatacaaccgctttttagcagaatcaggtgaaggaaatgactgagacagccagaacgtatgccattgttctatatgaactgggcataccggaagagatggtcagggaagctgtaaagctgcttaaggagaatccggaacttccggaggtccttaatagcccggtggttcccctgaaaagtaagcatgccgttattgagaaggtgttcagggaaccggaattttccgtactgatggtacgtttcttaaaaaaggcttgtgatgcgggatgcatcggacagacagaggagattgcaaaagcccgtgacgcctatgccagaatggcggcaggtgttatggatgccgagcttcactatgttaccatgccgggtgcggcccagattacaggaatgaaacagtttctgtgcaggaaatataacaaaaaagatgtgaacatccgattggtgaaccagccggacctggtgggcggttttgtcctgaaggccggggatacagaatatgactacagcctgaaggggcagctggtaaggctgggccgggctgtggtaagataggagtcttgatatgagcacaatcagttcccaggaaatcatctccattattaagagtgagattgagaattttgacatgcatgccggacaggaacaggaaactggttctgttatctgggtaggagacggcatagcaattgtatacggcattgaacatgccatgtacggggaaatcgttatatttgaaaatggtgttaagggaatggtccaggatatccgcaggaatgagattggctgtatccttttcggaaaggatacaggagtgggccagggcaccaaggtggtccgcaccaggaaaagggcaggcgtgcctgtgggaagcggattcttaggcagggtggtcaacgctctgggagagcccattgacggactgggctctgtaaaggaagaagattatctcccggtggaggaggaagctcccggtattgtggacaggaaatcagtgggagttcccatggagacaggtattcttgccattgactccatgtttcccataggccgcggccagagagaattaatcattggagaccggcagaccggtaagacctccattgccatggataccatactgaaccagaagggcaaggatgtggtctgcatctatgtggccattggccagaaagcatccaccgtggcaaagctggtttccacccttaagaagaacgatgccatggattataccattgtcatgtcgtccacggccagtgaggcagcgccccttcagtacatagcaccctatgccgggactgccatggctgaatattttatgcatcaggggaaggacgttctgattatttacgatgacctgtccaagcacgcagtggcctacagggcattgtccctgctgttagagcgttctccgggccgtgaggcttatccgggcgacgtgttctatcttcattcacgtcttctggaacgttccagcagactttgtgatgaaaagggaggcggctccattacagcccttcccatcattgagacacaggcaggggatgtatcggcctatatccctaccaatgttatatctattacagacggtcagatattcctggaaagcgacctgtttttctccggcatgaggccggctgtgaacgtgggactttccgtgtcacgtgtaggcggtgcagcccagacaaaggccatgaagaaggcatcgggaagtatccgtatcgacctggcgcagtaccgggagatggaggtattcacccagttcagttctgatctggatgaggctaccaaggagcagctggcttacggaaagcggcttatggagctgcttaagcagcctctgggaaggcccctcagcttgcatgaacaggtcattaccctctgcgcggcgacccacaaggtcatgctttccgtagaggtttcggatattaaggaattccagatgaacatgctggcctggtttgatgaaaagcatccggagattggaaaagaaatcgaggagaccaaggtcctgggcgatgacttgataaaccgtattgtggatgctgcaaaccagtataagacaaaccaatataaggcgtccgtctgaccaggaagaaggagttaatatggcaaatgcaagagaaatcctaagccgtatgaaaagcgtccaggatacccggaagattaccaatgccatgtacctgatttcctccaccaagcttaagaaaagcaagaaacttctggaggaaacagagccttacttctatagccttcaggatttgatacgccgtatcctgcgccatatgccggatgtggagcatttttacttcaatcccaggaaggaaatcaaggaggaggacagggtaaaggggctgattgtcattaccggcgataagggattggcaggcgcttacaaccataatgtgctgaagatggcccatgagtggatggaacagagtaagaaccaccggctttatgtggtgggagaactgggacgccattattttgaggccagacatgtccaggtggaggagcagttccattacacggtacagaatcccaccatgcatcgcgcccgtctgatttcctctactatattggaggattacgaggaaggacgtctggatgaggtttggattatatatacgcagatgatgaacagcatgcagatggaagcggagatgacagagcttcttccccttaaacgtgaggatttcagcaatatcgttatccctgcggatatcatccaggaggagatacagatggtgccttcccccagcgccgtcatggaccatgtggtccccaactatgtgaccggattcatattcggtgccctggtggagtccttctgcagcgagcagaatgccaggatgatggccatgcagtctgccagcgacaatgccaacgcaattttaaatgacttgtctatagagtacaaccgtgtgaggcaggcggctattacccaggaaatcacagaggtaatcagcggtgcaaaggcacaaaaaaagaaacaatcgtaaattcgtaaatataaaaggaggcagccatgagcaagggaaaaattatacaggtcatgggacctgtagttgacgtggcttttgaggatgatggacttccccatatcaaggatgccctggtggtggataatcagggtaagaagtgcgtcatggaagtggcccagcatgtaggcggcaatgtggtgcgctgcattatgctggcatccagcgacggcctgtgcaaggatatggaagtggagccaacaggcgccggtattcaggttcctgtaggcgagaagaccctggggcgtctcttcaacgtattgggcgagaccattgacggaggagagagcctggaaggcgaggataagtgggtcatccacagggacccgccgtcttttgaggaccagagccctgttgtggagatgttggagactggtattaaggtaattgatttgctggccccctatgccaagggaggaaaaataggtctctttggcggcgcaggtgtgggcaagaccgtactgatacaggagctgataaccaatatagcaacggaacacggcggatactccattttcacgggcgtgggagagcgttcccgtgagggaaatgacctgtggaccgagatgagggagtcaggggtgctggaaaagacagccctggtattcggacagatgaatgaacctccgggggcccgtatgcgcgtggccgagacaggactgaccatggctgagtacttcagagatgtggagcatcagaacgtacttctgtttattgacaacatattccgttttgtccaggccggttccgaggtatccgccctgttggggcgtatgccttcggctgtgggatatcagcctaccctggccactgaggtgggcgaattacaggaaaggattgcgtccaccaagaatggttccgttacttcggtccaggctgtttatgtgcctgctgatgatttgactgacccggcgcctgctactacctttgcacatctggatgccaccacggtattgtccagaaagattgtggagcagggcatttatccggctgtagaccctctggaatccacctcccgtatcttggaagaggatgtggttgggaaagagcactatgaggtggcaaacaaggtgcagcagatgcttcagaagtataaggagctgcaggacatcattgccattctgggtatggaggagctgtctgaggatgataagctgactgtaaaccgggccagaaagatccagcggtttctatcccagccattccatgtggcggaaaactttaccggtgtacctggtaaatatgtgcctgtaaaagaaacgatccggggattcaaggccatcattgacggcgagatggatgagtacccggaggctgcatttttcaatgtgggtaccattgacgaagttgcggagaaggccaagaccctggagcatcatgaggcttaaccaggactgtctgacgcagaaaggagccgggatatgtctgcattttggctgaaaattgtagccagcgaccacatattttataatggacattgttcatatctggcagtgccagcaccggacggtgagatgggcattatgcctcaccatgaggctatgattctggctatccaggaggggaacctccgttttaaggtgccggaggaaacagaatggcatcaggccattgtgggccgcgggatcctgcaggtggctaataaccgtgtgaccatgattgtggacacagcggagcggcctgaggacattgacgaggtcagagccagggaggcgctggagcgcgcacaagagcagctgcgccagcaactgagcctgagggagttcaagatgtcccaggcatccatggcaagggcgcttaccaggctaaagggaagccatctgaaggaacttaagtgacggaagaatatttatagcagcttgattatagtaatatgtaagatatgatggtaagagaagtataaaggtatggctgtgggactgaaatgtcctacagccattttgaattttgtatgagaaaattgcagaagtccatgacgataggattgtccttgccgagaggagaacacatgaggataatctgacggcggcatacctgatccctgatgggaagcagctttaccggggagtggggagacatggggccccattcgccgcccaatggtccccaggagtactggggccagaatccgatgccaaggccggcagcaatcaggttcctgactgactctgtggtatcactttcaaaaattacgttagggacaaaatccgcctctgaaaagtagctgttgcatatctggcggatgggcctggaaccggccagacatatgtatcccgcattccttgtgtcagccagattgatagaatccttatccccatagggagaatgtgtggggactgccagatacaggtcctcttccagcataaccatgtaatcctcataatcagtattttttaagtctgaccggaccgcagacacgcataaatcatagtccgaatggttttcagcctggtacagctggaaatttacatctggccgcagggccctgtaggcaataatccggttggtaatcagggtggaggccgccaaaagctttaaatggatggtatggctggacatgtactggtcggctctcagttcgccgggaatccggtccagggcgcttacaatgggaatcagccgcttttgaagaaggcgtccggcttcattcagttccacacttctgctttttctctcaaagagcggcacacccagctctgcctctaaccggtggatggcctgagagagggccggctgtgctatctgaagatgttcggccgccttagtcatatgctggtattcagcggctgtcaaaaaatatcgtaattgcagtaattccatatgtcacctcagagatatgattttacgaacaggggagccccgcccgggtatccgactattatataacagaattcaaaaaaatgcattcgaattttaaatgagaaaaaaactcaatacaatag

SEQ ID NO: 3308 - DNA, 3569 bp, Unknown
  gut microbiota DNA sequence
gtctgaaaataatatttttataataatagtaattattattgattttatggaatttatatgatacaatacaaatatcttacatattatcaattatacgtggtaaaatcaaactatagccgaaaaggcaaaagaaacacaggaggggtacattttatggattcaaaagcattttttaaattaagttacggtgtttacattatttccaccagcgcagacaacaaggaaggcggctgtgtcatcaacacactgacccaggtcacatcttctcccgccaggttatccattgctctcaacaaggaaaactatacgctgaagctgatagaaacatccggcaccttttccgcagcggtactttccgacgatgtggaaatggacctgattagacgtttcggcttccagtgcggcaaggatgtaaagaaatatgacggcattccacagggacgggacagcctgaataatccatatcccacagaaggtgtctgtgcccgtttcacctgccgtgttgtatcctccatggatgtgggctcccatatgattatagtgggcgaggtagtggaagcagaagtcctggattcccagacaccggcgctcacctattccaattaccatctgaagaaaaacgggaccactccgccaaaggctccttcctatcaggcagacacaaaagaggttacgggatggcgctgttctgtttgcggatatattctggagtccgagacattgccgcctgactttatctgtccggtctgcggcaaggatgccagctattttgtaaaactgtagcccccttattgttccattatctgaaccattgcaaaatacccctgaaaacagctgattcatacccataagctgttttcaggggtatttttatgtccttgggatatatcctacttctgaccggatttattcctggcccggttttcttctttatcattggtaacattgccgtccccgctgaccggtatggcatctcccagataggtgggcttaggcattacaatggtataaatcaaatccttgggcctggccagcagttctcttaagtccctcattttctggccgccgtactgcctgggatctgactctacgccgtatgcctccatccccatggcctgcgccacataaagagcccggtacatgtgatagcgctgcgtaactataataatcttcttcacctggaaaatatccctggcccggtacatgctctcataggtggagaagcccgcgtggtccataaaaatatccccggaaggaatgccctcatcaatggcatactgcttcatccggtttacctcgtcatagttcttgcgcccatggtccccgctcatgagaaggcggtcggacacaccgtcctcatacagctctattcccttgtccagcctgtcccgaagcatgccggaaggcgtaccgtccggcctgacactgcagcccagaaccatgatacagtccacatctccaagagctgccgcatcatctgcactgatgatattcggtttttccttcctgatcatgtacagatttatcaggaacaggaacaggcatcctgccagtcccaataccagaagtatcttaaccgcttttttcagaatcgcttttttatccattccactcttccttctcttacggagcgccgacggggtcaaaaaagccgctcttcccggcaaaatgcagagatttgcggcttttaatgcgtatgtcaggtcaatccttatttaacagcaattgcctcgatttcacacagaacgccctttggaagggtcttaactgccacacagctcctggctggtttggatgtgaaatacttagcatatacttcgttaaatgttgcaaaatcgcccatatctgccaggaagcaggtggtcttaaataccttgtcaaagccgctgcctgctgcttccaggatggcgccaacgttcttgcagctctgctcagcctgtcctgcaatgtcctctgcaacgctgccgtctgccggatttaccggtatctgaccagatgtgtagataactccattaacctcaaatccctgggagtatggtccgattgcgcctggtgccttttctgtgctgattacgttcattttaaatcctccttgttcttaggggaaatgcccgtacaatatgtattccccattatattgattttcattctcacgcgacatgcgcgaaccccaaagttattatatcggattattggaaatgttgcaaggtaaggctggaattcttctttgtattttttgcaatactgaaaaattgtggctgtacataaagaaacaaaaaataaatgaacttatcagacgcatgcgtcagatgcctccatgtccctcctgcttctgccccagatgggcaagcaaatactccttggtattcctctgaggttcctccaataccatatctaaaagcctggccagcgtattgcccacttccctgcccggcttcacccctgctcccataatgtcatggcccgagacagccagggtcttcaggctgatgcagtccctgttactgcggatttcctctgtcaggtccctgacctgacacagccactgggattccctgtcatcggatgcatcctcagatagacacatcttaagcgtgagcaaatcatcaaacagttccggctccatctggctcatggcacggcggatggatgccctggagggctccggctgctttgcgatttccttcatgccttcctccttgccatgcttcaagcagtcttcccccccatcctcagctccaacctttttgccctgccactccaccagggttcttaccctgtaggaggtatcgttgtccagctttaaatccttaagtatgcccgctgcctgggaagcgctgcactcccgcaaaaaggcggcccagcgcatatgctttacagccggaactccggccggaatagacggcacagcccagtcccctgaatccgcggcataagccccgtgaaatttctctgacacaaagggactgatacccgtctcatacaccagcgagatataatccggatgggaactcagaagaagcttggtcagctccacctgaatccgttccttactcacatggaccatgttaggcgcaattaccttaatagcctcataggtgcgctcctctatggagaatcccaattgggccgaaaaacggatagcccggaggattctgagagcatcctccgtaaagcggtccatgggttcccccacgcaccggatgatgcccttctccaaatcctccacacctccgaatttatccacaaatcccgtatgactgttataagccattgcattgatggtaaaatcccggcgttttaaatcctccaccaaatccggagtgaactccacgctgttgggatggcgtccgtcagagtactctccgtcaatgcggtaagtagttacttcatacccttccttccccatcatcacagtcacggtgccgtgctgtatgccggtatccacagtgcgccggaatacctcctttacctgctccggcagagcgctggtggtaatatcccagtcccccggctccctgcccaaaagcatatccctgacgcatccgcctaccacgtatgcctcgtat

SEQ ID NO: 3309 - DNA, 1595 bp, Unknown
  gut microbiota DNA sequence
ccaccttcatccgttcagccccatacatgataaacccaatcaatgaacaaacaatcaaattgccggctgtaaagaggctgttaaacacattttcccttttcctgaaaacaaaccatatcaccacggttgaaagaattaacaatcccccaaaaatatatccggtattcacccgcatctgcagccattcactcttaaaacacaatatggcgatcgtcatagcccatataaaactattataaacaatcttaaatagcttcatcatatcaatcggttactttgccagacggaaaacaacggttacctgagtaccatcctctggcagcacatccttatccccataaaacttggcaacatcattctgtgtggttccagtaggccatgcagcatcgctcacaataccagttgcacagctgtccagacagagcacacatcctgtattattttccttggcgctctcaatatttcctccaaaccgcagatccatggtatagtcttctgtacatttaatgatatcccggaatggaatttcatcctgaccatcccatttcacaaagacatccagcttatcaccttctacagattttccattatctggccctgctttcatgtctgctgcggttaaattatcaccggctttggccccgatatcaagcaatgcctgataaaactccttctcatcagccagcccccgcaaaacagccttttctccgttggaaccacctttatatacaataccatgtctggttggttctgtaaaatatgtaccatttacttcacagagcatgacgatttctttcttatctttatcaactgtcatggtttcctctgcttccgtctcctgggccttactttccactgtgttgctttttcctccgcaggctgcaagtgaacataccattgttgctgctgctataattgctgctaatttcttcaatttcatcacgaaacctccatagttgattagatattatctgcaacatccgcatattaattcgaattctttttcttttgcttttccacatataactgcctgaacaaaacaatgagcgctgacagcgcaaacagcagaagaagcgcagtgacaaacatcttagcgccaccagtcagcatcccgccaacatatgaataaattatagtggctggaagctgtccaataccagtggcaatgaaaaagctgccaaatgacatggatgtcaggccagccgcatagcttacgatatcaaaggaaataaacggcagcagtcttgcaatgagtatgctgagacgcccatgtttttcaaaaaactcatcaatctgcttcaaaccggttctgcttgtaagtttctctactgcatcacgccccaacagccttgcgatatagaagcatactgccgcccctgccatagcgctggaccacgataaaatagctcccttccaccatccaaacagatttgcattcgcaaatgttagcaggaacgcaggcaacggcgctgctatggactgcaatatcatcagcaggaaggacaccaacgctgcataggcgccatacgattcaacaaactgccgtaccacagtaaaatccccgcttgcaaacatcttcagaatgttattcatcg

SEQ ID NO: 3310 - DNA, 248 bp, Unknown
  gut microbiota DNA sequence
ctatgatgtacagtgaagtatccgggttcggaaccgtttgaaattccggattccgtagctgctccgttttaacacctttatcttgttgttaaatccttctgtgggaccatttgtcaatccgtatttaaaggcattcaggatttcttttcgccaggccctgtaggtcttagcacaggcctcaaattccttaatcccacagctctgtgcattcgcaatccagtcatcaaattccctctgctgctgacgat

SEQ ID NO: 3311 - DNA, 622 bp, Unknown
  gut microbiota DNA sequence
ggtcacacccacgcctgacagggccacatccccgccctcgctgccgtttgtcagggtaaagttcttgctcttgagccctaggtcattggaattggttgcggcagtgatggtgcctacatttgtctttgtcagtttatcaggtgcaaggtctttacacgcatcgttaatggcagcatagcccggatgcttcagttcgatgtactggccgggctggtcgtttaacggcgtagttccgtcctctttcagccatacactgttggctgaggtgctgttttcgctgacctggcccttaaaaattctgtcatttccgtcatcgtccgtaaccgtagctgtgataatccatgcggcaggttccgtatccgtggctgcctggagcgtcattttatagctcaccttgcccgaagccgtgaatttaggctctgtactggtgctggaaggttttagccctccaaatatgccgtccttgatgtccgtagcatccgtaaatttctggacgcctgccttgattccgaagttctcgcctaacagttcctcccccgtaaggctggtcttaaatatcttgtcagccggaaccgctgttattgtgaaatcccctgccgggtgggcctttccgttattggcc

SEQ ID NO: 3312 - DNA, 1122 bp, Unknown
  gut microbiota DNA sequence
tggactttgccgtctccgtacacagctcagccaaagcgtctaccacgttctcatccacaatcaggcgtttgtctgccacacaggcctgaccgtttccaactgtgaacctgcctttaatcagtccctctgccaccaggttcagatctgcatccctgcatacgattacagggtcatttcctcccagctccagggaaagatgttttaaatatttggcagaacgctccataatcttcttacccactgtgctgcttcctgtaaatgtgatcatcggcacatccggatggtccactaaggcattacctgcctcctcgccatatccggtaaccatgtgaaacgcttcttttggaacaccagcttccaggaacagattccctaccttcaggcatgccagaggacaatcctcggacaacttcagtataacggaattacctgcgcaaagggccccgcccagcttatacgccatcatctccagaggaaaattaaaaggaatgatacctgccaccacacctcttggctggcggtaaaccatggccatctgacctgcacagtctttcatggcatccatagggtatgtagttccctgagggtccttcccccggtctgacagggtccgtatgatctcagccatcttatcaatctcaaaatcagcccagtagtgggtcttaccattctctgcaatcagaatatcccttatctcatcatgatggacgtctatcaaatccgctgctttcagcagatatgcgcttctctctctggcagagatacccctgtttatctcgtatcccttaagggctgcctgcacagcttcctccacatcctccaccctaccgcggggaaccgtatcaattatttcactgtttgatggatttaagatttcaatgacttccccactttttgcatcacaccaggaaccgttaatcagcatcttcatgatcctacctcctaatttgtaacatatcatacaagttgggcctaaaaataagacattcatacttaaataaccccgctttaagttctccggattcacccgattgcccatagttgtatgatatgttatctgtttgtttatagaatactactattttatttccatgtcaatcctgttttttgtattttttcact

SEQ ID NO: 3313 - DNA, 7507 bp, Unknown
  gut microbiota DNA sequence
cataatatcgtattccacaacgctgtttccctttgcgctaataccagtttttgtaccggcttgggtattttcactaagttcctctaaattgctatctatgctatcttttacctgcttaaggtacgcgctggatgggaccgtatttgcagccgtggactccacctgtacgatggcagtttttttaagataatccgccaatttcgtggtaagggctgtattgcttaccagctccagagcaaccttacgggccagcgcatccagcagggcctgggcattactgtccgctccggcagccacgacaagcccctgtgtatctgttgccttaacggatgttgccgtaccgtcaaatccccccattcccgcagcaatatcctccgccgctttcgcacttgcagccgcatctgccgcgctcccggatgcggcggacgcagagtccgccgccgcggatgcagaccccgctgaggccgtggcagatgcctgggcagatacctttgcggcattggccgcctgcagggtcgtattggcctctgtgatggctttctgtacctcctccgatgccttagtggctttctggctcgctccgttggcagtagtcactgcctcatccacatgggttgtattagtctcaacctcatcgttgaccttctcggccagggatatcatactttcccgaacatccctcccatacactgcagcccggaaatcattaatctctttactgatatcggccattgtttatcacctctttcttctttccttgttaaacggtctatccgcttctgctgggcctgtattgcaccggtcagaagggcaatgtaattcatataagggatacagtaatacccatccttatctatggatgtcaatggcaggtcaattcccagctgtttctgcagcttctccacgtcctgggccacaaatcccatcatcggttccccagtctctttcattacatatatttgggggttcagcccaagtaccagtgccagagcctgcccatcctttaaaggtcgtattcttttcttctttcgccggtcagacgtctcatagaatgacccgtggaaatcacccatgaaactgccgtggacatagctgcctgtactatacataccacctatgttaaacgatgctccgctggccattatttggtccgcaacccggagcgtattgacattaatcaggttggctcccaccgttgtattattacttgtaccgtcaagagtaagaacgcctccagatgtcagcttgaatcctggcagcgtgatactgcctgatgtcatgttgatgttaccatcattgattgttataccattcttattgaaacgcgccagttcctttccgtcaacatttcggattatcaggacaccatccttaccaggtccggtacctccaagctccaacgtccctccacggattcggtccgccagcatctgaccggcagtgataaaatcagccaccaggttcccgtctatggtccatgcattcttatacggcccattgattccggttgtcgaaaagccgatgccgttctgattgaactggattacatttgtagcggtctccttatccggcgtgttcatgatgaggatacgccacggtgtggtcgtattcccagtatcaggctctatgttgtcaatgacgacatagcctcccttacctcccattatgagctgtgtggcattctccaccctgcggttaatctcctgagccgcatcttctgccactttctcaatgcgctcagatacagctgtctggttcttgaccgtggtgccggtcaaggtctcagtctgccgccccagtgtgatactaccctggccagggtcaagcagattgacttctctccgtgtaagcaggaacttctgattgattccatgaggtccgctggatacatccgtccagaatcctaattgaaattgttgtacggtgctgtctatggctgccaggtccacagcagatacttccattgaggcaggaagggttgaagcctctttgaggtattccctggccttagcaagtaatataccaggttccgtcacgtcgtcccatttctgatatccccatattctcccgtacagctccacggcttccgcgttctcgatgtagtctacacctccattaacggatgtgatatccactgccctggactgtgtctcccctgactcatccttgtactccacatctgccccctggggaatcagacatgttataatctgcgtggcatcaacatagtgtgtcaaatccagcaggttctccccgaaccggattacctggctgttaatcccgccataatcccacagatagtccaaataacgcactcctgcctcatgcctgatacggagatagcccccaaacgattccggcaactgcctcaatagtgtgagcgtgtctgaaaagccctggacggtccactctttgtatccgccatccccactcaccactatattacctttttttatctgccggcgggcgtccacctggctgttatgtacgtcaagaagctgtcttatgtatccgtctatccctccggtatacgtaaaggggcgttgctgactatccagaagatacgtcagctctccctcacaggtaatcgcgaccatattatcaaagtcttgttccggtctccacatccggccacagaatacacatgcgccatcatcataaacaatcacctcagacgtcaggactttcaattgcttatagtatggatgccctttgtacacccggaatgtgaaagagccggcgcttcccatctcctgggcaagcactggctcaaatatccggagcgtatcatcaagcggctcgtatatggggtattctccattcatgttttttacatatacccgatacatttacaatattcctcccctgtacgatatggtaaccgtcccggtcccggtgaacatgagcacgttctccccttcctttataacgatgtcgtatatcttattcgttccttgtttcagttcatagtccttgccgtcatagctcaccgtcatagcagctgataccgtaatttcaggaataacccatctctgcgtgcctgggacgttaagggacaggctgccattcacctccagttccttataatcacggattacccctttctcgaaggagaatgaatcccataaccagtcctcgtctgacgccgtaagctcatacttataagggtcagcattcacgctgatggtgaaggtccccagggtccttgctctggaatattcagatactgtcatgcgcccggcataatagtacatcgggtcatcatcgaatatcagttttccttccctgccgtggaaatttcgtaagatttccgaaaacacctccggccacttgtccatggagtacccgcatccaaaattaagagtaattaccctccgctcatatataatccggcccgcaatcgctgtggagaggtccagggagccgtcggcccccggaacatcctgatagattgtctttggcactggcggctgaacacaatgtctgtttgccagtgccatcccataggttgacagcatgtcaatgccgtttatgctcacgctttgatgtatcatcctatccgctccttaagggcctgtacctggcccaatttccggtccatttgtcccgcggtcttgcccaccagggccttcccgtccatcatgacatacttttgggaagcaatgtcaggaagatatgcctccaacagggaaatgacccgctgtgtgactccgctgttctgttccccgccgcctgacatatccatggtcatgacgtccatactcccggccagggctgccatctggtctgttacgcgccacatgttccctcttataccttcttccaatccctgcatcatatgaggcatccattcctcgtaatagcggagcggccctttttccggccgggtgaaatgcagataatcagagaccgtgcccgccacactccggcaggcttccgctatttcagaagttttactcttaatcccagcgacaaaacctttcatcatatctcctgaccaggtttcagccaatggggtaagtccctccattatagattgcgttttattggccacatctgtcatcgcatcaacgacttcgcccttcccgccatcaattccctctgccagttttcttgcgtattcccctccagccgaccgatatccgtcattactttctgcggcagccgcaagagagttctttcccactgtctcccttataacatcaggtagtctatctagttcttccttacttcggtcaaccaataccttcatttggtcaacatctgcctgcactacacccggcgctcctgcctctacagctgctcgcatagcctggtatttgtcagtaaagtcttgcacctgtcgctgcaaggatgcctctgttgatgattccgccgtctgaaaactattgcttgccattaatacagcatcagccaatagttcttgattatcctttgccgcaatcagcatatcctgattgctcataacagtcttatatccgacataagctgtttctgcgtccagcagtgtctggtccaattcagacagtttagcctcgtatcctttagtagtttccgatgcttcctttactttctcagcaagatatgccgattcgttggaaagtccaagcatgtgaacaattccgctttctcgtagagcattgaggtcttcttgaagtaacgcttcccgacgttgcgactcctctaattttttggttgtttcttctacatccttttgtgcatcattgtatttcatgaatgcatctgtcctattttttagtgcttcggcgtaagcttctgcattagcatccattaacgcatttgcctgtttcttgagaatcaagtcgtcaatactgtcacacatatctttgtagttctgtatctgatttccagtcaactcatattcctgccctagagccgttgataattctcccagaatatactttgcccgttcttcgtagcccgcttttacatttccattctcatccgtaatttcctgcagtttgctaaacagctcatgctcctttgttgcttccgcttccacactattaacagcatccatacgactttggttcatgagctcatatgagctgtataattcatctatcatctccttatggtgctgttcctggtcagtaagctctacggctttatcataatattctttggttctctctttcgcgtcatatgctgcataagcaattgctcccagggcagccgcggtcaacattatgggtccccccgccgccgataatccagccagcatgggaccaagcgcagtcactgcactcattaccgctccgatacctgttgataccttcccaatagcaatcaataaaggccctattgcggccacaatcagtccaaccgtaatgacagtctgcttctgtgaatcctccagtttattaaaccagtccgtccactgctgtatctttgccacaagcgcccgtattttaggtatcagcgcgtcaccaatcgcgattgctgcctcctgcagctggcttttgaggatggtcagctgtccgttgagattgtcctgcatggtttccgccatatcctccgccgcgccctctgagttggctatggcatccgacagtttcttgtagtcatcctcgctggcattgataatagccagcataccgctcatggcctccttgccaaacagggttgccgccgctgcggactgctgctcctgggtaagcccttcaatggcttgggtccccagagcaagggcaaggttctgggctacctgtgctttgttggtctttttggtcaccttgattcccagtttgtccattgcctgtttcttaaactgtgcctcagacatgtcctttatctgctcctggccagcatacatggcaagctgaaaatacttttcttcctctgataatcccttaagcgtgtccccgtacccatctgcaacggcctgctgttccagggtggccagacgctgggccttctgttcctccgtggttacagcaaaggattcacgcagaatcttcaatgtttcatccagggacttcatggttccgtcctcattggcaatctcaatccccaactccatcatgacgccttccatggcttcggtcggcttgaccatgttggtgatggcacttcttagctgggtaccggcctggctggccttgatgccactgttggccatcagtccgaccgccagggcagtatcttccatggagtatcccagggagccgcagaccggagcgacgtatttaaatgtctctcccatcatttccacgttggtattcgcattgctggaggccgccgccataacatcggccaggcgcccggcatccgctgccgtgtatcccataccggtaagggcgtccgtcacgatatcggatgtggtcgccaggtctgctccggatgcggctgccagattcatgataccgctgataccgttcagcatatcgtctgttttccacccggccatcgccatgtaactcatggcgtctgcggcctcagatgcgctaaatttcgtctctgcgcccatctccctggccttgtcccttaactggtcaaactcctcacctgtggccccgctgatggctgacacattagacatggactcgtcaaagtccgccgtcgtctttactgcggcggcccccacgccggccacagcggccgtgaccggaagcagtttcttcccagcgccttctattttctgtccgacctcctggaacttgtcgccggccgcactaatctgctgcaacgttgtattggccttcccggcctggtcctccagggacttaagctgctgctccgtttcagcaatctccctctgcagggcgtcatactgctccggcgctaccgggttcccgaattcatccgatacttccttagctgatttctggagtgtccttaattcgctggaagttttcttgatttcgtcctgcagggcatcgtacttctcctgtgatatctctccgtttgccagctgcacatcggcgttcctggactgttcttttaggtctcccagtttctttttggtctcatctatctgtttcttgattgggtcatacttttctttccaggcatcgtaattcgaggccgattccgtcacctgcttatttgcctctttcagcgtatccagtttgcccttggtcccctgtaccgcttccgcaaggagcttctgcttctgcctcagcagctctgtgttggtcggatccagtttcagcagtctctccacatccttaagctggccttgtgtgctgctgatttctttattgacgccgtttaatgccttgtttagaccggtggtatccccaccgatttctattgtgattcctttgatacggtctgccacgataccacctcctaaaacttatcaaaatcctcctgggtcgccagatttggatacttataactatcgttctgcgattccgtgaacatgtccaggaccagtccaatggtaagcaggtcaaggtcactgaccgctacccccagctgggccgcccggagcatgaacaagggcgttgtcatttcccggctgctcggcttcgtttttttt

SEQ ID NO: 3314 - DNA, 18820 bp, Unknown
  gut microbiota DNA sequence
atggaaaacgtgttgaactggtccagccactcctccggggtacctggctgtttcgggtcggcatgaagcgccattatgtatgccacattctcaaacagctccaggtcactgatggggacctcctccccttccacggcctttcccaaacgcatcaaatcccggaagatatcccgccggaaccgcgccctgtacaacctcgggatggcagccgatgccttgaacggcaccagcttcccatcaatctctatttccttgcttatcatgtcctgcctccattatgctgggttggatgcggctgtctcatataccttgtcataccaaccggtataggttgcctcatccgttgtgtctccggtccgtgccttaatcctcccatccggaaggggtgtcgcagagatggtcagggtctccgtcaccggctcaatggattcctcttttgtctgagactccacggacggcctggtagcgctgcagttatacaacacatgccggatagccttctcatcaccgtcaaactcaaacaacagggcgaacgcggcctgcttggcatccgcattttcaaccagaaccttctttccatccaaagtctctcccaggacatctgtccggaagctctccggcagcagggccacctccagatctccctcatagccgttattggcggccgcctgatagtaagtgattccgtccgcataaaacttggaaatgtcgccctgcgcgtccagagcaatgctgacggaaccccggatgggtgacggtttggcaaacgtgattgccccgtcctctccggttgtctgtgttgcgtaatgcacgttcttaaggttgtacttgactttattcattgattaatacctccatttcatacagcacctcatacatcttttcagattcaaggtacgcctctgttttctcatagaaaaagccatgctctttcagcacggcttccactcttttttccgcttccaggtcttttatatccgtatacagttccaggtccagtttattgatgccctggtaaacaatcccgtcagcagaaaagttattagtttcagggtacagatacaccagatagggttttcccggttcctgcccttcttcaaaatgatggtaagccgttgaaaagccgactgacttcaccatctggctcacttccttctccgtcattgtgataaccttcccttcagccgtttctcataatccttgacggcctgcttttccgcagggccgatatgcgggattccttccacccgtcctccaccacgtttcgcgtggcccttctccagcagatgggtaagtccaggctttttcttgttgtatatccgaattcctatggatacggcgttttccgtttccacctttgaggcccatccatccttgtaatgcccctttctgctcccgggcccatctggggatgtctttttcagttcctttactgtctcctttgccaccgccctggcctctgcctttgtgtcggctgccacctcagaagcatattcctccatcattttggcaatctcttttcccagagagtcaatccgaattcctgacatggcattactcctttgcggttgcccttattttcacggtctcattcttatactgcacattgtcaatgctggtgatgttataagccttgccccggtggaccagccggtattccttcgtattcatggcgcccaacagcgaatgatatcggaaaacgaacatgattgtgttctgggactgtgtctgcgcggcctcccaatactcggagcctgacaggttgttcatgtaggcatatccacggtaatactctgtccatgacggtatctggttgccgatgtcatcctctgcatacccacttttttcaattaccactaattcccggtatgcccctgcattcatacaatcaccaccttacaacaggttgacacaatacatccccaggatggtatccaccacccggttgacattgttcttgtccacggtcatctgcctgttatcgtacatatcggagacaagtactaggacggcaattgtgatatcctcatgtgtatcaatcgcagcctcattaaggccggtatatcccttcacataatccatggctgccggaaggaggatttccaggtactgcctgtcctcctccgtcaggtatgcctcttccgtccgtatctgccggcagatgtccttaagtgctatctcgcttgccctcatccttcgcgctccttctcggcgtcacaggctctatatacccggctgcggtaaggtcatccaggattatctgcgtccggatgtccctgacctcaccggcatacatggatatggcgcctgtaaatgatttcagtgccttgaccttcatgtcctgcctccttaagcggatgccttcatgaccagtttgacaatcttctgggcattctcgaccttagcatcaaactccatccatgcaatcacacctatggcatgttcatccgcatatcgttcctggaggacctgcacggatgcatcctcggacaattttacagccaggccggacaggtccccatagtaaatggccgtcttccccgcctccattccgtccatctggtctgacacataaaccggcttccccaggagagtcgtaccgaagggggacgtgatgtcatcctgcatgagataccggccattaccatccttcagcagacgtaaggccgtcctggtcgcgctgttcataatgaatacggcttttgcctgaaaggcgtccttcactttgtccttcagcatgatgatttcatccatcgttacggcggatgccgccgcagtttctacgctgagggtcacgcccttcaacccttcaaccttggcatcagttccatgcagcagttccgcctcaagaaaccttgcaatcgattcagacatttcattaacaacgaacgacacgatgtcaaactggctgttattcgccagggacttggacactttggacagagcgccggccaggtatccagtcagttcgatattggtgaacttcccactggtgctggtaagggatttgaattcctctgcataggccatcctgattgtgttaccatcagccgcatagtacgggattgacagagtcccttttacattgtaccgggtcgccatcttatagattgggcagatgtcttccaccttcttgataatccggtttgcaatcgtcttggggataacggcgccgttatcggtctttgtcatctcaccagcacgttcctccaggacctccccgcggatataggccgcaaaagcacgttcttccagctcctcctgtttcaggtcctcatgtttctctgtgctggtaacattcaatttcaggtccctggcacgttccaacttttcaatagtgctgtccagggccttcacctgtttgtccaggtcatcaaacttctggtcctcttcctccgaaaatgccctctgctccatctctgcggtggacgtcaggtctttcatctgctggaccaggtcggcccgctgctctgtaagagattttaaatcctccgcacgatactgcatgtactgccttacaactgttttctttctcattctgctttctccttctctaattccttgattctattgtgatacttactcatatcaatcgtttcctttgtttccttaacctccacataatccgcgcggacttccaatggctccggtgtcaggaccatatcaccctctgccctcacctcaacactggtgccctcatagcaaggctgtttcctctcatcaatgatggaaacctccaccaggtccatatcctccacataccggcgctccagagcgtcatggatatcctctgtgctggcgtcccgttcccggaacccaaaggaccagcctctgagtttcttcttatgggccttttcaatgacttccgggtccgtgacctccgccctggcatggagtccgatgctgtcctcatacagttccaggtttgtgcttgtggaacccaggtttctggtcttgtcatggttcaggagcagctgcacctcattgtgcctgagcgcccgctcaaacacccccggtacaatctgctccacaaaccgtttcccggtcttacggtccctcataggccgcgaatctctggccacggcattgacatagccttcaatcaccacgctgtccgaccttagttcaatcctcatctttcttttcaccttctttctgctccggctctgactctttctgtccgagtccgccggtttggttcatatttggcatataaaactgttttgtcaccgggtcatacagcacatcctgcagacccaggcggacaaaatccaatcccaatggcggcatgttctcccaccgccgtatttcatcaatctgcatgaatccgttcttacaggccgtttcataggccctgaaacgtttttcaatgtcccctttcgtcagctccgacgtatccgttgcaaaataaaaggaccccttctctgattcaagaagcaggtcccggttcagggcacactcaatttcttttaagatcggattcagacagtactggacgaagttcgtcttatcctgctccgtggcgccgccgtttatcatggccggcggcatgttgaacagcttgcagatttcatcactgttggttttcttgttctcattcagctgcatctctacagacgtgttactggcttcctggaactctaacccatcgttcaatatgacgacattttccgtgttgttctggtaaagtctgtgccatgccgcctttaatgccttaatggccggttctgccagctttttagccgacttgacaaaccctttcttatttccgccggtcttgaccaggttcttttcgtactccagggaatggtaggctacgctcaggacttcactgttctcatccaccacactcctgccggaacgtccatcctccgtattcctgagcactttcagaaattcaaagggcttatatttcgtcccttgaatcatgatgtcatagtccttaaaaatcgggtctgatgtgaacaggaaggagacctcagattccctgacgtaatgcagggaccttatctggtttccggtccggttgatgaaagcataaccgcctttcccggtcagatagtccctgaccagcgcccgcttgaactgcaccccatccagggtgtccccggtatcatcatttagcagccggaccctggcatcatcctcaactgcttccagcttcccatccaccagcctataaagccgaacagggatggttgaaacggtttccgctatcttattcacacaggccgcaaaggctggcgcattcatggcctggtccctggtcatgtagtcatccgacagactggccctcagtaatgcatcctcattggattctgtctcttttttctctggttccgggtctgccctcaaccgaaaggaccacatatgcaatcactcctctctctgttgcgatatcgcaactaacacacctgcactgtaaaaccgctgtcgtcaaagaggatatcctgctggagcaggtacactgagttgataatgctcaccactccgtccaccttccccttggatttcttcttgttgacataccggttcatgttggtgtcataggtacacttcgcgttctcaaaattggtttccagcagccggttttcctcataatgccatttctggtttgccaccatctccgccaataacttggtgggaggatgcagggtgtccgaatgctgccgtatttctactgttgtgtaatccttatcccatttctgggcgcttgacagggcgttataccggtcatatccgattgatttaataaccacacccctggattcctccaggcctgccacgtagtcctcaatcacgccgtaatccactgtcatatcaccgcaggcaatacaggttcccgcggcaatggcagccctgtagtcaaacttttcaaactcactcttctcatcaatccttccctccggtatgaatgtcatagtatggcttaatatcgctccatcctcctccgccgacatggtcacggaacagttatcgtttgtcattgcaaggtcaacacccacataaacctccctgcctgcccagtctatccgcggtaccttgcaggccttcacctggtcaatcgggatgtatgtctctgtcccggcgccctgatagatgatgttacagtgcttggtcaggaagttttcccgcagcttctcacggttgatagcattccggcgcttctttagcagttcatcccataccatctcaatttccaatgccagaggatttccatgggccaggatggtgtcgtccgtagcccaatcttttgtattgtccggctcatagagtagggcaaacacggtctcatcatcaatcaggccatccaggattttcttggcgttgtccacctcatcctccagagggttgtctgccgtgggatacttggttgagatgataaaccccagcttattccggatgagcagctggccggaacgcatggcctccaccgggtaggaggtgggaagcgcccccacttcatcagcaatgaacacgctgggttccttaccgtccatcctgctggtagagtaattgagtggcgtgtacttcgtctttgtggggttatgcaggatgtagtcccgcagcaccttaaactcgttttcctcaaagacctccacattggttgccagcagcggctccagagcctccttaatctcacgggccagcgccccatccggcgccacggaaaagaaccgggaataggccggctccaggtaaaagagcaaaataaaaagaacagcaacaacaaatgttttgccattcttcctgcaaatctccaggaccgccgtctggtaccggcgcatccgcttatcattccgatggaccgtacagaggaccgccgttatgagcagccattggtatccggccagtgccgaatagatggactttccggcctttggtccctttgccatcttgagcaccttaagaatcttatatatcttatccaacagactttcattgatgatatatttcttgttcttccctttgtacgtctgcaaaaagtctgcacactggaggataacgtacctcggcgctttaatctttccccggcataccccctcagcatatgcgaccgccgggtgcttaaccttcgtcctcgtcgtcttcattgattaaatccatgatggtctttttcttctctccaggcctcactttcgcaatagacagcttcgcccggctctgaggggataggcacagctcattgcagcaccggaagtattcctttgatgcctcggccctggccatccggaaggaattctcaaagagcagttccttcttatcgttggccttccggtccagctcctggatgcggtccacagcaatggcggtttgggccaggatgaacaggtccaggttacccaggatgtcggcctcctgcagttcggccatgatgtaattaaatatctccatctgggattccgtcaggtacagcggcggcaccagtttgtcattcttcccgcggagcttatcctccagctcaaggcgctgcgcctcttcttcttttgtaattgtgccagtctttaccctggctgattttgccggccttgccatcttatcaccttctttctgggccgatataatgattgttgccctccccctccattggctgtataattgtatcaacggactgccatccggaatacacacgaaagggaagcttgctatgaatttacaaaaaattgctgaccagtcacttaaatcaatggtaaatgactaccatcaatcagggagagagactttcggaaatgattattttgttgaactttttccaaatgaacaccctaaacacattaataacgctttacaaatattaaaagatgacggacttatcaaactcttttttgcggatgatattccgtatctgattgcactcatcccttccggtattcgagcacatgaggaaaatacttggataaaaaagggatatcagtgtattaaagaaatccgtcaattactccccttctaacacccaatcatttgctataaggtctcctgcctggggattccagcatctccccctggagacctcacttccatccacaatcaatctcgggatgcagcagtccatgccatctgttggcaaaataacaagtccccggaaagaatctccccatgcttcccggtagatattgccccctgtttccaatgatttttttaccgcctcatgaatcagcataacgtcacttccttcctcttgaaccaaaattctcatttctaagattttgtgtgtttggaggtggggcgtcggtgtcccgaattgttcctattttccgcacaactccccggggggatagccgtcacccctcctgaagggcctggagccgcaggagcctcatgacgtactttccaattgcatcctctgctttcacattatcacctgcctcaacagccgctactgcctcatccaaggcatctgctgactcccttagcactttactcattttttttaaccgctctgcatcattcatggttctgacctccatcccttatatatgttatagtctcagtagcttttccgtccgcatagaaaacctcccgctcttctgccggaaggataattctacattctccatatgggattgtgattccattacattcagggcatctatgtccatacgcctgttcagtcttatacactgtcatgactccacattgcaggcacttgatgacaattcctttcattggctctcctcctgttcatctattatttgtttcaccacctcatacggtatctctccactctcacacatctcatggtgcatcccgcatatagtcagcaggttgtcatcatccagacgccggtcgtagtctgcttcaatcggtatggcatgatggacggataggttctcatagttgtattgccggtctgtaccgtaaaggtagcgaatacacacctggcagaggttcttgtcccgccggcgtatctgctcccgtttctccctccactttctggagctacggaaccggtctatgtaggttatcttcttttgatgtgctggcttcctgccgcagtcatactggctgtcatggatgcggccacagtatttacaagacttaagcatttatatgaccacgctttcctttcacacataaaaagcacctgcttctgcaagtgctttttactatcaaatattttcgtatccacaaagaagggctttatgggtttctctcagtgctttttgctcctgttctatctttttatccaggctatcaatctcatttatatacttcctcagggtagcttctttgagccttttctgcattgccaagtgttgccgatttgcaagcctaatccgtttatcaattaactggcgtaaattagcatctgtcaacagtacaagatattttgccctacattctgggcaagaaaattcttgtgcttgtaattctcctgatagctcctgcacgcttaactcagaaaccgtaaacttgcactggcatttgttgcattctatattgtccattgacaatccctcctcgtttccggtatgcccaattcgtttcatacattataacacagaccatgtgtgccattctatgccatctttaaatttttaatagccatcgcatgaattctatgaacctgcctccatttgtaatccatcctcacacaaatctcttcccatttaagccccttaagataccggtatgtaagcaaatccttttctctctcatcctccatagcctcaatccgcttctgcacctcctgaaatgcacatatccggctgtaccgggctgcaaccagttcctgctctatctcatccaccttcactgcataatcagacaggtccttcttatccgtcccgtgcggcatcccgtcattcgtgaccgaaggagacattttattccgcctcagttcttccaactgctcttccaaacgccggacccgccgcttctccttctgataggacatcaggaactccttcttcttttcattttctgtcaattccaattcgattacctccttacagttccttggccagctgattcagctccgccctggcctgcacaatccgcctcttgatggattcctttgtattgtactgttcagtgttgcaatacataggcggatatccgttcttgttctcaaaggtctcatattccttgatgctgtccaccagagtgtttaccatactctgtaccatcatgattctatttattttcttcatgctgtcacttcctttcttcaacccgtagtctcttttgtccccataccgcgtccagctccatgcagaatctgaaatctcaccttgtcccattcagccgccaaattgccggatttaacatccccatagtcacctaaccgcttgaatgtatatctgccccggtatgcttttccatctgccgcgcagtgttcaggtacctgccggccgcaatgaagcatagtctgtatatccatggtcgcatacgaaccaacaaggcgcccgtagtcatatacgttataatatatctgcctcaaaaaagcatccccctctcaatacatcaacataatgcccttatccgtgagctgctgcacaatcaatttaatcacttctggttcgtacttacccggctcctcctcaaattcccttatcacatataacaggtcagctactccatagcccctgaccacctcaagtttttcttccacggtcagttccgattccttcgataccttatacgctctcacattatcccctccatttccccaactccgctcttcaagctctgtcagcagggccagaataaccttcttgcacattcggcagtcatattcacacataacctctttggcatcctttaccaccgcatcccacttgtcagattccctgggcaatatctcatccttccacttattccaaaaccagttataactcttccagaagattcccttcaccttatcgttatccatgcatcctccttaatcaaacggtagttcctcgcctaaaggtatagactcaaacttcccggtatcattttcaaatagtttcgccatttcttccttccatgggtatatcttgttctcccccgggctgttcctgaggcgcttcgtgcaagcctcaaagaataacgggataaattcatcctgtacaccgccgtcgcggtccttgcatatttcaatcacattggtggactggtacaaaaagttgtcatccttccacttgaacatatcctttgtcagacgcttgaaatcattgttgaccctgtgcaggataaaggcattatccacacggttcacgatgtcattgctgccggacacatcatccaggcgaaggaaccccacggacttcctgggatgcgccacaaacaggatatggacattcgcagcctttgcgaaattctccagacattccacgaagtggctctgctgctggtacttgtcggtgcccatctccatcagattcagcgccatcatgttatccagaattataaggtcaaccttatgctccacaacacacttacgtatctgctccatgatggaactgaactcattgccgtaatagttgttatagacgtacactttttcatccagccatttggatataacctcgtcataaggttccggtaccacgtaatagttatcatactgggtttctttcacatacatcttcccagcagcctgtagaaggagccatttcagcaggttcttaggcttaagctccccgctgaacaatgccgtccgataaccttgttgggatgcctcaaccgttatctgtgaaattatgctggacttcccggccgccctcagtccactcaggcaggtgacaaaccctttcttaagcccacgcattttctgatctatcacatcgaccccagtcttgatgaattcttccggcggttcctccataagacggatctgttccgtggtaaagaataccggctggccatccaccatcttaatttctgtctttttctcgaccgtgtaatccgggttccgataattggggtgcctttcctccctcacatactgccggtcataggcatccggctcaaacatccggcggacgtcctgccaggtcttgtcagcacaggaattgtggaagcagtggaagccaatagcgccattgggcatcctgaaaatgcaggcatccttcccggcgtggttcttatcaaagggacaatgctccagtatgtatttggttccgctaccatagctggccttagtgtaatggagtccatgctcatccagccaacggtctaaatcaaattctctgggattaaaccggttgtacccctgtggcttgtcagggaccggaaggtatcccgccagcttctgtagcagggccttatcattctgttttggattctcccgcgcctggacgatataactcatgcgatgggggcgctccggagtattggcccctttctgcgccaaggtaccatacagcttgcatatcctggcagggttgaagttggccgtgtcaatgtcaaccttgtcgtcagaaaagaatagggacagtaccgccaggcagtcctttaccagctgcttgttctcatcattcattgcaaggcaaatgctgtacaggaggtgggccccattcccactaaaggccacaatcgggtcatcaaatcccgtacgtttcataaaggcatagacctcattgcatttttctttcgcatagccaatctgctcctcgctggatgacgtgccggccgcgcggaccggatccatatccaccatcagccagtcatagcagtagatatccgaatcagatgtattgggttttgcattgcgcacaaaacaattcctctgctgcctggaatggcattcgtccttaattccgttcagtgtaatatacacattgctgtttccatccatgcgaattccccgcattgcattaatacaggtatctgcatcgcggaaataaccacttgcgtttccacccccggcagcaatgacccggatttcaaaaaggctgttttctggtttcatgatggaaatggctttccggatttcattctcatcaaatttcattgcaggatcctcccgtctttcgtttttgtcatgggtctgtcttcatcacttaaatggccggacccgccattatcctgtgtcctggaaagccatccattgatgaaccgattaattccccttgcagttttctgctttttggggttgctgtccaaccaggttaacatcttccttagctcatgctccacatcgactgccgggaatgcttttgaccagttgccaatcctatcccacggcacattatagaaagtactgtcaacaagagggagaaaaatatcgctacagcctggagcaggcttgcctggctccgggcagatatatttactttctttttccttctttacattcttttccttctttacattcttgtttatgttccccactggttccccactggctcccgactggttccccactggttccccactggctcctttactggctcccttgccctggaaagtctcataatttacaatgaaaatggtggttctttcactggctctctttttgtccacttctatcatgttatcctgttctaaccgtaatagatagttagctaactttttccggctccatccccatctttcggccaaaaaacgctcactccggtatacacagccgcgctttccgtcaatgagatttccgcgtctgtctgtaaaagtgccatcctgatgctgcgccagcagtattaaatcaatccaggcctgtcctcttgaaaaaggcttgtccatccatacccagtgactttgaactgtcctattcaccttcacccaatttttatcttcattgttcatccgaatcacccggcctgacttcccgaatataaatgtcataatccctttcccaggccatctccaggagccatatgaggtgactatagtcattaaggtcacagtcaaatatgagactgtttccattccccacaatcttgacctgtatcaacacgatgcccactcctttcgccatatatattaaaacaagctgtcatttccaaatattatctgtttcagatggtgttttccatcgtgtctcccacaaactttacatgaatagtcaccttgtatgtttgtaaagaaatactgcccacatgtcttacattgacacagccaggcctcatgctcctggaacagaaagccaccctcaaatatcttaaatttaccttggctatcgcccatgactatcattttcccggttttctttgacatgcttctgcatccgatgcgccctttcccgcctcccggacgcctttggtccaccacaaaatatgtatcctgttctgggaaatagaaatctgcaccttgccatatcccatttcctctatcactttcaggacaatatatccattccatatttctgccctcaaacacagatgcccacaaagagcacatgtgataatactgtctatacttttcaaatcttaatagcatttctaatttatgttccacttaaagcctccttcccgggtggaggatggtcagaaagctccaccctgtgagtccaacacctcatgcattcataccgtgacatattataagcatgtgtcgggtcgaattaaccagttgctatatatgtaaaggcttgcgccgttacattgttttcaaaggggtgtaaaaattttcgcaccccttaaaaggtccccaaaaattttagggtacccctcaaatttaaaatatcagccatgtacctcgtttgctccatcctccaggaccttggtaataaattttaatgcctgaatgatggtttccagttcgcagtccccgccaagagtgacctcgaaaccagaacatctatatttatcagtaatggtgcgcgcattaatgtctgtacttccagcatccttaattcggaaataggtacggccaccatgaccggtgtcaccacccatataaccggttgtgccagcttccacctctaatacattggcattatagatatcacgactataagtaacgatttcagttccatcctccagaactcttcttttttcttcaattgcatacatgctttaagcctccatatctaatttcacttgcaggtttccacatttgggacagtacaccactgcccctgttgtcttatatcttcctgtggcgggattataatcatccaggattactagcctctcgctccatccttccgaacgatataaagcccttttcatgtgcgttccgcaattattacacttcattgacttttccaccacccattccgataaatccatgccgcccatttgtggttgtaaatcgaggtcagccagagcgcttccaacagccctctgcaggccctgtattcgcttatcctgccaatcctataccatctgtgcatattctttcggcaggcgtatgaaaccctggctattgtccttcctggcggctttgtcatcagcattacataccatcttttcatccacgttccttcctgttgcgatatcgcaatgaccaatatgtagttactgtgtttaagtccacaatacctacacttttatcttcccggcacccatcagatatcccagataaaatacatacttcatgctataactcgtctggttatacgccgtctgaagctcaacgtttcgtccggcatcctagatacaactgaccagcatatcgtcaaatgcatccggagctttatcgtctattacagaccttatgtattcctgtattacagggacaatcccttccgatttctttcttgtcagggcctccctaatcttcttctgacggtcgctatatgccgacatcaggatttcatataccttccatccataagctgtactgacatggtccatcacatcagaaataggacaatcaggattattaatatatggactcggataggaaacgatatctataaatttctgcacatcaccctcaggcacattcctattcacataaaggatttgctgcttcccgtcaaacatgactataagtttccccagctctgtgtgatgtttataattaagttggaaacacagaatagacggcagttcctctggagttatgcgtttaactgttatatccttcaatttcatgtcgctaccccctccttcccttgcttgttcctctaccacgtacctgcctcatacccaggatgaagtagtatatattccacgctgcatttacatgcatacccttaaggaacactacaattgcgttaatcagactctccttgactatgtcatccttgcctgtggcatgttctatgtcccatctctgttgcaccggtacaactttacccgtattttcaagaactgttttcagtaatcccttgagatcatctatctcctccacagcgctgtcataattttcagccatccggttatactgctccactgaaatacacatcattctctgcattctgcggcctccttcctgccttctgccagacctgcataatatgccctgttggtcaagctcacaattgcctccgccatctcacggtctgtatcatcatgctcccctatggtcttaagccacttatccacgaattcttccttattgattggaaatgtcatatctgcatgcctcccttactaacactatctaaaacttctcgtagttccctgattttatttaataggtcgaatacaatgtcatttgcgatactggtcttgataccggccgtggtataaaatggcggtgctatcctcaacatctctcctgttttttctatatccacattgaaataatcctggtccacgtcgtttaccattacctgaactctttctgccagaacttcaatatcaagcagtgcattgtcaatgtctattattgtgacattctctttgttttccatcgtcaatcctcttccctttccggctcagaggtgctatactatagttggttgaactttggtatagcacctctgggcctatgcttgtccttaactaattggcgttagttagggacttttttattgtccgtctcacgccggcgccacggctcacaagcctcaactccgtctttgtttcttccaacaccagccagttgtttaccaccaggcctgccttactcatcagtgccttctggctccgggtcggcttcattgctctgcttctccccatccgtttacaccgccctccgcatcatcctgtcatgaagttcatcatgcggcccagaatcattgcaatagatgtctaaatcctccagaacgttctgccattgaaataatagttccgtcaggtcccagttctgatagtcccacaggagaacggcaacgtcctgggcgtcccctatgggcttgtctgccggcaggcgccttaatcggtccatggtatagaagtaatccttagtcccccacttctctccgtcgtattccttctcaaccgggaacattctcagcagctccatgggggtcaacctgccgatggtttccatgacctgctttaactcctggtacctgttttctatctccaggcaagacttataagcttttgtatggttgaactctgcaggattctcttttccataggctttgaccgccaggaatatgtatcgcgccaggtcatcaccctgtagcctttctatccggcgggtgcctccacgggcatctgtaaaacgcctcaatgccttggtatatttcccattgctctctacatgtggcacaattcctgctgtgttccagctcttccaggattccctgatgaatggtaccagtatctggagcggaccggggaacattcttaacatctggattacaaaggcagttctccttgccagtttgcgcaccctgcccgggagtctccggctctccagctccgtcttaaacagctccgtgacgtcctgctcgtcgtcctcatctaccttatatacaaagttgtccataaggtcagccttaaggtctttactgctaatcttccgtaaggaatagagcatgttgttgacagatatggtccagtcacgacatcccttgatgatttcatacatttcattcagatattcaggctgcaggtacgccgccaatatcccgcggcaggcctccatgccatcggcatccacctgtaatttccatggggatggctgaatccgcaaaacatgtactttgtccaccaggcctgctgcctcaatccggtcacagcatggctttgcatatagctccatcccggccttggccattaattcctgaacatcgaacagcatgttcgaaacataggtcccatccttaatatggctcaataccacttctttggtttctttctccattgtccttacctctcctatatcattcttatcaactggtccacctgccagcatttgcacatatatgccaccgtcatcagtagtagcacgatgatcagcgcccagtccatccggccgggttccctgtttctgttcattcctgtttctccccttcctctggacgctccagtttctctccgattatcttttctatttttgccgggtatatccgaaactcccacatggtcttaccagttttctctggcgggattgccagccccaggtccaggatgcccctgcgcatgtaattccgaatctttgccggtttcattcccaggacaggggccgcttcctcaggacttagccatagtcttgtcacaatatcactctccttccattactttatattccgatacactcttttacagcggattcacgttcttaccgcttacagctggacggctgctgtggatggatgtgattgtcaatgtactatttgtatggggtataatagcacttatattccgacagcacaatcccctcaaatccgcataaaatcaaggttttatcaactaaattatgatttatgataataagaaataggctaaaataacatctctatggaacgccgaaatttccatatttttacatcatctaaaaaataatttagaggattaaaaaatcaaattattaaaattttctaaac

SEQ ID NO: 3315 - DNA, 3689 bp, Unknown
  gut microbiota DNA sequence
ataaatatttgtcaatactgcggggggattagaacatgatttccgtaatttttcataaatcccggcggaaaacagcaaaaaataaaaaagcctgcttggattttttccaaaacagaccttttcctgttatttttctacctctccatcggataaaccaacccccactgtctgcgaagctcatccatccaccccatcatgcgcagggtttcctcatgaggcatttccgggcactccaaagctccctctttgatcgcccgcaggcatgcctccacctcgtactcatacccgctgatctgcttaggtgtatcgtaggaggcaatcatgttcctggagcggtcatagacccggattccctcacagttgttgatgttctccacctcaataaatccattgtcaccgtagatgatgccccggcggtcgctgagtcccattgcactgctgcacaatgccgccatctttccatccttataggtaatggtgatgctgttctgagcatccactccggtctctgtcatcaccgcggtaccggtgatggagtccacctcatccccgaacaccatggacgcaaaattgagcggatagattcccacatccaaaagggctcctcctgccagctcagggcgcatgatgcgctctttgccgctgataatatagcccagattggctgtgagcatatagggccgtcctatgacgccgcttgacagcacgctgtccagggttttcctcatgggcatataccgggtccagatggcctctgtcagaagcagctttttttctctggccagcgcaagcacttccctggcctgggattcattgactgtaaaggacttttcacacagaacatgctttccgtggttcaggcataatttaatgtgctcatagtggtgtgaatgaggtgtggcaatgtatactagctccaccccggcatcctccaccagttcctcgtaagatccataggctttttcaaaaccatacgtttgcgcaaattcagctgcccttccataatccctggcagccaccgcgtaattttgcgcgcagtccatctctctaatggtccctgccatggttcccgcaattgacccggctccaattatacctaccttcatcttagtaaccctcctttaatgcttttttattcttctattgtttctctgttattccattttgttccaattctttctctgagcttccggcaactacatggacatgcctgtatggtatagagatacccacggcatcaaaattcttcttaatgaggcggcgtatatcgctgcaggcagtaaaattgtcgtcaatgttcttggtccataccgtggatttaaggatgattccgtcatctcctagttccttaaccgccacattgaccttattaccctccgacggatccgggcggatgtcaactaccagcggataagaggcaatggtctcccgcatcacctcgattgcctgttccagattgctttcatagctgacggagacttccatgtaattgcctatataatcattgttatagttgctgttttccacaattgccttattgatgacgctattgggaataatcatgcggctgttatggtaggtccggattacggtatggcgcaccgtcatatcctccacgattccagaaatgcccagactgcttatgttcaccttctctcccagattaaagggacgggaccagctgagcatgacgccgcttatgacgtccgccagaacctgctgggcagcaaaacccacgatggctactaacagcgaggagctggtaagcaaagtagcgctcagcgccttagtggtattaaaaagtccgctgatgcagataaaggctatgattgtcagcacgaccttggacatactccgtaggaatttaatatgaatctgttccttccgcttcagaatcatcccgaatatcttattgagcgcaaacattcccccgctccagaatactacaatcaccgctatcttaatcaataaaatctgcattcaaatatatcctttcatatttatgtcgttcctattatgctgttctattatgctgttcttttatacagttcctttaagtaccagtcatgttatgtacgcaggctgcattagtagtctaccataccggcccccttcttgcaatctccatattcagaccagctcccgtgtctgctccgtgcctgctcccgtgtctgcatcctttatccgcagcctttatcccccgtccctatacgtattcctcctatcatcagaactccctgattaccagctccgtaattccctgattgtctcccatctcaattcgttttaccgccggctcccttccgtaaccgtattcctcacggagcatgctccgaatccgcgtgccgccgttatatccgtgtatgacacgaatccggtaaatgctttttcccgcagaatgtatctgcatactgattgcctttttcgcttcctctgtgttttttccgtgtacgtctatctctatgattccgcccgtcatctgtccatcattcctcacttcttttgttgtcaaacatactgtccgtatgataatacatcacgccataaattttaaatcaaacacgatggcccttgccagctcctcaggcaccgcctcagcctccttcgccaatacctgcttaatgaaagcagcctgcttcctgtccacccttgcatagggacttctgatttgcagcgcacccagcaatttatccctgtattccttcagagactcatccttcagcaggaaaatcagatagggcaggcggtcccaggaattctcctgtatgagaagaagtatcaggtatcttctgatgtgacagacagaatccggggactttcccgcagtctcgtctgatttcctccatttttcctgctccccgtaaagcagagctgcgccgggatgtatcccgtttttccggatgcactgataagcggccttggatatacagggcctggtatcaaggagatacttccagtaaatttcttccccttctgcccccatcagcatatccacggcttccagagcgcccctgaccaccttttcagattcgtgctccagatacggaagaacaaggtccgccaatccatgcctgtcatccagcgcccttccctgttccccgattcccaaaatagccggctccgggacaggctccttcagatgcttctcatagaatgccaggatatccaattggctgtgctttttaagtatgtaggccgccagatcccgtatgccgcagttggcatccagcagcaaatcctccacacccggccaggcacatttcagaacatgatatttatactccatggcctttctcctgacaaaagagctgcggtgcagcaaataacagtcagccatttccatggagcacgggtaatatgtaagcagccctgtccatatgacggactggcagtagctgtgtttttcctggttgagaaatagttctgccgtctcctggtccagccttctgccgctgaacaggaagcggtatatgctctttctcacctcataatccatggacagaacggatggcactgacagggaacccgcctcctggtccagccgttctgacatgactgttccgatgtgttccacggtccggccgtcctttctcccggaacgctttaccttatccagggccatcatggccgcaaacaattcatccaggggacatgtctccaggcgtttggctgctgcccgtgcagcagcc

SEQ ID NO: 3316 - DNA, 7588 bp, Unknown
  gut microbiota DNA sequence
atgtacatattttaaaatatattaatcaatttttgtgcatattctatatctattagattttgtagttttgtttgattggtattaatatggtactgcaattataattttgaaataaaggctttaacagaatttttccatatatcctgctcctatcttcttaagacagctccaaccagtgagcatatatatacagaagagtatctaaagacatatgggttctcttgcccttaatggacagattcatcattatgcgatataataatgccgctaagcagcaacaggctgccgcagcttcttcatatatcaatacacagcaggtggataaatggtttatacaattacggaaatgacagaaaaacattattatggcaaagcatatgtccagtatgccgcctggtttgaaacatacaggggattaatgccggatgaatttcttgataacagaaaacttgagtcttgttatgagtccacgctgaagcatcctcaggacacctatgtggcccttgtggaggaaacagtggcgggcttcatatggtattcaccggatgcaagggaatatacacgaaaaacaggcatgtctgaaataaatgccctttatgtattaaaaaagtatcaaggccacggcataggcagagctcttatggaaaaatccctgagtatgatgccccataaagaagccgtattatatgtcctccggggcaataaccccgcaattggtttttatgagcatatggggtttatgcttaccggtaatacatttacgcaggataccggatttgggaatattgttgaacttgagatgatgcggaccggcagataaaccggaccataagcctgtgcctgcggttttggcagaacaggcaaaatacaaacaaacaccgggaaataacggctccaagtccgtacctcccggtgtttgttctcataatttacttcttatgcaggatttttataccctgcttttctattttatttcattgactttaattgctttctgtatccccatcctctggcaccataagctttcccttgaggctggaagccattttaagggctggaaattttgcgtgataaagagctatggcctcatccgcgtctttccggttcatcgtaaattcgtattcctttccatccgccatcacgcacaccagctccgtactggtgccgcgcccaaccttctttacctggaaccgaacctttttaagttcctggttcaccagaatcactggcttacccacgattccatatgttagatcctcaccaatccagaatgtgccgcttatcttccgggcattccggaaatcttcatccagcctttccctgtttatggtttcatggctgtccagaaacgtccgtactgctgcgacatgatgttttttcagcatggaggacaggataaatagcccaaggagcgcgataacggccccgaggccggtggtgcccatggcactggagggtgtctggttatccagcatgcctgcccaaaaataataactctccgtttccgtctccaggtcaaaactccggactgccctgtcatagtattttttgccatcacccttcagtttcttcagggtgccttccacatgcaacccctgaggcggatcggaacgcacaccctttaaataatcccaggtttcgtccataatccggtccatttccgcctccattttaccggaaatacgcacaggaacagctcccgcctcctcatccagcaccagataatatatactgctcttggtgcgcaccccgctgcgggtacggtagctttccatgaaggcatccagcacatagtttatatcaaagcttacatattcatccccggcctgctctgtcccgtatacttcacggagcggaactgcaccccgaacatactttatcagatagctgcctaccagtaccatcaggccaatcccaaaggcagttaccaacagacctacaggcacattgacgcgcaccatagcctttttgaattctgtttccaccgttctcctgtttgtattatcgcttcccataccatatatccccctcattgttatcccggcagtaccgatcctccggcagtgtcaattccgggacaccggctctccaattcctcctgaagcgccctggcagcttcccgtgatgtctcggcccatgcagtttttttatcatcagtcatcagatggatggtcaggtaatgagcctgctttctggtttttccgactttcacatagtatgtattatccttgatgtacgcttgtgtaagccggctgagtttcaatacgcatggcatgttgccgccgtaaagacagatataatccctggtcagaattcccctcttctgtccggtggtaaaagatttcagctttccaaggtgattcaggatcaggctgtccgaacccatggcctgtttgtcaaattcccgtatctcctgttcctctaatccgccggccttggcagcaacgcgaatccaatcatccacagtctttctaatatctttggttataaaaaaaacagctactccgaataccgccaccagcaaaagaaagaaaaccgaaatcccgattcccactcccagcatattttcctctttatcccggatgatttccagggttctgtttatggaccagaccaggccggctatgctgcccgccagaaaggctcccataaaaaacaggcccaggcccgcattgactcccttcatggcctttttatgagccttaaacacagatccttccggataatgcttttgcttgtactcctcgttcatactctctaagtatgtttctttgttctgggctgtcatatactgtttcctcctcttttgtaacaatggcatttccgtgatagaatgcagaaatgtttcagtcattctttccagttttattatacgtatgaatcgtaaaaaaacaattggtacagcataagccgtactatttcggcacaaaaagcaagacggtatcattcagccatctcgcaaatcaatttcctgaatgaaccgtcctgattcttccctgtaactgtaatgtccttgatattttccaataatcccccgtatgctctccattccaaacccatgatacctcttatcctgttttctgctttcaagattgggattgttcttcagcacagaccctgatatggtattttccatgaaaatctcgattgttccgtcctcttccctcaccaccagctccagttcacgttctgtctcaaccgccatgcaggcttcgattccattagaaagcagattatacaaaagggtgcccatgtccatgctgtcaatcctgtccggccttcccataaccacataccggaacctgatttccttttccctgcactcctgaaccgctttaatcagggctgcatttaatccctcattgcctgtatcctggggcagttcaggatagtttcccaggtctgctcccatgcgttcaatatattcggccgcctctgcgtaccgttccttcgccaccaggcggtacaacacattaaggcgccccttcatatcatggcgcaggcggtttacctcccggcccattctgtataaatcccgaatctgttcctcctgctggcacttggtttctcttctgaattccgcctcgcgttcttccctccggtaccgctccagcctgtggtaaaagcctcctataaaaacaatcaccccaaaaattcccattaacatacaaagagccagaacatatctccctctctggtccagtctgccttcctccataagaaacattcccataatcagaataaacatgcagaaaaatgttcctgccagcattccatcctcagcctggaccggtccctttttccgtccgtacagtgccagagctgcccggcccatggaaaatttaagggcacatcctgccagtatgggaaataccaccgcgtcccggtccatgatcatcagtgtattaagacttctgcctgtaataatccccaatgtcccatagatcatataagaactgctgatggctatcagaatccacaaaagactgtggacaatgaccttttgcgccttcccattcagggcaatcaagccatatgctgtcaataccacgccatagctgattcccaggaatccttcaaagacaatataacggttgagcaggaccatgattccataataggcaaggcatccgcctgtaaaaagcatgattcgggcagcaccggaatatttcttatcaaaaccatggtccatatattccattgccacgagggtggacaatacatcaatcacataagcggctgccgtgctttctcccatactccatcatcatctcccttacgcctttttttctgtcccttcccataggaataactgccccggttttaagaacagcatcctgtttttctatctgggaaatatacgcctgattcaccagataattccggtgaatacgtaaaaaaccataatccctcagttcctccgccacaggctttaagctcccgtaaacagagtactccgctccgccggacattttgtaggtcagtgtatggccattacactctatgtacatgatatcccgcagaagcacctcgcctgcgccaaagcccccctgaattttataactgattttcctgcgggccgtcacctgaaaatacttctgcagcgcccggcccatatcccgttttaaaagtcccttcctcacaaaccacaggggcatatattcgtgggcatcaaacacccagctctcatgactggaaacaaatataagccgggtctccggacagctaatgcccagctgctctgccagccagaacccatccctctccggcatctcaatatccagaaacaccaggtcaaagggctgctgctgacctgcttcatataacctgcgtccatcggtaaaaaggcttacctgcatgtccacggttcccggcatactgccgatatactcttttatttcctctttgatctgctccaggtataccctgtcatcatcgcagactgctacacggagtgtttccatgggattgacccccttttttattcttatgattgtgggcaggtggtgcttgtggttggtttggggttagttgggttgggttgggttggggtaagtttggtttggttgagtttggttgagtttggttgagttgggcctggttgaattgggcttggttgagttgggcttggttgagttgggcttggttgagttgggcttggttggggtaagtttcgcagcattggggtaaattgtattgagtacgttgcattgggtaagttgcattgagtaagttgcatcgggtaagttgcaataggataagttaagtcgagttagacccatataatttaatccggtttaatcccatgtcttccatacttcgggctgataaccaattgtagccttcttaccatttctgacaatgggcgacttcaggactttctggttttccaggactttctcatcccggtcttcagcagcaatgtacttgattaatgccagtgcgtgcttatctttgcaatcatcattcaacataacatccagaccgcccacggcctgcttcacacttgtgtattcccccttactcatgcccttttcttttaagtcgattaattggtacttgatgttccgctctttgaagtagcgttcggctttctttgtgtcaaagcatttttttgttccgaagatttgtatattcattgggtagtcctccattccatactataacaatgcttccaggccgggtacctggaaatctgcggtatggtttattgtctcgccagccgcggcctgccgatgaaatttctctgagccttgcaaaatctaaaaatataatgtataataagcatataaaagagcaaccgcccacaaggtggaagcctacgagtcaatttacgtcctacatgaggacgcgcctatcctgttggctgacagggtaggcatttttttatttcttgttatgcctgtctatgtaggtcagtaatgcgataaggaacgagccgcccaaaaagagcagacttaaaatttcatatgttcccataacacaccacctcccctctcttgtaagatgggaggctgccaccctgtacacggtgctcatgaaagcattatagcaggaaatttccagataatcaaccggcggttcccaggctggttctacaatggctctacacgttataatgtcacagcaatgtcacggaggcataaaaaagcccgggaacacgcataaatacgtggttcccggaacttaggacgttattcgaattcgccgagttaaatccatttctaaacttttttgtatagcggatttgattcgtcgtggttttatttgatacagattatccttatcctaaggtctattcggacttttgctatcaaaaatctatctgggccatcctatcacgggttttgcttgagactgatgaattggtggcttggaagtattataacacgattccataaaaaattctatcctaattttccttttttattgtctgcacaagtttcaccgaaagaatgtcaggacaaaggtcgttttgcgccgtcattaaaatatcataaaacacaaagagccacagtcgatgtccgttcgggtgtcggctgaggctctttcttgttacagcaaatcgttcagaaggttcatgcacttgactttctgttggagatttgcgctgccatagacattcagcgtgaaggagacatttttatgccctaaaatttccgaaagagatttaatgtcaaactccggtatttcgattgctcgtactgcgaaagtgtgccggatttcgtggaactttaccttttgcagcccgtttcgtttcaaaaaacgggaaaagaactgccggtatgtgcgaggttctgttggcttggtcttgccagtcaagaagtaatggttggggttttctgtgtagaacttcttgataatgttcatcagcaacgacggtacgggaattgtccgagctgatgttttggtcttcggtggtcctatgtgcagataggattcaccttttttcttgtcatagatgcgctggacagttttgttgatgctgatggttttatccgtcagcgagatgtccttcatttgcaagccgcaaagttcaccgatccgcaccccggtaaacaatgcaatgagaatgccagcggtcttcctattcaggtccatgtagatgcactgaataagagcttgctcctgatccttggacagagaaaccaccttcttgacacccagctctttggggtattcaatcaaatcccagttgagcagcggtattgcccgttccttgtaggcatactccatagcgagacgaagtaccagaatgacatctcgaatggtcttcactgtgaggccaccagacttatccatccgcccgtgttcgtaaagatacgatatgtagctttgaatgtcctgctcggtgatgctgccaatcttccgtttgccgaagtgcggtatcaagtgattttcggctattagcgtgaagctagcatgggttgacggtgtgatcatcggcttcttttgatttagccaagtgttcaacagcgtcttaaattgtgtattattagtcatactgaccacctccacagatattatctgatggagaaataatcagggcattataaacctcaagtaacggtctcgaaaagcgtccgaa

SEQ ID NO: 3317 - DNA, 2249 bp, Unknown
  gut microbiota DNA sequence
gtataggagacatctacgccgaacgcagtgagcgtggggcggctgatatggagttgctttctgtcacaatgaatggtggagttatgcagcgttccgaaattgaggggaaagataactcaagcgaggataaaagcaactacaaggttgtccgcaagggagatatggtttataactcaatgaggatgtggcaaggcgcaaatggagtgtctccttatgacggcattgtcagccctgcctatactgttctcacagcaaagcgccctatctgcaatgagtattttgcagcactttttaagaactacaaactaatcaacgagttcaaaaagaactcacagggtatgacctccgacacatggaatttgaaatatccacagataaagacgatcaaggtgtatttgccgagagtgacagagcaggaaaaagtagcctcattacttgttaccctcgataaaaggattgcagcacaggcaacgcttgtcgaacagctcaagaagtataaaagaggtgctattgcccatattctttcaggcaaagacagcgagtttgctggcgaagctatatgggctgagaagacactttctgacttatgttgtgagttcagaagtgggcgtagcatatcagcaacactcatccacgaaagcggagattatcctgtgtatggaggtaatggcatacgagggtattgtgaccattatagtcatgagggtgaatatgtagtagtgggacgacaaggtgcattatgcggaaatgtccggcttattcgagggcaaaactatttgtctgaacacgctattgcggttcgtgcgaacgaggaaaacgataccaagtttctattgtatttacttgatttcatgaatcttggtcagtattcagaccaaggcgcacaacctggtcttgccgtaaacaaacttctgaggctcaaatgtaatgttcctgagaaaaaaatacagtcaaaaatatcggcttttcttctgacttatgataaacaaattgcttttcaggaaagtattctttctttactaactgctcagcgcaaagcattcttgcagcagctttttatataaagagctgctgcaagagggaaactcgcattctaaccaactgacgctccatactttcagcattcgctatttttctatttactgcttcaaatagctttgacaagtgtttctgttcttccactgatggcaaacaccgacggataccgacaaattgggaataatgcactctttgcttttcaataagcgatcctgtagcaatgagcttgtagtgaattagcatggggtacgatgtcaggtattcttcccagaaactaatagtatcagtttcattgacagaaaagatattataataacccgaaacggcggcagtatatccgagatgattggcggcgattgctcctaaatgggcattcatgggattatatgcaaaccacccgggcttgattgctttatagttgtctccctccttagttataagaaattcacggtaataacgctctgttttgggtgttattccatcctcaacagtgagactaaccagaggcgtgtctgggctatttgatgtctttataatttgttcggtgaaaaattcaccaaaagatgatacttcccatgttggataatgatctttgccatttccttttcttccagagaatactcgctgaatgacacctcttttatacttcttgagggagtccaccagcacagtctgtttctctattcttttcgtcagcacagaaaatagctctgctattttagcttgttcgcttggagagcagtacggaagaccgagccacttgaaggcatcgtaacttatttgtcttccgtctctgataccttccactgattttgagagaacatggtttacgaactcgtctgtgtgaaaatatgcttcataaaatcggcttgaatgtggtttctttccacggagtatcgtgtacgcagggcttacaatcccgttttcgtttgccatttccaaaccgccttcaaaggagcgcagatgaataataaaatcgcctttctgaaccattttgtaattcgacaatgaagcgtcatcatagtgtatattgcgtccggcttgttctctgggtagcgttcccttgccttgaactatggtgaggacggtttcatcgggatggtttttatctgtcacattctggaacaattcctccgctgtgcatatttcccacggctcatcaaagcccggaaagcgaagtttcggacgcttttcgagaccgttacttgagg

SEQ ID NO: 3318 - DNA, 7265 bp, Unknown
  gut microbiota DNA sequence
aatcaagtcccagttcgtcaaaaaacggtttcagctctgcatcaatcgccttgatttcactttgcagcttgcgtatctccgcagctacttcgtttaggtcaatttcttcttccggctcaaaggtgtcaacatatcggggaatattgaggttgaaaccgttctcttcaatctcctgcatggttgcaacatgagcatacttgtccacatcttcgcggcgctcataggtctcgacgatcttatcaatgtcgcactcacgaagaatattctggttcttgccagcttcaaaatcattggaagcatcaatgaacagaatgttatcggaattgccgttgcgctccctcttgagaacaaggacacacaccggaatacctgtgccaaagaagagattggcagggagaccgatcacggcatccagcacattcaacttctggataaggtgtttacggatcacttcttccgctgcaccacggaacagaacgccatgaggcagcagcacaacagctcgtccgtcctcgtccatgtgatgtaccatgtgctgcacaaaagcaaagtcagccttgctcttcggggcaagcttgccgtattcgttgaaccggggatcttccatgaagctcagatcgccagaccactttgcagaatacggaggattggcaacctgaacacggaacttcatgtcaccgaagtagtcatgctccaaagtgtcaccgttgtagatattgaaattgcggtaaggaatgccacggagaatcatgttcattcgggcaaggttgtaggtggtggaagtaagctcctgaccatagtagttacgcacatttgcatagtttttgaggcgcagcagaagagagccagagccacaagtgggatcggctgcgtccttgacatccgttagtccaagacaagccagacggcacagcaactcggcaggacctgaaggagtgtagaactcgccagccttcttaccggctgttgcagcgaattgaccgatcagatactcgtatgcgttgccaagaacatcaatctttgtgtcttctactccgaagttgatttcgtccagagaggcaatgatttttgccatgacagcacttctgtctttgacggtatgccccagtttagtagagtcgagctgcatatcagagaacaacccgtcgaagtcctcttgagaatcgttgccaagagtagactccataagggcgttgattgctttctgcaagaactcaatgtcaaaagagcggttttcaaccatcttgaccatcttgcggaacaggaattgcggttcaatgataaagcccagatcacgcagagcctcttctacaacggcttccttgtattcctcatcaccccatgcgtcttcatagctgatgccatcgtctttcagaagattcgccatgtacttctctgtacggtcagacagatagtagtagaaaatcatgcccaagatgtagttcttaaattcatacgcctccatattaccccggagtgcgtttgccatcgcccaaagtttattacaaagctctttctggtgcgcctgaatactgttgtccattttacattctccttattgaaatttttcggtgtgctgccggataaagtctacaattctgttcaccagagagcgttttttcagcagcggcattggtttttcgatacggtcacggatgttaccggcatccattgtgccggaaaactcatattccgagatgaagtcggtcagcatagttggatcaatttcttctgtatgagcaaaggcgacaatttcttcacgctttgcctcattttcaaagtcattgtaggcagcgtcaatttcatctgcgctttccagccccacaacaacacgatccaaaaaggcttgcagaatctccaccttgcggagcaactgcggattatcagttcttcccaattcttccttgatatgcttaatatcataatccttctgtttggcatcatcgaagtgaatgttgcggataaggttcatgatataagcaacattgattcgatcactttccatcagctcaatgcagaaatccacatcgttcaggacggaaacaacttctcgatctttcttttgctttgcgtaaagcatcagatacttgctcttatagtcctgatattcctgctcgctcatgatgagagagtcttggtcgaagctgaactcaatgaaggtttggagcgattgcaaatacttggtcagctcacggaatgtctcaacgaaaagcttctggtcatcctcgttctgcatggtgtcaatatctgctggagtctgagcgatttctttcaagcgagtaaccatttcattgtacttctcgacgaaatagggatagtcgggaacaacaatgccagaagtatcgtggctctgagaaaatagggtaagagcgtcatctgttctctttttcagattacggtagcagatgataatgccaaagggtttcgtttccttttcaacacggttggttcgtgagtaggcttgcagtaggtcgtgatatttcaaatctttgtccacatagaggacggacagctgcttgctgtcaaagccggtcaggaacatatttactacaagaaggatgtccagagacttggttttctttcccttcacacggtctgaaatatccttatgataggctgagaaggtgtccgtcgagaaattggtgctgtacatctcgttatagcctttgatgatccgttccagagcgtcccgactatgctcatctttaccttctgcttcttcgttctgtccataggagaagataccgctgatgttcaggtcatgattgatcttcttgaagatgtcatagtatttgaccagagcttcaatcgaagagacggcaaagatggctgtgtattgaccatttcttgtcttcgctttatggttttggacaatgtggtttgcgatcatcgacatccgttcctcggacatatagagttcgcctacatcaatcccatctgccattgtgggatcgtcccagtcgaaatcaccctccatcgtcttgatgtactcaatatggaagccaagaacattgttgtcgaagatagcatccttgatgagatagttatgtacgcattctccgaagagcatttctgtggtctgtgtgatttttccctccgtctttccgttgacctcaaaacgaggtgtgccggtaaatccgaagaactgagccttctggaaatgccgaacaatgtccttgtgcatatcaccaaactgactgcggtgacactcatcaatgatgaagacaactttctcgtccttataggcatccataacttttgcgtattgaggacgcttcacagcgttcgccatcttctgcatcgttgtgacgatgagctgccggtttttgtcctgcatctgttttacaaggacatcagttctatcagtggcatcaacagaaccggcttcgaatttgttgaactcttctgtggtttgggaatccaagtccttccggtctacaaggaagataacctttttgatattggggttggctgcgaggatttgtgctgtcttaaaggaagtcagcgtctttcctgcgccggttgtatgccaaacataagcgttgcggttagtgagcgtggcttgccggacaagagcctctactgcatacacctgatagggacgcatcaccatgagcagcttgtccgtgtcattcaggatggtgtatctcgtcagcatcttgataatatggtctctggcaaggaaggagatagagaactctttcagattggtgatacgcacattgttgaagtccgtccagaagaaggcaagactgtgaagcatatctctgtcggagttggcaaagtattttgtatcaacgccattggacacaacgaaaagctgaatgaagtggtacagtccgttgtaggaatgctttttatagcgcatcacttggttgacagcttctcgaatatctatgccacgccgcttcaactccacttgaatgagaggaagtccattgacaaggatcgtcacatcataacgattgacatacttcccaacaacggttgtctggtttgttacttgaaaaatgttctttgtgtggtcggcatcgaagaaggagaggtacactttcgttccgtcctcacgctccagcacgaacttatctcgaagtatttttgcgctctggaaaacagattttccgagcataatgttgaacactcgctcccattccttagatgtcaaagggtggtcgagtttcgcagcattgaagactgcaaactgtgttttgaagttctcaaccagagcgtcatagtctggtatagagacgctggtgtagccctgcttattgagctgttctataaactgctgttcaagggctgcttcactttggtatgccatatcttcatctcctatacttgaggattttttataaaaaagattgctttttaagaaagcccgttttttattttcagacttattcgtcaacaaattccatgatgtcatctattgtgcaatttaatgccatgcagatttttcctaagacatccgtagttacattgtcgccatgatttaatttattgatagtataatgactaatcccggcggccttttctaaatctctttttttcatatcttgatcaatcagtattttccaaagctttttgtagcttaccttcattcctatgcctccattcaaggaaaatcacaactactcacagtatagcattgttttgtcaaaaactcaaacattgtgtttgttatcgctgtaatataattcgaaaaagtgactgcgtattcaaaaataaatttcccctgaccaaacttggctcatctgatgataagcttgcttattgctccggtacacatgaaaatctatatagttcacagtgttggtttccctgcggtgcagtcgatggaaatcagtatcccatcatccaggcgcagctccacgcaggtggtgtccaggttgaactcacaggacaaaatctttctcatagtcgttacctcctgatgcctaaatttcggttgattttccgcagaggcacaagctctgtttcgttaattttagaatctggcaagcaatgcgtgtggctatccacacacaaatccggcaagcaatgcgagtgttaatacacactcacatttcctgccgtctgcttgttgagggcagcgcccccaagcccccttgaacacagaatttcattctgtggctgcgcgttctgtgaacgctttgaaagggtacaccaaagcgccgttccctttcagatgccctggaacaaatcgttcctcccttattgcctgatggctgccgtaaaacacagtagccctcgatagatgtgtgggcaaaatgcctacctatcgttctcttttactccgcatcctatgttctgtttttttgcatggtgtgtcgtgaaacacgacatcctatggtgattttggggtaccctaaaatggggcccctttgggataatggggtggcaaaacaccaccccatccgagatactttttagcggaatttctttgcacaaactaccgttagctattcctcttgccagaaaaaacaggagcgtgacacactcctgttcaagccaacagggagaagattgactttggtgctaatttcatctgcgagattagtatgaaagtaagcacctgttaccaccgaaaatctgggaacactccacgcttgtccagatactcctgccgggcctgctcccgttcttctgcggtgggtgcagtcttatattttgcatacagttcatgccgcaccatcgcatctaacttttgctccagcccctgatgaatttcctcctcataatcatcgtcataggccagatgatactccaccaaagctacaaaaaggtcataggggatttgtacgcttttcatattcatttcctttctgcgacggttgcgacgatagcgacggtgtttttgacggtatcattttcaccgtcgcgaccgtcgctatcgtcgcgccccttattcttcgattacttcacaggcggttggctctaccagcatataggtcaatttcacttgacgaccggaatgtttggccttattttcatagccaacatgatattcctccagaagcctgcctgccttgacattcaggtacttggtaagggcattggaagccattcccgtttggatggcttcagccagttcggatggagagccgatccattcccggcactcaagggaaaccaactttgcaaccgcttccagcaccgggtctggcggttctttatacagctcgttttccatgcgttccagattccagatctgggtctgcgggtccttcttcaagtagaggatctgatccggctgatcccgccccaccaccttgatggtggcgtccaactccgtgcgttttttcttctgcatcagcagagaaccatccgcacagcccagcagcccggtggtgccggaaatcgtctcaaaggaatcgtctgcctgctgcttccgggtatggtggacggtcagaacacagataccgtgctgatcagcaaactgcttgattctgccgatgatctcatagtcgctggcataactgtacgcttcgccgcctacatcacggattttctgcatagtatcaatgatgatgagattggtgtccgggtgctcctgcacgaagttcttcaactgttcatccaacccattcccaatctttccggcggcggtggcgaagtggaggttgggggtatcgttcacgccgtacatcataaacatccggctctggatacgctgaaaatcatcttccagcgcaaggtaaagtaccgtcccctgatggactttatatccccacaaatcctgcccggtactgacatggtaggcaatctgagccaccaggaaggacttgccgattttgggtgcgccggcaaggatatatgcccctgcgtaaagcagaccttccaccactggtggcctactcttataggtggtttggaacagctctgtcatggtgagtgtatgcaggtatcgggggtctgtcatacgctgtatcttgcggtacatttcttccagaccgtcctgggagtttacaatttcatcgttgcttttttgcccggaagtgggtatactattttcgtaagtttttgagattgactgcccatcatctgcgccaacagatggaccctgggcggtcattttctttttctcatcgatcataggcgaattcctcctgcatcccgttcataatggttgtaatcatttggatcgtgtccagcagctcgtctctcacaccctgcctggcttcgatccggcacagctcgtccagcacggcagacaactgatcccgcagggctttgtaaacctttgggttgccctgcaccaccac

SEQ ID NO: 3319 - DNA, 250 bp, Unknown
  gut microbiota DNA sequence
agtgatttgagagattgactgcccatcatctgcgccaacagatgaaccctgggcggtcattttctttttctcatcggtcataggcgaattcctcctgcatcccgttcataatggttgtaatcattcggatcgtgtccagcagctcgtcgttcacgctttgcccggcttcgatccggcgcagctcgtccagcacggcagacaactgatcccgcagggctttgtaaacctttgggttgccctgcaccaccac

SEQ ID NO: 3320 - DNA, 3066 bp, Unknown
  gut microbiota DNA sequence
gggctgattctttcggatggggccagcggcgtacggaccagtccggtgccccagggagattatctgtcccggttatttttggtggaggcacagccttgacaaaaacctccgggcaggttatacttaacaggcagttttcagcagatatccatgcaggcatttgctgatacatctgcgtatgtacggcctaatatgtcataaagtttccacgcagccggggagatagcggtgccctgtacctgcaatccgctccagcaggggtgataccttgcctcgggctgtttgctgcgaagctgccttgtgtaagtggcgttgacgtctgggtcttacgcaacgggaatccgtgaaccgtgtcagggcaggaatgcagcagcactaagcggaacctcccgtgtgccgtgaggcagcctggattgagttaactgcatgagtaacgttcgtggcagcagcacaaagcaaggtgcgtggaatttaaaaatgggatataaatctgaggatacgtcactgtatcaccggatttatgtcccatttgtatttctgcacggcgcgtttccccggagccggccggctgcccggattctgcggctggccggttggcctgcatgaggctgcccggttggccgaatttatacttgccccgataacacctttgcgttataattacaaaatgggtataatagaaccattcccaggaaacataacagaaagtgaagaaactctataaggaggaagtgcaatatgagaaggattgggatgctgaccagcggcggagactgccaggcactgaatgccactatgagaggtgtggcaaagtccttatataacatgtttgatgacgtggaaataattggatttgaagacggatataaaggacttatgtatgcagactatcagatcatgaaatcatcagatttctcagggattctcacccagggcggtaccattctcggaacttctcgccagcctttcaagctcatgcgcactcctgatgagaatggactggataaggtggaggccatgaagcacacctacaaaaagctgaagctcagctgccttgtcgtgctgggcgggaacggcagccagaaaacagccaacatgctaagcgaagaaggacttaacgtggtatcccttcccaagaccattgacaatgacctgtggggaacggatatgacatttgggttccagagcgcggtggatgttgccaccaatgccattgactgtatccataccacggctgcgtcccacgggcgggtgttcatcgtggaggtcatgggacataaggtgggctggctgaccctgtatgcaggtcttgcaggcggggcggacattatacttcttccagagataccatatgatatcaatattgtgtgcgatgccctgaccaagcggtccaaggcaggcaagcgcttctccatcctggcagtggccgaaggcgccatttccagggaagatgccaagatgagcaagaaggaactgaaggaaaagaagaaaagcggagtggtatatccgtctgtggcctatgaaatcggggccaagatacaggaagtcatcggcagcgaggttagggttacggttcccggccatatgcagcgaggcggtgagccatgctcctatgaccgcgtgctggccaccaggctgggcgctgcggcagccaggctgattgcccaggagcagtatggctacatggtggcggtgaaaaacaacgacatcacccaggtgcctctctccgaggttgcaggaagacttaagacggtggacccggagtgttccatgattaaggaagccaagatggtgggcatcagctttggcgatgaataacagcatgataatcaaaataaaggttattttagaaataaatttatataaacaagatagaataacaggagttgcctaatatgtcatatacggcgttataccgcaaatggcgtccggtttcctttgaggatgtaaaaggccaggacccgattgtgcagacactgaaaaaccaaataacgtcggagcgaatcggccatgcttacctgttctgcggtaccaggggaacaggtaagaccagtatagccaagatatttgccagggcagtgaactgcgaacatccggtggacgggagtccctgcaatgagtgtcccacctgcaggtccattcagtcgggttcctccatgaacgtggtggaaatagatgccgcgtccaacaacggtgtggagaacatacgtgatataagggaacaggtgcagtatcctcccacagagggacgctacagggtctatattattgacgaggtccatatgctttccataggcgcctttaacgctctgttaaaaacactggaggaacctccctcctatgtgattttcatactggccaccaccgaagtgcataagattcccattacgattctgtcccgctgccagcgctatgattttaaacgcatatccttagagaccatagcaaaccgcctgagggagctgactcaggcagagcagatacaggtggaggacaaggcgcttctctatgtggcaaaggcggccgacggttccctcagggatgccttaagccttttggaccagtgtgtggcttttcattacgggaaggtgctgacctatgacaatgccctggaggtgttgggggcagtggattccggtgtgttcagccagatgttcggcgctattgtggagggcaggacaaaagactgcatatgcagcctggaggagattgtgattcagggccgtgaactgggccagtttgtcaccgattttatatggtatatgagaaaccttcttttaatccagagcgcggacgacgcagagggtctggtggatatgtcggaggagaatttaaagcagctgagaagcgatgcgggcaagacagacggaaccacgctgatgcggtatatccgtatcttttccgaattgtccaaccagctgcgctatgccagccagaagcgggtgctggtggaagtggcgcttatcaagctgacgcgtccttccatggagccaaacctggatgccatcctgcagcggttgggagatctggaagcccagatggaggatttggaggcagggcgcatgg

SEQ ID NO: 3321 - DNA, 8795 bp, Unknown
  gut microbiota DNA sequence
ccttctggagtcatttgtcaagagataaatccaaattcttttcatattatttaaggcctcccgtttcctgccggcacatcatgtgccatttccctctcagtatcaactaaatattggaattcatcctccactttttacataaacactccaaattcaaggctttttctctccactttttatactcttgtaacacttgcttaattattttaacttgacaagtaacatttttgtaatataatgaaggtacaactttataagccatataaaaccataacaatatgataagattgcgaggtcgttgtatgcattactttaagaaaacccttctggccgcagccatggctgcattcagcctcacggtggcttttccggcatttgcggacgagcctgtgggaacggatgtgaccgtagtggaggccggtgcatcagatacgtctgaggactcgtcccaggaaatccaggaaacttccgcttcccgggaatccaaaggccgcagagccgctgtaatgaatgaagaagaatacatagcccagggaccaggcgcccaaaaggaggagaaggaggaagctccggcccccaaggagacatcacttggacgctttaccattacaggatactgtggctgcgaacagtgctccggcggtcataatcttaccttttcaggtacggttcccactccaaaccacactatttccgctgatttagattattttccccttggcaccaggctgaaagttgacggtactgtctacacggtggaggacaaaggttcttctgtaaacggtaatattctcgatattttctacggctcccatgaggaggccctggccaaaggtacatacactgcagaggtatttttagtgcaggattgatgcatgatgtaaggaaaaaactaccaggcatatgagcctggtaattttttgcctttctccggaaaagatagcgcagggacagaaattattaccaaaattcagctgtatatggataaaagtggtgttatttccatatttttccttgacaacaggaagaaaatatgataaaaacttgtttattgctcatatattacaaaagtattacatattatttattaatgtgttaaaaatctttttctaattattacttgagcaataggaggtattacaccatgaaattaagacacttactgaccggaaccattcttaccgtcagcctgtttgcggccactgccatcacagcccttgcagcagcgccaaagggaaggttcgaaacagtgaacagcaccaccatcagcggctgggcttacaacagcagtacgcctgatgatgcgcttaacgtacggatatccgtcaaagataaaaatacaggtgaggaagttttttcccagaggatgacagccggggaatacagcgacaagctttacggcagcggaaagggaaatggctgtcacgcctttaccctcaatatggactggagcgcgctgcccgatggcgtttatctggtggaaggctatgtgggagacaatgatttttccaaccccagaacctataccaacggcaaccctgacgccaaacaggaagcccctgccgcccaggcccagaacctggttcccctgggcgtgttcaagacaacagggtattgcccgtgcagggcctgctccgagggctggggacgccatacctgcaccggcgcagtggccacggccggccacaccattgccgttgatccgcgggtaattccctacggttccaaggtgatgattaacggtgttgtctacacagcggaggaccgcggcggagctgtcagaggcaatcacatcgacatcttcttcaacacccatgccgagacacgccagcacggcacccagagcgcagaggtctatctggttcaatcataaagaacaacccggcaaaagcccataaaggcttttccgggttgttctttttccggtttatagttttcacgttcaaacaggctctaaccctcattgcactcccgcagttccgtaccatggtagaaaaagtccaatatctgcttgtagccctttcctgtctttgccattccctgggcgccgttctggctcatgccgacaccatggccaaaaccgcctccatatatatggaaggaaaggcttccgtcctcccctgtcctcttctcaatggcgataaaggcgctgggaagggtggcgcttccggtcatggtgcccccgtccttcttggtgatgatcagggacgggtttcccagtgcagagcggatggcagactgtcctttgatggtcacggtgccgtcagaccccgtgactgtaagctcgcccgctatgccccccggacctctgtctgtgacggtcatatcctgtatctggcccgccccgctgatctgggcggaagccacgtcggccggaagatctgtctgccagcggaacatggggtaggaggtgtcataggcaatcacatcctccctcttgatataggattcaaagccatcgttgtcctccttgcccaggctctttcctccctcttttacctccacggctctcagataggggtattttccgctgtcagtgccccatacgcctgcatctgccgtgcgtccgcaggaggtggaaaaataaaaggcctcaatgggtttatcctcatagaacagcatcttcccgtaagtctcctttacagcctgggtggacttatcattggcagatgtattattatagacctggaaatttgtgctgtcatccacatgggcgccatactggctgtaggtatttccctggatctggcggtaggcataggtcctggcgcacacggcctgggccttcagggcttccttctcataggacggcggcatttcgctgggcactacctttgtcaggtaatcctccaaaaacaaatcattgacaagaaccaacccctccggtgttcccttgatttccaggcttccgctgtaaaccggcgtgccctggctccgctcaatggatcggatagtgattgcctccggctcatccggcgtaatgatcatacgcccatattccagataagggctgtcaggaccaaccgtaagctgcgtgcctgcctccaggcgctctcccaccatctttcccttggcattctcatattccaaatcagcgccgcttcccagcaccagatccgcagatgcgtggaacacactcttaaagccggtgtccatcagaaggacgcggatggtcttggcgtcaaattccctttctaaaagggccgcgcacagctttccgtctgctgccacaaattcctgaaggttatagccaaccagtatgtccgacgcattcagcaccttaaaatcaccgtataccttatatacatgaaaattaggagccagaggaatctcgccataaccttctatctcaatggcatcctctgttacggacagcaccttgccgcttaacctgtcccttttcatagtgattttgaccagcttgccgtcctccatgtgcaggtcagccagattcccggccatcccgtcctccccgccaagcttggcgctcaccgggaattcccggtaggccgtacccagatacgccttaaaatgcctgccgtcgctttcagccagccagacattctcatagaccacgtttctggacacaaggctggatgtaatcatctccccgctcctggccagaaaccgtatctcacagtccaggaacgcgtccagggcaagtccctggaatccaaagttgccaaccgtggtataggcggtccagctctcagcctggtcaagattggacggggtgccgtagagcacggcctccatctcctccaccttcccctccgggtcagtctccttcagaatggaaccgtacagctgccaccagtcctcttccggaaatgcctggtcccggttgtttctggtggaaccggcctgaagcttcagcttgccggacacctggccggccatgtatgcagcctccgcgtatgtaagatatccctgggctgaggccagggaagccggcgtaagctccgggtccagatagccctcgtcgtagagataatccatgtatttgacaaaccagttgtccttttcttttgcggaaaaatgggaggttccccgctccttggccctcttttcacactcttccttgtccgtaagggccagagccatggccttcattgcctgtgcccttatgattccgtccctgggcggctccagctttactattatcaccatcaacgtgaccaccaccagcaccacgccgcttacccatgcaatcatcctgttcttcatattcggtccagctcctgtaaacgaagtaaagcagcggggtaaccgctgcttttatcatgtgtaaccccagaatgccgtctcttacttattgacgcctagcaatgctaggtgggcaacctcacttaaacatctgccttccactctacggaggcctgacatccgcttaaaaatattggaatcccttttgtctaatgtaggttcaaaattggtaagagtatcgaacaccccaggaaattacagttccacttcttttatctggtgttattataccccaaagacttgggtttttcaagttgatttttctgaacatttatggaattttttcctcaatggtccttctttccacacccgcgtcagaaatccttgcaaatataaggggctccggttccggcatctgtttccccagggtgcaggaagccagaaatttttccattgccggtccaaacagttcctcatgagaggcgtaaaggactgctatggtctctccctctctcacactgtctccatattttttctccagaaggatgcctgcgctgtaatcaatggtatcctcctttttattcctgcctgcccccagcatcacagaggccactccgattccctctgtatccatatgggtgataaagccggtctcagaagccttcacttcccggctgagaggcgccttatgaaacagtccaggattttccacgtaacggccatccccgccctggctctcaaccatggatttaaggcatttaagggcgctcccatcctccatggcgccttgggcaatcttcctgcactgttccatatcccccctgcctgccatgtgaagcatattggcagccagttccaggcatacgcaggtcaaatcctctggtccgcggcccttcagggtctcaatggcttcttccatctccagggaattgccgatggcatggcccagaggtacgtccatattggtgatgagggcacagcagcgccggccggccagggttccgatggaaaccatctcccgggccaggctgatggagtcctccagggttttcataaaggcgccgcttcccgtctttacgtccaggacaatgcagtcgctgccggccgccagttttttgctcatgatggaggaggcaataaggggaatactgtccacggtggccgtcacatccctcagggcataaagctttttatctgccggaaccatgttgcccgactgaccgataagagccaggccgttttcattgacaatgcggaagaattcttcccttggtatggcagtcttaaacccgggaatactctccagcttatccacggtcccgccggtatgtcccaggccccgtccgctcatcttggccaccttgacgccgcaggcagccacaatggggcctgtcaccagggttgtcttatcccccacgccgccggtgctgtgtttatccgccttgattccctcaataggcgacaaatccaccatgtccccggaatgcgccatctccagggtcaggtccgttatctcccggtcatccatgcccttaaaataaacagccatcagcatggccgacatctgataatcaggaatgtctcctgccacgaatctgcgcaccatataggcaatctcctccgtcaaaagggaaccgccccgctttttcttttcgatcaggtcatacattctcatatcacgcacctcccaagtggtcaggtccaaagctctccggaagcagctgggccagggtatattccctgtattcctccgcgcttttagccaggataatgcaaaatgagtccggattgcagaactcccgcatgacctgccggcacacgccgcagggcgggcagtaatcccctgcttttccgtctggacctccgcatatgacaatggcctcaaactccctctcgccctcgctcaccgcctttgcaaaagcgcaccgctccgcacagatgccgggactgtaggctgcattctcaatgttgttgcctgtgtacaccttcccatccctgcaaagcagggctgccgatacatgaaaatgggaatacggtgcataggagcgcccaagaccgtccagggctgtctgtatcaataattctctctccaaattccccctcctccttctgcccgggccagggaccggaccttcggatactgcctccagcccggccccggcctgttgttctgctaccattataatataagccagccccttaaacaagggaaacaaactgcccctgcaaatagcttctcaaatcctccggggacagggtgacctgcacgcctctctggcctgcgctgaccatgatggtgtcgtatagctgagccatttcttctatataagtagggaaatgtttcttcataccgatgggagaacagcccccgcggatgtagccggtgatatcaaacatatcctttacgtgaatcatctccaccttcttctcccccgctgccctggcagccttcttaaggtccagctcctcatccacaggaatgcagcacaccagatatccttttttctcacctttcagcaccagggtcttatacatcctgtcgtggtccacccccataaggtctgcggcgtggctgccggaaaggtcgttttcatccacttcataggtacctgtttcatacactatacgggctgcgtccagaagacgcattacatttgtcttaaccataccaaacactccttttaaccggcccgcttttccctgcggaccatgtttcaggaatatcatactcttttttccgctgcccgtcaatcaaacccaaaacagcctcccttaaacgtttaaaagaaagtggaatggagtattcacaaagtaatattatacggttataatgggaaataaatacgcaaacggcaggaaaggaaatctcatatatggaaaagaatgatatcatcatcatacacggaacagattacaagaacatggccaagcgggtcctggaacaggccggcgtggcggcagacatcggtgatgtgaataaaaagattgcattaaaacctaatctggtaactgccaaggcgccctccagcggagccaccacccacagtgagctgctggccggtgtcatagaatacctccgggaacacggctttcaaaacatcaccatcatggagggatcctgggttggcgaccacacggaagacgctttccaggccgcgggataccatcaggtttgcagccggtacagcgtccccttcgtggacctgcagcgcgatacatggaaggaatacgatgcagcaggcatgaaaatcaagctgtgcgataaagcagctgccgtggattacatgattaacatgccggtgctgaagggacactgccaaaccaccgtaacctgtgccctgaaaaacaacaagggtgtgattcccaattcagaaaaacgccgcttccacaccctggggcttcacaagcccattgcccacttaaacaccattgcccgcagtgacttcatcctggtggacaatatctgcggtgatttggattttgaggagggaggcaatcccgtggtcatgaaccgtgtgctgggctttaaagatccggtgctctgcgatgcctttgtatgcgactgcatgggttattcagtggacgacgtgccttacataaccatggccgaaaaactgggggtgggaagcacggacacagcccatgccaacatgatctatctgaaccaggccacagaggccgacagtaaattccgcatgaccaggcgcgtacagcacctggctgcctacacggccccggaagacgcgtgcagtgcctgctacggctcccttatatatgccctggaccgcctgaacgacatggagtatctgaggaagggcctgcctcctgtatgcatcggccagggctacaaggggcaggatggcgccatcggcgtgggacaatgtacctcctgctttgccaaaaccctgggcggctgtccccctaaagcagcggatatcgtagactttttgagcacccaatggaaataagcccgtttccttaaagtccccgctgcctgagccaggccatgatatgggccccgtatgccttttctttcttgaggagggtaaaatggtccgcccctttgacaaacaccacctttgaatcgggaatctgttctcccatccacagagagtggcgggggcggatcatgtccctgcggcccgtaagaatcaggacaggcgcctggatacaggacagcttatccttgtccagcctgggccatctggccataaggcctaacagctggcggcttttcacagccctttccctgacgccccggggcagcggcaccttttccagaccgcgccaaagggcgtattttaatttcacctccataagcgaggctgcgctcatgcctctgggcagggcatttccgctgaccgccaccacggcggacacacgccccggatagcagctggctgtctccagggccacatttgccccgtcgctgaagcccagtatcaccgccctgggcacatggaggaattccatgacctggaccacatccgccgccatatccgggatggtcagatctcctccggcagcctcctctttcataagagaggacccgtggcccctgctgtccatgagaatcaccctgtaatacc

SEQ ID NO: 3322 - DNA, 24495 bp, Unknown
  gut microbiota DNA sequence
aaaaaaccaattgccagacactttaaaaggaggatttttattatggaagtgaagaaacaaaacaaaagtatgtaccattgggtaatcctggtctgctgcatcctgaccctgatgtttgcctactccacacggtttggattggcccagctgtttaccacgcaaatcattaaagagaccggctttgccaccagcgcttatttcctttcaaccacaattgccagtatcatctgtgtatttaccggacccatcgctggaaaactgttaagaggcagatatatgcgtcccaccttcgttgtctgcgtcatcggtaccatgggcttttattcctgctacggtttctgccatgagctctggcagttctatctggtgggcgcccttcagggattctttgcaatgggcgcctgtaccatacctgtgaccgtcctgatcacaaactggtttgaaaagaaccgcggactcatgatcagcatagccatgatgggaattagcctgggcggaacctttctcagtccgtttttgtcctggaccatcggaatgtttggctggcgcagggcctatttcatcctgggggctgtaagcctgtgcgtgctgatacccatttctgcctttattgtcagacgttcccctgaagatgtggggctcttcccatatggacatggagaagaaagttccggtaaacatgggaaaaacaaaagcgttccggcaaacagctggaacgccacactgagtgaagccaggaaaacaccgattctgtggatgtttgcagccggcggattcctgatttattttacatcctgtatcatgggacacatgagctactacctgcagaccactggttttgacccttcttccatcgcagcctatatctctgtctattccattgtggctctcgcgggaaagctggttctggggcatatgtttgaccgtttcggacccaagggaggcattctctttggctgcggcacattttttatcttcctcatctgcttcattatggttcagggaggtcccctcatgctgtatctgtcagctgttttctatggatttggcacctgcacggctactgtggccattcccatcatgaccaccagtattttcggttcaaaaaactacagtgagatttatggttttatctccgccttcaccatgaccggcggcgccatcggcagttccggcatcggcctggcatacgatatcaccggctcctataaacctgctctgaccatccttgccctgctcactgtcctgactattgtaatcatgttcatatgcatcaatctcagtcagaaacgcgtggaaaagccggcagataagtgtgtgcagatgccggcatagaatctgccgttccggcacagagttcatcccgccttatttctccagtctttcaatcagccgttccagcactgccctgacagccgccgggtcctttcgtcccggcggtaccctgcgccatccctgttccagagtggtataggccgcgccgcagagtgtgggttcccggcacagtctaaaaccctcacagtccatctgcaccatccaggacgttcccctgcaccaacagttcatggcaggaatacggatgtcgtcagcatctgcggccagaaacagacggtaggccggaaacgcttccaggcgcagggccagttccctgagccctctggcataatgggccggtgaaaccaccacctttcttttccccagaagggacaggctggtgctgataaaacaggtgtctgccctgtgttccatttctcccagctgcagaatctggataaattctccctgtccgcctgtgagctgattctccaccaggccccgcagctgtctgttgatttcccttaaccgggaagctgctgcacctgttatctcattatccctgagaatatcatcaaacagctgttctccggcgctcatgaaagccggcgccggaagataggaaaacagagtctcaccggctcgcccctgttcccgcagcatcctggccgcctctgcacccaatcccatggaaaggtctgaaaacatgggacggcagctggtgagaaccatctccaccacatttctgtgctgaagtatggaatacgcatccgtgtagaccgtggcggaggtctgttccggtgacatggacatacctgcaatgctcatggcatgctccagaataaaaaaagaaaaccagtaaatgttctcatcataatactggtgataataccaccgggcattgcgatggaatataaggggactgcacagctgaaaaaatgccacaaacttgtcgaccgaaacagaaaaatgcagggccgccttaaaaacaaatccccggtccagcagccggaccatccgtaccacccattccctggcataagcagtatcctccagcagccatccggtctgctccgaatccacataaaacagctctcccggcgtctccatggcctctgcaatctccaaaagatcggaaatggcctgacgccttccctctccgctggtatatatggcaatctccgctgtacagagtgcctcagcgcgaatggtaaatgcctttggcaccgtaaaatgccggtcattcagcacgcggtaaagcagctcttctgttcccgacgatccgccagttcctgatataccctctgtcccccatatcccctccgcctctgacaggctgccgtcccccctctttcccctctctccttcttccctctttggttcctccagaggaaccagagagcggagagcatccgtcagggccatggggttctgctccagcagcatcctgcatacctcatcaaaatatacggacttagcgctgagccgcctgctgccgctgcgccatttgctcacaaggctggcgtccacatgaagccttctggccagggctgctgtggacagtcccagtcggtccatcagataacccagcgtagataattttcgttctgtcatggaaatctcctcctctaaaacatccctttcttggaagcagtgtgacccgcgggaccaccggcagtatcacccacagtaccgcagacactattaccggcagcatcccttacagtatcaccagcagcatcccttacagtatcaccggcagcatcccttacagtatcaccggcacctcctctgacagacagctgtcatggtaccggcgctgacaaagaggccaaaccccttttcaaacaaaaaatcccttgttatactatagacatatcagcaacttgcacaaaagtcaataaatattaagaaagttattggccaaaataacaatcttttttaataggtctggtccggaacagacccgtaatctgaacaacaaaactgtatatcaaagaaaggggtacgcaattcatggcagagaataaggactataaatatgtagaccactatgattttaatgaggaacttcttaaacaggcttttgccgaggcccgcaggatttacaaggagcggggcttcatgcgcaagatgggctttggaaaggctcccgccattaccaccgtagatatggccagggcctggatgagtgagggacacccgtttacctgcgaccactccgaggaagtctgcgccaatgcattaaaggtattggaagccggccgcaaatcgggcgttcccatcttccacaccaccaccggatacataggaaaacagcagtgggatcttccccgctgggatgaaaagatacctatgagcgccctggatatcaattccgaatggctggaaatcgaccccaagctgaaaccgcgccctgaggagccggttatccataaaaaatatgcttccaacttcttcgggacccatctggcccagaccctgaatttcctgggtgtggatacggtgattgtcatgggcgccacatcctgtgcctgcgtaaggcatacggtcatggattccaccggatacggctttaagaccattgttccggagggaactgtgggcgaccgtgttccgggcgttattgagtggaacctgtttgacatggaagccaagtttgccgacgtggttccggtggaagaggtcgtcaaatatctggaaggaattgattccaacgtctataccaagcatgagcgttcactggattaaccgttaatccgccaggccaggttttactaaatatgatgcgccggtccccattgtcaggaatcggcgtatcccaggtccatgaaaggagcttatatgagccttctaataaaaaatggaaccattttgaccgccgccagtgaatttacaggtgatatctatatcgagggtgagaccatccgccagattggaacgaatctgagcgtaaacgccagccggaccattgacgcttccgggaaatacgtaatgccgggaggagtggatgaacatgtccactacggttcctttggcggacgcctcttcgagacagcggaagcggcagcagcaggcggcaccaccaccattgtggactttgccccccaggaaaaggacgtaccgcttctggacgccatacggcggcaggcagccaaggcagaacacacttcctctgtggactttgcattccatgcagtcatcatggacccaaaggaatctgtatttgaggaagtcaggcatctgccggaggtgggcgtggccacactgaaactttttatggcatacaagggcactgcattttactgtgatgatgaagccatacttagcgccatgatgaatgcaaaggacgcaggcgttaccatgatggtccacgctgagaacgcggacatcataaccattctgacccgttattacctcagccagggcaagactgccccggtttaccactactatgcccggcctcctattgcagaggaggaagccacaggcagggccattgccctggcaaaggcagcggactgcccccttttcgtggttcatgtcagcatacgggaagccatggaggccatcaggaatgctcacaatgacggctggcccattttcggggaaacctgtacccattatctgactctgaccacagactgcctggataaaccgggctttgagggagccaaatacatatgttccccgccgctgcgtccccaggagcatgtggacgccctctggcaggccgtgcgcgagggctggctgaccgcagttggttctgaccactgcgccctggacggaggatatgagggagcaaagaaaaaaggcaccaacttttccaatatccccaacggctgtcccggagtacaggatcggctggccctgctgtggacctacggtgtatgcaccggaaaaatcacccgccggaaattcgtggagctttttgccgccaatcctgccaaggtggtgggactgcccaacaagggagatctgcgcattggcgctgacgctgatgtggtaatcttcgaccctgaatggaagggaatcatcaccaacaaagacagccttcacggtattgactatgaaccatttgaaggatttgaaatccagggacggccccaacaggtctttctgcgcggccggctggtggccgaaaacggcaggttcgtaggcgaacgcggcatggggcgctggcagaaatgcaagccctatggtctgtgttatgactattatcacaaataagcgtccccgcatatatccatatgcataaaaggtgcggcagtgtcacatgaagtttccgtgatactgccgcaccctttttatcattcacaccttgacccggcctctggcttactccttaaccggacctcacttcttcggttttctccgcagctttagttcaatcccctgctcccctgccctttccagaaaaagtgtttccgcccgtttggccttttcctttagggatagcccgtccccggcttctgctgccagaaccttcattacgtcccttatatcctgcagcgttagcagattgaccgcctggcagtaaaatgttttctttcgcccatcattataattctccaacagcatctccaggtgccgggacttttccatctgctcctcattataacgctccactcctatttcctctgcccgtttcatgtctttgaaccggttcctgtgtgtgatgaaggaatcatattcatcaattccctcatatatgtcacagggaaacgaacggcactgccagcaatactcaacccccgggtgctgtaagctgcaccttgccattgcgcatggctggttgccctccccgcccccgcagccaggacagtatttgcccagatacatggtgcagagtccgcaattaagcccgcacagggacagcagcctgttctcacgtttaaaccctttcatccctctcctccttttccccattcaaccattttccccaattataccattgattccatctgtctgccatccgtcatgttaatataccgctaaaaattcgttaaattattgttaatacaattttcgttatatgacaataatttactctcaaatattaaaattatccagtgattatacacaattttgtcgatataataaaacccggttacatgttctgcagacattgacatacataaataaagagagggattggaaatggtgagtgttttaatgaaaaagcttgcaattgcagctgtggccggcgctgtcatggtatcggcttccggatgcagtctcgtttcctcaggcaaaaggattatccgcgtgtcccacgcacagtcggaaacccatcctgaacacctgggaatgcttgcatttaaggaatatgtggaagaacatctgggagataaatatgaggtgcagatatttcccaatgaaattctggggtctgcacagaaggcaatcgagctgacccagacaggagcaattgattttgtcattgcaggtacggcaaatctggagacatttgcggatgtctatgagattttcagcatgccttacctttttgactccgaggaagtgtaccggtctgtgatggaagacacagactatatggaaaatatatacaagtccacggacgaggctggtttcagggtggtaacctggtacaatgcgggaacccgtaatttttacgccaagactcccatcaacacgccggacgatttaaagggcaagaaaatacgtgtacagcaaagcccggccagcgtggacatggtcaatgccttcggcgctgccgctgctcctatgggattcggcgaggtatatacagccatccagcagggcgttatagacggtgcagagaacaacgagctggccctgaccaacaataagcacggcgaggtggccaagtattatacatacaacaagcatcagatggtaccggacatgctggttgccaaccttaagtttctaaacagcttacgtcctgaggaacttcaggtattcaaggaggcagcggccctgtccacagaggtggaattagtggaatgggataaaagcatcaaggaggcaaaacagatcgcagcccatgatatgggcgtaaccttcatcgaaacagatgtggaggcttttaaggcaaaggtactgcccttacatcagaaaatgctggaaaacaacccgaaaatccgggacttttaccaatatatacagaccgtcaatgattccaggaaaggagaccattaaaccatggacacaatgcataagttaagggcagccatcatgaagatactgggtgttgtcattacccttctgtttatccttatgaccctggttggcacctatcaaattgtgacgcgctatttcttcaaccgccccagcaccatatccgaagagcttctcacctactcctttacctggatgtcgctcctggcctccgcctatgtattcggcaagcgggaccacatgaggatgggattcatggcagacaagctgaccggaccggcccgccggtatctggaggttttcatcgacgcgctcagcttcttctttgcaggggttgtcatggtatacggcggcatctccatcacaaagctgaccatgatacagattacggcatccctgcgcatctccatgggatggatctacatcattgttcccattgctggcctgctgattatggtattcagcgtcatgaacgcagcagatatgctgcacaaagatttcagtgaaccaggggaggcaaaggtatgagtatagctgtattttgtggtcttgtgattttcgttctgctggcagtaatgctgttagcaggtgttcccatcgccattgccctggcggtatcctccatctgtgccattcttccggtgctgaacctgggggcttctgttcttacgggcgctcagagaattttctccggcatctctgttttcagtctgctggccattccctttttcatcctggccggcaacattatgaacaagggaggcattgccatccgcctaatcaactttgccaagctgttcaccggcagcattcccggcgccctggcccacaccaatgccgtggccaacatgctctttggagccatttccggctccggtacagcggctgcttctgccatgggatccatcatcggccccatcgaggaggaggaaggatatgacagggacttttctgcggcagccaacattgccacagctcccaccggccttctgattccccccagcaatgtaatgattaccttttccctggtcagcggcggcacctccgtggcagcccttttcatggcaggctatattccgggcatactctggggacttgcgtgtatggtggtcatttacttctttgccaggaagaaaggataccgcagcaccaaacgttatacaggctctgagaaggtgaaggtattcttccaggccatcccgtgtctgttcatgatcatcgttgtcattggcggcatcatttccggcattttcacggccaccgaaggaagcgtggtagccgtggtatacagcatggtcttgtccatcttcttttacaagtccatcaggctgagggagctgcctaagatttttctggacagcgcagagatgacaggcattatcatcttccttatcggagtatccagcatcatgagctgggtcatggccttcaccggcatccccaccgctgtatcggaggccatgctgggaatcagcaccaaccgctatgtgattctttttattatcaacattctgctgctgattgtgggaacctttatggacatgacgcctgcctgccttatcttcacccctattttccttcccatctgccaggcgctgggcatgaataccatacactttggaatcatgatgatattcaacctctgcatcggcaccatcactcctccggtgggaactacactcttcgtgggagtaaaggtgggaaagacaaaaatagaacaggttatacgtcctctgctctactactttggcgctatctttatcgtgctgatgctggtatcctatataccgcagctgtcgctgtggcttccgggactcatgggttatgtataaaacaggttatgcataaaacattatatataacatgtatcaaggaatggccgcgctgtgagacatcgcatcacagcacggccattccttttattcttatgaaattcagtcttacgccttctttaacctcttatcctccagatgggaaacaatcactgcgcaggcagcatctcctgtaatatttaccgtggtacgtcccatgtcaaacagacggtcgataccggccacaagggcaatgccttccacaggaagccctacgctctgaagcaccatggccagcatgatcataccggagcccggcacaccggccgtgcccacggaagccagaacagctgtcagtataatgacaatctgctgggacagggtcaggttgattccataacaggaagcgataaacacagcgcacactccctggtaaatagcggttccgtccatattgatggtagcgcccagcggaagtacaaaactggcaacctcttttctggcccccaacttttccgcgcattccaggttaagaggaagggcgcccacagaggatgcactggaaaacgccattatcatggccggagccatgcccttgaaaaacttaaggggtccaatgcccgcaagagacttcacggtcagcgaatacaccaatgaggcatggagtatgtacccgatataagccaccagaagcacaaaggccaggctgcccagtatctggggtccgttggcagccacaacaggcgtaatcagacagaacacaccgatggggctcagcttaatgatgaaggacataaccgcgatggacacatcattggcactctccacaaagtttccaaatacctctcccttctttcccgccacaatggtgccgaagccaaagagcagcgccaccacaatcacctgaagcatggatgcctcagccataggctggatgatattgcttgggaatataccaatcagggtctggataaaactgggcgtttccgctgccgtatactccagagagctggtggacagcaccggaaatccctttttgaacaggttcgcaatcaaaaggcccagagtgaccgcaaaaaaggtagtgcacatataatagatgacggttttacctccaatgcttcccaccttcttaatatccttcatggaaataacaccgttcatgatggagaacaagacaatgggaactacgatgaatttcagcaggttcagaaacagggtgccaaagggcttgatgtaaatttccgcaatgtccggccggcccatcaacaacatgcctgccacaatacctaatgccaatccagtaaaaatccatagtgcaagtggtttctttttcatacgcataattccccttttttagtatttttgcataaatgcaattataattataacatattcttaacattattactactaaataccaaaaaagtaaatatttaacaatctctgataccattccggcaccacttcctgcttattacctcaaaccggttttacttggacgcataaaccgacatgattgaggaccagcttccacggccgtaaaaatcctcgtagccggccggataatgttcatttgtctcatccgtgcttatattttcttccaaatcagccagtttttgaagtccgcttccgtttgtgccaacgctccagatgctcatgcctccctccttatccacgcgtccaaatacaagggcggagccgtccccggttagaacagggaattcactggagtattctgaatcgttagtcagttctgccacatgaccgttttccatccggtaaagctggcgccatatgggatattccacctgttctcctgtttccagctcctttgacgctgcaaaaaatatgctttttccatcgtatgacacctgcgggctctggggcaccagaccgggtgtcttaagtttctcatgaaccgcgcccttttcaggcggtatcttgaccagttccttgtctagcgccatttcccttcccgcacccgcaagaagaaacagggaattgtcctctccaaacaccacattttcattatagggcagaactacttcctcctgttctcccaacggatctatcatagtgccggacaccgtatcatagacagccgtaccaattccgtctgagcgcatggaacctgacagaacatcctgccagataaaaagcctggacgaatcaggggaccacttagccggccacagatatgggtatggttctccgtccgtctcctccatccgctcaaagaaaggcggctcctcaccgattatctgtatgaggacactgagtttcttctccttctccagattcatctggatcatccagattccctggttctgttcaaacaaggaaaggccggagtctttcctgcggtccacgtacctgcgccgggcaaatgccagtttttttccatctggagacaatgtcagcttctcacactgtatccagccgccctccaccggttccggcttccaaacttcctcctgttcccggcccatatgcaccctcacgattcctgtttccctggagctggcataaaatccctctttcccgtccgggacaaaagacaatgctccatttaaaagcagttcttctttccccgtttcaatactgcatccatagaaaccatcctgacgcagatagccggccgttctcccatccgaagaaaataagggggaagaaatatccgttccttctgccagcctctcagtactcactgccgcatccgcatcttctgcaccattacgcaaaaccctaatcagataaagtccgtcattggccgcatagagaacggaaactgttcccgatgtctcaatgtctcctttgttttcccgtgccccgctttcatccgcgcctcctttacagccggccagcagcacaagcattaaaaggccggccagacatgccgctgttcgtttcatcccgattcctcctctgcttgaattatgattctattttatatccttgcaggaaggaaatccctctctaaaaagcaaataatatcttacgatttattcacagacaatctcatccttccggccaaaccacccttccggatctttatttacgtaatgggcatcaaattcaaccaccctgtactcctgtattccatgaacaaaaagcggctcattgtccaggtaatcctgtaattggcctgcatgctctgccctcatgacagacagaccgccgctcatatccgccttcaggccggacataaaaatcatcccccgctccatggctgcccgggtgcaggccatatgctcattcatgatttcatccgtcatcctgccggcgtcttttatgcttccttccaccaaaaaatacttcatattattgtatctcctgttctgttttaatttattttatccctgctcaaacttgtttataaaaagaaaataaggcatacattttttccctgatatggtatactataaaaactacagtatctgaaaaggagggttgcaggcttatgcttaatcctatcgttatcgctgcgtagcaaaggctgctgcagctgtaccataatccggttataatggaacatggccttacatagcctttgctttcccgcttaaaataaaccacaggagagcaacatgagctatcaaaaagcggaccgtatcctgccccgtgaactgctggagcaggtacaggaatacgtggacggcgcgctgatatatataccgaagactgccgggcataaaaagtgctggggcgaggggacctccacccggcaggagcttcgtctccgcaatcagcagatttacagtgattatctgtccggcaagagtacggacgagctgtcctccctgtactgtctgtcgcttaaaagcatacagagaatcataggccaggaaaagaaaaataaataatcaaaaaagacccggacccatgcgaatcttccgcatctgtccgggctttttgatcccatctgtatgtctcaactttatttatcaaacaagaattaggttggtatccgcctgtgaggatgttacactttttactgcccgcagaccacggctcgtagcccggcagacaggaaaggaacacaacatgaaagacatcaaatggaccatacagtatgacaggccgcctgctcctctgagacactgtaaaaaatgcaatatcaggcaggaattcgtaagctccggacagttccgggtcaacgcccagggaaagtacctggacatatggctgatctataaatgctcctgctgcagctccacctggaacgcagccatctattcccgcataaatcccggaagccttcctcccggtatgctctcacgctttcacgcaaatgacacttccctggctatgcagtacgccatggacaccaggttcctccgcctaaatggcgcccagatacagctgccctcctaccacgtggaaggacaggttttccaactggctgactcacctgcatcaactgacccagactcatccatggttctgcagattgacaacccatacccgcttcccctgcgggtacatgcagtattaaaaagtaaactgaaactgtcccagaaaaggctggaccagctgacgcaaagcggcaggatccaatgtgaagacggccgtgaactgaagaaaagcaggacaggaaaccatatacggctttacatcaccggcgttttaattccctgagtatgccctctgcgtccaggcccgaacacaaacgtccgtccaccatgacattgggcgccttccggcagttcttcagacagtttctggtcttaaggcacacggtcccgtcctctgatatgccgttttttcccactcccagcctttttttcagttcatccatgacagtaaggcttccctttgacacacagttccttccggtgcagaggatgatctcatggttatagggcgctgtctttaaactgggataccgcttacatatggcctgcaccatggagtcccgtaccccggcagcctccgctgcctgctccagcatataagggctgatgcagccatggatgtcctgcagttccctcaacatctccacaatggcctcctgcgaagaacgctccggcagcccgcggtagtagtccaggatttccctggtctcatcatcccgggcttcattttcatttatctgcatatgctaaacctcgcttccagtatagctttgggcctgcggggcggattttattcacaaaaacctgtttttaccccatgaattttttacagcctcttttatatcaatcccccagatagtatatggcagtaaaatggcccctggaattgtaataaagcctgttccctgtcacctggccgcagaaaaccagtcctgtttccgggtccgcaggatcagggaaaatctcctgctgatactgtgatgcccttaaaagcccggtatccgcgccggagacagctcccttcataatatagatatctcccttgtagaccgtcttcatcaccgtatcccagctggtctgccacaggtggtattcatccgtattgtaatccggcctgattcctgtctcatatccccggcctgccggttcttcccctgcttcataaagcagaaaaccataaagcgtatcttcctggcccggattcagcgacagcatccggctctcgcctgtaagctcattcagagtcacccttacctgtccgccctccaaaactgtctgaagctgctccctggtaatggaagcaggaaccgatatctctcccggcacagcgtagtacgcccccatgtccctggcctgggacaggtcaccgctcagtccggtttcatcatacctgcccagatattgcagatagggcgcgggaggtaggtcctccagtccatactggttccgcccgtccagcttgtccctgtccgtatcattttccattttctgtatcagggaaatatttccagattctacatccgacagaatggaatctgaaaaggaatccggttcaatgattcccctgtaccatcttttttctgaaaaataccggctcagcacatcggatttaaactgccttccgttggctgcatagatttcattccgaagaagccacaaattctccgtgggccagaggcatagatctgccctggacagatagcgcgaaaatacatccggaaaggtcagactgtcctcaaacagataatagtctccggccagtccaccctcccctttcactgatatatgaggatcggattcatcatccattgcaaatttaatggtatatgtaagcgccgggacccgcggaacttcttccatggtctccggtgttatcttatatgcctttttgcccttctcagtcagaatctcagcggttctcatgctgtcataataactggtatgcatctcatccggaagggtaaatacacatttcagcctgtctgattcccagccttccccggtaagttcaaaggacaggccgcaccgtatgtcccccgctttaaaaaagctgcctgttataagctgattgcaggcttccaggttttgcactgccctgacagcggttcccggcctttccggttctgcgcccccggctggtgcggcatttccggcagccccggtacccccggccgttcctgcattcccggcagcgctggcattccctgcacccacggcatttcccccgcccccggctaccggtttccgggataggcccggttctgttcccggggcctcatgtttttcagactggccgcccgcctgttcctgctgttgtgtgacgccttcatcctggggatatgtctgctttctatccttcatcccgcaggaagtcaaaaccagcaggaccatggcggcccatccagcccttacaatctgtctcctaatcactgtaaccccattccttccattaattcggaccggatatatccatcatttcgtcccacctgttcttcctcttacaatccaggcagccggacagggcgccccgaagcagttcaatggaaaccggttttgccaaatgtccgttcatgcctgacaggcgggccctctttacatcctcagcaaaggcgtcggccgtcatggcaatgatgggaagctcccctatccgctccatcccggaaccgcgtatctccctggtagcctcgtacccattcatcacaggcatctgcacatccatgaacaccgcgtcataataaagggccgggtgggaacacactgcctccactgcctcgcggccattttcagccatctccaccctgactcccagaagtttcagcatctccgacgcaatctgccggttgagctcattatcttccaccagaaggacccgtaagccccggcaggctgcctccggccctgaaacagcaggctggatcgcttctcccgtattcccgcacttatccaggcacagcgtaacggtaaacctggatcccttcccatattcactctccacacggatgtccccgtccatcatggatatcagattctttacaatggtcattcccagtccagtgccgggtaccttactggttctgctgtcatcggctctgctgaatggttcgaatatatgctccatatattcaggtttcatgccaatccccgtatcctcgatgataaaacggtaggttcccgtccgctgttcttccttcttaaactcgcatacagagaaggtgatttttcccctctggccggtatacttcgaggcattttcaaggatattcaccaacacctgcctgatacgcctggcgtcccccatgacccagggatcaaaggactcgtctatatccacctggaactcctgctggctgttttccatggaaatccgcaccatttccgccgcttccccggctaaagcccgcagattcagggggctctcagacagctccatgacaccgctttcaatcttgctcacatccaggatttcattaatcaatcccagcagatgggcaccggaggaagcgattttgttcaggtaatccctctgcttttcctcatccccaatgtgcagctgcgccagctcggtcatccctatgatggcattcatgggcgtacggatatcatggctcatgcgggaaaggaagtcgctctttgccttattcgccttctccgccttcttaagtgcatcctccagcaaaagctttgcctgccgttctttttccagggtctcctgctgcaccctgcgttcttcatcaatattcctggacagggtaatctcaatcagatcatgggtataaggactttccaccttcaccacctgggtggaattccagtgataaattccatcctcgcctatgtggggaacatccatggacagaatgcattctcccctctggaatgcctctgtcagagccttcctggtaaacttgctgcgaaactcctctctgtagtccgggtggaccgcctccatctcaaactcaatcagttcgtcaaaacggccctccggatcgggttctttcaccggaaaccgctggtattccaccatgtgataggtattctgtgtcaggttcaccgctatcagcatctggtatgcagccttggctgccgtggccagctggctgatctccacattccgttcctgctccagtaaaagttcatcctggacatcccgaaataccaggacgcaccagcactcatcctcctggtttcctatcctggcagctgtaaactccaccgtgcggtaggaaccgttgtctgccctgcggcgcagccttctggtgatttgcttttttccctctgtaaacatacaaagcatggactccctggaaaaattctcattaaaacattccagatcgtccggatgcagtgccttttgggcgtatttgcggttctctgaaccgaaattcccctgttccggtatgtcgtcccacaccacatccttctggcagctcacataataatccctggtcaggttggcaatgatgcattcgtcaaacacagtcaccaggctgctggcatacatctggcggattttctgaaatccctgctcctcctcaaagttcaggcggtggggcgctgcggtaatcaccacagccggtaccctgccctcccagttaatccggttggcagtgacatctactgttaatttaaggagcgggtcataacaaaccatatggtttgacactctgtcccccagcatcttaaggggacagttggcgcacaattccggccatacttcatcacaccggattcccagggcagccctgccgcgtcccgtattccggcaccgctcattaaagtataacagccggtgggattcctcctcaatgacatatacgctggtttctgtcagtgaatccagcagattcatcaggttttcagctgtcatgacgccctcccatcttccactaatcgcttatctcagccaaatccgcccgaagcttttcagcccgtttaaactgcctgcagacatcctcatacatctttgtgtagtcctccctgtcctcccttgtcctcagaggttccacaattgtgcacacagcatcgtacagaggcgtcagccccatgttgcccgtaacccccttcagggtatgggcagcctcgaaggcagacgtcatatccccctgttccagggcatttccaagtttactcaggttttcatcctgaaacagcattcccaggaacttcatatacattttcctgtttcccataaaccgtcccagagtaacctggtaatccgccccataggcttcaaatatcctttcaaaatcgtccatcttcttatgcttcctttccatatatgaaatcgtacagagtctggtacatccgttccggctctatgggcttggcaagatgggcattcatccctgccgccttgctcttttctatatcatcatcaaatgcattggctgtcatggcaataatgggaacggttcctgagtcggcattgctcagatggcggatgttggtggcggctgtcagtccgtccatcaggggcatccgtatatccatcagaattgcgtcatagtatcccttgtctgatttgctgaaaagttccagggcacgcagcccgttctcagccgtatccaccttgaatcccttgctctccaaaagcatcatggccacctctgtgttaatctggttgtcctccaccagcagcacatgtttaccggtaaaatcataatcatttacctccggctgctgcgcctgctgctccttctcgcccagggctcttgaaaaggccgaaacaagggaggacttgaacatgggcttgctcatcagaaggttgaccccggccagtttcgcctcatgttcaatggaaatccagtcataggcagtcatgataatgatggtcacctctgctccgactataccgcggattcgtctggctgtctctattccatccattcccggcatcttccagtcaatcagtatcatgtcaaaataccggccttcatcccagagcttcttaacccggtcaattgccttccggccgctgtccacccactctgccttgattcccatttcgtgaagggtcacaaccgcgctctcgcacacagctacatcatcatccaccaccagtgtcttcaggtgggagaaattgtaatcctgttttttctggttatgcctgagcttttcttcttcggtgattcccagcttgacatccactgtaaactctgtaccgattcccttaatggagcggaccgtgattttgccgtccatcatatccacaatgttcttggatatggccagccccagcccggtcccgccatacagggaggtggtccctgtggattcctgtgaaaagggttcaaacagatgtggaaggaactcctcgttcatccccacccccgtatcatttacaatgaaccgcagtgatgcatcattcttggtctttctgcgctgggaggctgaaaaggtgaccttgcctccctcctgggtaaacttgatggcattgctcaggatattgatgagcacctgctggagcttcatggcatcacctatatagtaatcatccagcaccgggtccacaatgcactcatattccacccccttgacatcagcctgggagtaacagatggaattaatgccgttgatgaactcctctgttggaatcttctcgctcttgagcagcatcttgccgctctcaatccggctcatatccaggatatcattaattaacgacaataggaaccgggaggaaatgccaattttggaaatacaatcctccacctgctcgtcatcccctatggactgggccgctatggtgctcatgccgatgatggcgttcatgggagtccttatttcatggctcatccgtgagaggaagtcgctcttggccgcattggcctgctctgccgccaccagggcggcagccagctcctccttctgcctctgttcctttagaaccacgtccgtcacatcggtgcgggccacgcatacccgctccagctccctgctgatatagaaaacccggaaacgcttgacccgggtcgcaccggtcatatcccgcatctccacaatgaacgtataagcgtcgttatgggccagctgtgatttcatgtaatcgtaatccagcttacggagatattcctccctggccgcctcatccatatagcgtccggagatggcgcgtatctccgactggaaccggctgtggtccggcagcatggtatccatattggactcatccaccaatatggtcctgtacgccatatcccgcaggatatccacttctgttatgctctcataatccagctccgcgatccgcttgaaaagctgctcctgcatctttttctccgtcacatcctgggtatagaagaaaagtatgacatgaccagtctcaggattctggcaggaatgcatgatggtgctttcccagaaaattatgccgctgttgtttctgcgcaggaactcaaaacggtaatctaccttgccaaccgcgtaatcagccagcacccgctcccggttaaggcagtggcggattccatccccatagaccgggtccacggcagaggctgccaggttctcgatggtatcctcgtaggcatcacccacctttgcaatggatgtatccgcggttgacaggtaggattccaggcaccctgtggtgatattaaggcttccctgtatactcccgtcggctgaggactgttccgcaaaataggaaagctcctcctcatacatctctttaatccggtcacgcatctgcttttcttcagtgatatccatgcataccgacatgatggcaggacggttatcctcagatgtcaccctcctgcccaggtcatgtacccagatataggaaccatcctttttcctcatccggtattccaccacatactcctctgaccgttgcagctggcaggccaccagctggtccaccctgttcctgtcatccggatgcatgcagtttgtaatcattccttcaatatcggatacaaactccgtctcgttctcataccccagatattccagcatcctgcggttaatgaaataaaatgggaaaccatcctctatgtatcctcccatcataccgcccggcagagaattgtttaaaagctcctggcgcagtctgctggtatgttccatgaccagtgtccccggataatgctccgcgtccttctggctgctggccggctctgccacatgaaaactcttgaccagccattcttccccggacaaagccaaggtaaagaaggccctcagataccaggtgtatttggaattcttaagggtcaaatccgctgacatgttatagatcccatcagccacaggctgttcatagatgggggaaagctcacattcaaagggttccggtatctcccggatatcctgcgcaaggtacccggccatctgctgccttccgctggccatttcgtctgttcccgtgcccacaaaccccacatcctccgtcaggaatgcaagggttctttctgcgtcacgctgtacaaaccatgtgcggcagaactcccgtaatgtttcaccgggcgtcatctgtctcttcatatgttaatcctcccccaaagtcaatatctgtccgggccggttcgcccgttcccgcggtgccttcgcatggatggcccgcagcacccgccgtctcaggctcttctgggaatggggccttcccgcaaaatcatccgcccccagctccattgcccggtcctccattgcctcgttctgcgggcctgtggcaatgaccggtatatccggatccatcttttccctctgaagtacctccagcacggaaaaaccatctgtccctgaaagggtcaggctgagaatcacagcggcaatcctgcttttactgtcagccatacatcttaaggccgccttgccgtccccagcctccatcacctgaaagcttccctcaaaggtttccctaacattcctgcggtaacaggcgtcctcgtccgcgaccagaagaacaggaaacggctgagactcccggaggttttcatcgcccatcccctcctgctccatggctgtatatccgtttctgagcagttcctcgaattcatttatgggcattggacgggcaaaataatacccctgcacatagtcgcagtccgccttcttaaggcgctccagctgctgcctggtctccactccttccgccaccacgctcaggtccatccaccgggccagctccatgataaaatggaggattccgccgtcatccggccctgcggcctcatcctggataaacttcatgtccagcttaaggatatccactggcattttgcccagcatattgagggaggaatatccgcttccgaaatcatccatctcaatgacaaagcccagttccctcagataacccactgtctcgattacctgctccgggttttcggtgtacgcgctttccgttatctccaggtgaagccgtgacggctgcagcctgtatcggcgcacgattccaagcagcatgtctgccaggtccttatggtagatatccgccctggatacattgacggacacagggatgggaggatatcctctgttgtcccattccctgaggacggatgcagcccgttcccacacatactggtccagctttgtgatgaaaccgttttgttcaaacaagggaatgaactctccgggggactggaatccccacaccggatgtctccaccggaccagggcctctgcccctgaaagcctgtggtctttgatcctgtacttgggctgcagataaacctcaaactgcttcttcgcaagagccggctccatgctgtccgttatggcctgctcccttaaaagacgattgcgcagctggtcgtcataggccgcgaaatacgttccataccgtcccttaatgctgcgggcagccaaaagagcccggtcacacatctgctctacagacacattccggtcagccacctggtatattccccacttcatcaccacattcctggcatttggaagggtattcaccctggcattgcaccggatgaacagctcatccgtgtactcccaccgccgttccagaaggcaggcaaactggtccgcgtgaaaatgaccgcagattccattcttcccggccacctttttataaagcctgccgatctcatttagcagatggtccccggcaggaatgccgaatatatcattaatcagtttgaaattcacgatatcggagcaaatgatatcatactccctgtcagtatgctgcatcagagtttcccttacccgctggtaaaaaaattccttgctgtagagccctgtaagcctgtcatactgaaccagattaatcatggcagccgtttccctcaaatggatgatactggccaccctgtgcagaatcacctgggacttgtagggcttcgcaacaaaatcagccgcgccatgtgacagcgccgcaacctcatcagattcgctgtcgctctgggttgttacgattaccggaatagatgaaaaggaagaatccgctttgatatgagaaagaaatgtatatccgtccataacaggcatgacgatgtccagtaaaataagagaaaccatctccccatattcacgcaggacagacagtgcttccgctccatcacctgcttccagcactttatattggggcgacaggatttcccttaatatcattcggtttatttcattgtcttccacgaccaaaattttcttctgtgaaatcatcgtttcatacctttgcccggcctttacctgccgatgatactgcttatcctgcggcaaaaccaggcttcctcttcatttccttataaatatatatcgtggtttcaccaaaatagacgttcttttgacaaatttccaatggtttaaatataacaaaaacaggtagaaaatgcaataggacgctacagaaaccagctcgtatgtgcatgcaccattttcatcac

SEQ ID NO: 3323 - DNA, 14554 bp, Unknown
  gut microbiota DNA sequence
gtatatattgcacaataaagtgtcttcaattttctcaaattttgccatagactaaaacttttttaggtactataattctttttaagataacaatttaacatttcttttgccaatatgtatatcctggggattggcccagagtctctaccaactaccgcaaagagttggctacatatcttaatgtagccagctctttttttctgtttgtgtaaagattcgcaccaaaattggcaggaaaagtaaggaggaaatcaaaaaatgaatattgtagggcagcaagtaaaacgtgttgatgcttacgggaaggtgaccggggaggccaagtacaccgcggatctggaaccgagagacatcctgcacggtaaggtcgtgcactctaccattgccaacggcctggtcaaaagctttgacttgacagaggcctatcaggttcctggtgtggtaaagattgtcacatgcttcgatgttcccgactgccagtttcccacggcaggccatccgtggagcgtggaaaagaagcatcaggatatctgtgacaggaaaatactgaaccagagggtccgcctttacggggacgatattgcggctgtcatcgctgaggatgaggtggccgcagccagggcagcccgcctgattaaggtggaatataaagaatatactcctattgttacagtggaagcagccatggcagaggatgccactcccctgcacccggatctcaggaaggacaatgtgatcgtacactcccacatgaccatgggtgacagtgaattcacctatgagagaggacttgagaaagccgggtccggttacgggcctgaggaaatcatttccctggaaaaggaatacgataccccgaggatttcccactgccacatagagctgcctgtctcatgggcctatgtggacaccaacggtaagataaccgtggtatcctccacccagattccccacatagtcaggcgctgtacagcccaggccctgggggttccaatcggaagagtccgcattataaagccttacatcggaggcggcttcggcaacaagcaggacgtgctctatgaacccttaaacgcattcctgaccatgtccgtcggcggacggcctgtcaggctggaaatcagccgggaggaaactatctccggcacccgtacccgtcacgccatcaaaggaaaatgcaggggccttgtgacaaaggacggccgcatcctggccaggaagctggaggcctatgccaacaacggcgcctatgcatcccacggccacgccatctgcgccaactgcggcaatgtgttcaaggacctttacagagacgagctgggtaccgaggtggactgcttcaccgtatacacctcctctcccacggccggcgccatgagagcctacggcattccccaggcagcatggttcgcggaatgtctcaccgatgatctggcagacgccattggcatggacccctgtgaattcaggctaaaaaactgcatggaggatggtttcgtggacccggccaacggcatcaccttccattcttacggtctgaaaaaatgcatcgaggaagggcgacgacacatacgctgggacgagaaatggagcgcataccgcaatcagaccggcccggtccgaaaaggtgtgggcatggctatcttttgttataagacaggcgtgcaccccatctcccttgaaacagcttccgcccgcatgatactcaaccaggacggctccatgcagctgtgcatgggcgccacggagatcggccagggagccgacaccgtattcacccagatggcttcccagacaaccggcatagcctttgacaaggtctacatcgtatccacccaggacacggacgtgaccccctttgacaccggggcctatgcatcccgccagacctatgtgtccggcatggcctgcaggaaatgcggcgaggaattccgccttaagatactggaatacgctgcttacatgctgagccacgatgtaagcgacctatccaaaacagtatacgctgaccaagtaaaggctgccgctgccctgctcagggagacactgggacttaaggaaggggagctggtatcaccggatatgctggacatagaaaacagtaagattgtggtaagcggcggggagcccgtgctcttcgacctgtccgtggtagcggacaccgccttctattccctggaccgttccgtacatatcacagccgaggtcactaaccagtgcaaggacaacacattttcctccggctgctgctttgtggaaatcgaggtggacattccccttggtctggtaacggtaaaggatatcatcaatgtccatgactccggaatcctcatcaatccgctgaccgccagggcccaggtccacggcggcatgagcatgggactgggatacgggctttcggaggagctgctggtggatgaaaagacaggcaggcccttaaacaataacctgctggattacaagattccaaccgccatggacacgccggacttaaacgtggcgttcattgagctggaggaccccaccggcccttacggaaacaaatccctgggcgagcctcctgccattccggtggcccccgccatccgcaacgccatcttaaacgccaccggagtccagatggatgtgactcccatgaccgctcagcggctcattgaaaaattcaaagaaaaaggtctgatataaggagaaggttatgtttgatatcaaatcattttatgaggccaaggatgtggccgacgccataaatgccctggtaaaaaatcctgacgctgaaatcataagcggcggtacagacgttctgattcgtgtcagagagggaaaggatgccggaagatccgttgtatccattcataatatagaagcattaaagggagtccgcctccttgatgacggagatctgtggataggcgcaggcactgcattttcccatatcaccaacgatgccctgatccagaaatacatacccatgcttggggacgccgtggacatggtaggcggtccgcagatacgcaataccggaactatcggcggcaatatctgcaatggagccacctccgcagactctgcttccaccatgtggaccctggaggcagatgtgctgttagagggtcctgagggcaaacgcagggtgccggtctgtgaattctatacaggtcccggacggacggtccgcgaccggaccgaggtctgtaccggtttcctggtacacagtgacagcttcgagggctggagcggccattacatcaagtacggcaagagaaaagccatggaaattgccaccctgggctgtgcggtgcgtgtaaagctgagccaggataagaagcggattgaggatgtcaggctgggatacggcgtggctggtcccactcccctgcgatgcaggaaggcggaggatggtttaaagggtcgcgcagttaatgacagtgaggctgtcctggcgttcggcaaggctgcactggaagaagtgaatccccgctcctcatggagggcgtcaaaggaattccgtctgcagctcattgaagaattatccaaacgggccctggcagaggcaataaaaaaagcaggaggtgcgatcaatgcttaagattgtacacatgaaggtaaatggtaaagaagtggaactggctgtggatgagagggaatccctgctcgataccctgcgccagcgtctggggcttacatccgtgaaaaagggctgcgaggtcggggaatgcggcgcctgtaccgttctggtaaacggagaagccatagacagctgtatctacatgaccttgtgggccgagggaaaaagcatcatgacagtggaaggtttaaaggggcccaacggggaattgtcacccattcagaaggcatttatcgaggaggcagccgtacagtgcggcttctgtactcccggccttatcatgagcgcggtggagattgtgggaaccggaaaaaaatacaaccgggaagagcttaagaagctgatatccgggcatctgtgcagatgtaccggctatgagaacattctcaacgccatggaacggattgtggaggaggtatatcaggtcagccacaaaaccggcgggaccgattaactatcattttatagggggaaccaatcatgaacagcaataccaattgcagtatcaacaacatatacaaactggagggaagggtgccaatcgccaaagccatccccttcggcctccagcacattctggccatgttcgtctccaaccttgcgcctattaccatcatagcaggagcggcacagcctgccctgagccaggcccagacagccattctgctccagaacgcaatgtttgtggcaggcatcgccactatgattcagctgtatcccatatggcggattggctctaagcttcccgttgtcatgggcgtcagctttactttcgtcaccgtcctcagcaccattgcagccaactacggttatcccgctgtggtgggagccgtgctcataggcggtatctttgaaggaaccctgggacttctggccaaatactggcgcagaatcattaccccagtggtggctgcctctgtggttacagctatcggattttcccttttcacggtgggcgccaggtcctttggcggcggatatgcagacgacttcggttccgcccagaacctgattctgggtaccatcacccttctgacctgtcttctgtggaacatctttgcaaaaggatacttaaaacagctgtccgtactggctggactgattgtggggtatgtaatcgccatcttccttgggaaagtggatttaagcctgattatgtccggcggaatcatttccttccctcatctgcttccctttatgcccgagttccatgcaggggccattatctcggcctgcatcatctttcttgtatctgcggcagagaccataggcgacacatcggccctggtttcaggcggtttaaaccgagaaatcacgggaaaggaaatatccggctccctggcctgcgacggctacgcatccgccctttccactgtattcggatgtccgcctgtaacctcattctcccagaatgtgggcctggtggccatgacaaaggtggtcaaccgtttcacaatcatgacaggggcggcctgcatgattttagccggactccttccgcctgtgggaaacttttttgcctccctgcctcaggccgtgcttggcggatgcaccatcatgatgttcggcaccattcttacctccggcgtacagatgattgccaaatgcggattttcccagagaaacatagtcattgtctccctctccctggcagtgggcatcggttttaccacagccagcgaaatcgggatctgggatatcttccctgaattggtccagtctgtattttcggccaatgtggttgcggttgtatttgtggtctccgtatttttaagcctggtgcttccaaaggatatggatatcaagaccctggaagggtaaagattgtctgcgggagctgctgctccatagatgagtcatcatttatggagcagcagctccttttttatttctgtttttctttcatctaaagtcttttaactatcgttattcttttttaagcataacgttattatacaacactttttattatatgtcacctgttttttatattttgctgctttgttctgcctatgtcctgctccggcgaatatacttgtcatttttttatattatccccactttttcatcactttttcaattattttgcacaaatacctgtcttttttttccaatacatggtacaatccgtataaatattcaacaccaatcagggggaaatattatggctaaagaaatgattgcaatgcttcttgccggcggccagggctcccgtctctacgcgctgacccaaaaactggcaaaacccgcggttccttttggcggtaaataccgcatcatcgactttccgctttcaaactgcgtgaattcaggaattgatacagtgggtatcctgacccagtaccagcctcttgtcctgaatgagtacatcggcaacggacagccctgggatctggaccgcctgtacggaggtgtccatatactcccgccctaccagaaagcatccggttcagactggtacaagggcacggccaatgccatttatcagaatatctcctttattgaacggtacgacccgcagtatgtaatcatcctttcaggagaccagatctgcaaacaggactacagcgattttcttaaattccacaaggaaaaaggggctgaattcagtgtggctgtcatggaagtgccgtgggaggacgcgtcccgtttcggactcatggtggctgacggggatgaccgcatcaccgaattccaggaaaagccgaagaatccaaagtccaacctggcttccatgggcatctacatattcaactgggacatcctcagacagtacctcatagaggatgaagctgaccctgactctgaaaatgactttggaaacaacatcattcccaatctgctgcgtgacggacgcaggatgtatgcttatcatttcaacggatactggaaagacgtaggaaccatctcctccctctgggaggccaacatggaggtcctggatccggaacacagcggcatcaatctctttgacgaaaactggaagatatacagcagaaacagcggtatgaccggccataagattagcggcgatgccctggtggaaaattccatgattaccgacggctgccgtataaacggtcaggtcaggcattccatcctcttctccggcgtaaaggtggaggccggggcgcaggtggaggacgctgttgtcatgggcagcaccaccatcaaatcaggcgccgtggtaaaacattgtattgtggctgagaacgtggtaatcggagaaaacgcagtggtaggggccatgccctctgacagtgaaaaaggcgtggccaccattggtcccggcattgaaatcgggcccggcgccaagattggccccagtgccatggtaaagaataatgtaaaaggcggtgaagaacaatggtaaattccaatgcaaatgccctgggcatccttttccccaacagctatgattccctggttcccgatctggtcagcgagcgcctgatggcctccattccttttgccagccgttaccgtctggtggatttcatcctttccagcatggccaactgcggaattgacaatatttccctgattgtccgcagaaattatcactccctgatggaccacctgggctcaggccgcgaatgggacctgacgcgaaaaaacggcggactcaacctggttccgccttatgcagaaaagacagtgagcatctacaacggccgcgtggaagccttggccggtatcctggatttcctgaaggaacaaaaggaaaagtatgtggttatggccgatacaaacctggctgtcaactttgatttcaacgcactgattgaagcccatatggccagtcatgccgatgttaccgtggcttacaaggaggaacctcttcccattgacctcatcgaacaccgtgacatcggaaaaagcctctactataccctggccattgacaacggccgtgttaccaagatgtacatgaactcctcggaaccgggaatgcagaatatctccatgaacatctacatcattgaccgggagctcctgattagccagataaacactgcctatgtgcgcggacaggtatactttgagcgcgatatcctggcgccccagttagaaaggctgaatgttcaggcatttcgctatgacggatatgtggcgcgaatcagcagcatgaagagctattttaacgagaacatgaagatgttagacgatgtcaatgtggacgcgctcttttccgccggcaatcccatctataccaagattcgcgacgacaatccggcccggtatatcaacggctcaaaggtcagcaacatcatggctgccgacggctgcatcatcgagggtgaggtggaaaacagtatcctgttccgcggtgtcaaggtaggaaagggcgcctgggtaaagaactgtgtgctcatgcaggatacggtgatagaagcagacgccggcgtggagtatgttgtgactgataagaatgcgaccattacaaggggcaaaattataaaaggcactgttacgttcccggtgtacgtggcaaagtatcagattgtatagaaagcagctgaatgggctgaaaaaggagggtgtccgcccgggtggggacatcctccttttatctgtttctcctgttatctgtttctcctgttatctgtttctcctatttctcctgcgtcaaagcattcatcagctccgccaaatccctgacaatacatatatggttaaaggggtcaaaatcccggaatgacgttgttccggtcaatacgccggcaaaatccacaccggctccggccgctgtctttgcgtccaccacgctgtcccctgtataaaggacttccttccggtccgcccccagctgctccatggcataaagcagtccctcagggcttggcttctcagcctttacatcctcagcccccactatcacgtccaccaggcctgctatctggaatttgtccagtatctggtcaatcctgtaatgatattttgtagtcacaattccaatcctgcacccctgcctgcgaagctcctcaaacgctggtccgaccgcgggatagagccttgtatgctccaccatcacctggtcagatttttctttaaaatagatactgaaccgctgtgcctcctcctggtcccggctccctgtgagacaggcgaaggtttcttttaaggacaggcctatggtctttctgatatcctccagttccccggcctcatatcccattttcttaagcccgtggttcacactggccgcaatgccctctgtgcagtctcccagggtgtaatcaaaatcaaatatcactgccttgtacttcacttttgctcctcctcatcacctcaaaatcttctccggccggaatctgagataatccgatgaaaccagcttatactcaatcccgtccacctctcccagaaagctgtcctgatacctggcttccccgtggcagtgggaatacaccacctgctctgccccgtactcctttgccatctcagtaaacccgctttccatctctccgatactggtaggaggataatgtaagaacatgatgaattggctgcagccgtccgcagcggccagctcaaaggagatgcgaagccgctccagctcccttttcaccagcttctcaaaatgttccggtgaatcctttccctcatagcagtacccttttgtccccaccagggcgtattccttgtaggcataataattattctgcagaaaggaaagccgcccctgaaacatctcattcagacggtatgttttctttgcatcccagaacatgtcatgatttcccctcagcagaatttttcgtcccggcagggactggatgaaatccaaatcagccagggcctcctccagactccgtccccaggaatggtcgcctgtgatgaccaccgtgtcctctgcgccaatccttcccctccagttcttctctatcttcctcacatggtctttccattcccttccaaatacatccatgggtttattggcagtaaaggataaatgcaaatctccaatggcatacaaactcatattcacaactccccgcttattttctcgtaaaccagcagcgtccggctcaggggaaatctgttctaaaccagctcctccagttttttcttatcccaatcctgcatctcatgtcccctaatacggaaatatccctccttctccatcagcttcagctcctggttcagggaggacctgctgacatgaagcatattggccagcatcagctgggagccgggcatgcggatggtctccgcgggagcgatgttatgcattcccacaatccagtaagcgatccgctcacggatggtctggtaattgaggcagttgagataaagctggtttttaagcccccgctgggagacatacagcagtagcgcatagagaagctgcctgtctttctccagcatttcttccatcacctggaccggcacccacaacaccgtggaccgcttttcagcggccagagtataactgtactccttttcaccggaaaaatacaggaattccggaaaaatatccctggcctcaaaataagcatggcacatttccgcatcttttctggtgtgatccactgctttcagaattcctgtctccacgatgccgaagctggtaatctttgtcccctggggatggatgcactgggaagcatcgtaggtctttcttataaaataggtcctgaattcactgtttctcctgcaaaggtctgcaaagggaatcctgcaggactctccgggaattgaaaaatgttcatacatatgcggcctccaaaaaacatgaaagaggggctgcgaaaaacagctcctctttttttgatacagtctatgccggcggccggtccggtatgtcaccaaaatcatcgtaatacttttcaccgttaaaccgtaggatcctccctgtttacggcatctgtctcatcgtccgcggccacgcagagtgctataccatcataatacggcaaagtgccggcaacatcaactacttttttctccgaagggccgtctatatactccaagcgttcaaattcccacacaaacaagtgatagttaaaacataccgctttcagaagggatccatgtgtgaaagcgcccgcagcggggcggactttatggaattttaacgaatgctttcgccatccaccggaacacaccctggggcagctcaaacacaaatacaatccccagcacaatggccaccgcggccttcacagcctcataccccgtatacacagccagccccagctgttccgtcaccaggtaatagacggtccagtaaattcctgctccaggcaccaggggaaatatgcctgatatgagaaaaatagtgacaggacaacggtttaccactgcggctgccctggacaggaatatgaccaccactgtggcggcaaaggaggcgcctgccccgctgacataaccggaagccagcacatatacagcccacccggctcctcctatcaggccgcaccagatataatattttctcggcactccaaagagcagtgaaaatgcaatggtgcccatcatggctgcacagacctgtggtatcataacaatgtacctcccgtcacccatcctgccagtgaaaatcccacgcccacgccaatggctatacagaaaaatatcagcagcgcatccatcatccgcactgatccggaaatgtaatcactgtccgcgatttcccgtatggcattggtaaagggcactccgggtataaggggcataatggatccgattaccatgtaattcagatgctgtcccattccggccagatacatggtgctgcacaggatcgtcaccagggcacccccgcttatgtttcccactattttcgacagatggggggcgctgacataaagcacgtagatgtacaaaatgataccggtcataagcgccacagagctgtcccatatactgcccccgaacagataacagaaggcagcgctgccgcaaccggatgccagcacctgcatgtatttaggctttcccggcatgctctttatacattccagcctttcagccacctctctgaccgtatacatgcctgcctctatctccctggagagctggttcacagccgccacacggtccagatgagtcccgctcaccggaatgtgctccaccttggcaaaatcaggctcattcctgctccccactgtgacgaagataccgttagtgagcacaaatgcattgccggaacagacgccgtaatagcggcatatccgttcgatggtttcctccacccgggaaatctcagctccattctccaggagcagatgccccgcctgaagggaaacctccatgacttccttctctctgttatcctgtttgaaactattctgttcagcattctgtctttgactattctgttcctgcccgtatataacttgattcccctgcattacctgctcctgcctgcttctcttttttggcctgttttctctttgttctggcttatattgtttcgtttcctctctcattttatcattccctggaaatgcttacaacccaggagtataataagacaaaaatattcaggaacgtgcatgcgcagcaagtatagatcaaaccggctctacattccccagccgctcaaatcccagatagcgcgttccctggaaggtcagttttccccggtccccctctgccagcagcccatattcagtccctgtcacggagagctccatccggtcaccgctctccacctggaacgtcgcgtaatagctggtggatgtagtggaatggaaaccatgggctcctgtggcgtcccctgcattgggatggctgtggcggctgacattggtccttttggagaccacggaagctgttaccaacagcctggggcaatgattgttcttgttccactggctcagtccctttaccgccgtaaccacaaatattcctatgatgagcacaaataccagtgtaaacatgatttcaaagccgcctccccagaaaaaggaatccatgtacataaatccacacctctctttcccgttgtatatctccatattatcatatatacagcccggtaatcttacaatttacttaatataacctaaaaaatagactattgtttagttcaccagatttacgcctagttcctgcgaatgaattatgcagacttcctgccgaacaaaaattgcagtcacaatcagggaaataaaatctgctgtgggcgttgctatccatattcctgtgacctcaaaaactgtcggtaataggattgcaaacggtatcagcagtaataactgccgaagcgcacttagaacaacagactgttttactttaccaatatactgaaaataatttgcacttatcatctgaaatcccacagcaggaagcagcagagtaaaaatgcggatacccggcacagccatatccatgagcgccttgttaccggccccgccaaaggtgcttatgatttgactgctaaatagctctatcaccaaaaacattcctgctgcaaaaatagtggcacaggttacagagtattttagtgtgctccttacccgcgtataattccccgcgctataattaaatccaaagataggctgtattccctggcctaatccaataatcggcatatagactaacatggttgtgttatacatgattccataggctgcaacccctacgtttcccccataaaatgcagcaacatgattaaatgtcagagaaaccaggcttaatgcgaactgagtaatagaagcaggagcgcctgtcgacataatttttttgctggcacttagatttatattacttggctttagattccctgcggactttttagagcataaaaactgcattgccaaaagcatacaaacacagttaccaatgaccgttgataaagctgctccaaaaacaccccacttaaaaacaaatataaaaacagcgtctaaaattgtgtttgtaactacactggatagagagttcaaaaaagctcttttggcatatcccatacctttcacacagttgttcattgattgggcggtgacaaagaaaaaggaaccacttagtataactgtgatatattctttagcatacaccatgttatcagcgtttgctccgtatagggaaagcaatggcttaattgtcagcaacccgatgattgtaatggccgctgaaaacaggattgaaagcatacaagcgcttccaataattttctccgcgccctgtttatcggattttcccattttaagagaaatggaggcagatgcccctgctgcaatcagaagcgacagcgcctgaataatgagaataacaccaaatgatactgttaccgccgacaatgccgttatccctgcgcttttagctacgaatataccgtctatagctgtgtttagtgcattcaacaacaacgagagcacagccggtgctgataatgcccaaatcagttttgggattggttgtgttttgattttttctgctacttccataagcggactcctccaattcaatctttacatgagtttttactcgcgtttataatctgagtatatgctcgtatttgtcgtttgtcaatgattatgtgagttttaactcacttttattgacaaacccatcctcctatactaaaatagtaatcaggagttgataaaatggaaaacaaaaaatctgtacgtcgtccacagcaaaagagaagtattcagatgaaagaaactatacttgaggtttcaaagtcattgttctgtgagaacggctattacaatacaactacaaatgaaattgcgaaaaccgccggtatatctattggaagtctatactcttatttccctgataaagacgctatactcacagaattgttggagcgcagcaaccaataccacttttcaaatgtgtttgaaaagctgcgccctgaatcaagtgcgcagctttatttaaaggaaccgaaaaaatggctttatgacctcgttaatactctgattcagttacatgaagcagaaaaggatttcttacgggaattaa

SEQ ID NO: 3324 - DNA, 15171 bp, Unknown
  gut microbiota DNA sequence
aaccagaagttaaggcgataaaagattcacagtcggaaaaagtgcagatggcaacatatgaatatatcaggctgtatcaaagcgagctgccgtatgaagatttagaggctgtatccgttgtaatagtagatttcattacagcacttgttgatcggattatttttaaagaagcaagattagaaaaggaaaggttattaaatgcggggatagaagccttatatcggattatctccaaataattcaggccgcttttacggctgccctgcagtttgtgggtcacattctcacccgcagtccggaaagggctccggataattcacccggaaccctcttaggcataaacatgaattcactcttattaccaattgccgtaaatcctactataatatatttatgggcaaagcacacggccgccttattttatggatattcatacccgtcttcccacatacagcagccgcccttattttcagccttggcgcgatacagggcctggtccgcatactccagtatggccggcagaggtttcctggtgtcccaaatgacgacaccggcggaacaacaggcccggacattgtcggcaaagggatactcacagatgctcctgcatatgtcctccccttttttgacagcgctttcccctgatttcatctgtttcataataaccacgaattcgtcaccgccaaacctggaaagtatatcactttcccttgtctgttccctcagcagttctgcaaaagccgatatggtctggtctcccctcatatggccaaatgtatcattgatgtgttttaagttatccaaatcaaagagatacacagccaacggcatatctttcccgtccagagcatccgcggcagcctccaggcctctgcggtttaacagtccggtcagataatcctgacaggcttccccttcaagcatgcgctcccgttccctggaggccgccgacctcatggccctcacggcacgcctttccaggacggctgcagtatgcggcttgcgcaggaattcatctgcctccatatccaaagcctgttcctcctggcttccgtcccatgaagtggctatgacaggtatattccatactgcccgttccctccgaagcatttccaatatctgaaatccatccggttctgacagggtaaggctgatgatagctgccccaatcttattctcatagctggcaatgcaggcaagggccttctctccgtccgatgcctccacaatctgataccgggactcaaatatcctgcgcacctgcctgcaataggcatcatcctcgtccgcaatcagaagtacaggccgctgttttccgtgaaaagaaacatcctccatagacgattccatggcagcctcctccggctgttcccttatcagcttctcaaactccccgcagggcatgggtttggcaaaataatatccctgaacataatcacagccgatttccctcagctgttcaaactgctccctggtctccacgccttccgccaccacactcagatccatccaacgggcaagacccatggtaaaacgaaggattccctggctggcctgcttttccgtttcattctggataaacttcatatccagcttcagaatgtcaatgggcatcttattgagcatgttcagggaggaataaccgctgccgaaatcgtccatctctatgataaagcccaattcccgcagccgccccgccacctcaatgatctgagacgggttttccgtatacgcgctttctgttatttccagatggagccgggatgggggaagcccgtatttttggactgtctctgttaaaatttcaggaagatccacgttataaatatccgccctggacacattgacggaaacaggtatacatggatacccctttagctcccacctttgcaggatggcgcatgtctggtcccacacatactggtccagctgggtgatgaaaccattctgttcaaaaagaggaatgaactgtcccggcgactgaaggccccattcaggatgattccaccgtatcagggattccgccccagaaagccgttcctcctttacgctgtatttgggttggagataaatttcaaactgcccctctctcagtgcagattccatgcattccgttatagcctgttcccgcagcagcctgctgcgcagccggtcatcatatatggcaaaatattttccgtactgccccttgatgccgcaggcagccagaagagccctgtcgcacatctggtccaccggaatagtgcggtcctcaatggaataaatgccccatttcaccagcacattttttgcattgggaagggcattgacccgtgccgttgcctccatgaacatctcatcggtatacttacacctgcgctccatcagtatggcaaactggtctccgttaaaatggccgcatatccccttgtcccctacctgggactggtaaaaatcagccacctcccgcagcagcctgtctcccgccggaagaccgaatacatcattgactaatttaaaattctcaatatcagaacaaatgatatcgtattcccgttccggatgccgggccagttcctccttcaccttctggaagaaaaattccttactgtaaagcccggtcagccggtcatattttaactggttgaccatggctgcattttcacgcagattaatgatgcttgccactctgtgcaggatgatttgtggcttgtagggtttagcaacaaaatccgaagcaccgtgggaaagggcagccacctcgtccgattcgctgtcgctctgggtggttacgataactggaatagaagaaaacacagggtcttttttcacaatggaaagaaaggtatatccatccataacaggcatggttatgtccagcagaatcagtgaaatcacatccccgcgctcctttaggacggacagggcctccagaccgttttcagcctccacgacctgatagtccgcagaaagtatctctcccagcagcatacggttaatttcattatcttccacaatcagaatttgtttttgtgatatcatgtcctaatccccttttatctgtatacgcagtatctggaccggccggccttctttgcctggtaaagggcctggtcactgcgctggagaagcgcatcaatgtccaccatggaatcgctgctctgagcgattcccacgctggctgacaaagaaacggtctgttccgctgccagaaacgctgtcctcatttctttcaaaaaggcctctgcctcctgctccatctggtccatgctgcactttcccagacggaccaccaggaattcgtccccgcccagccgggccacgaagtcgtcccggaacaatcgtctgagtacatccgccgtatgcaccagcacggcatctcccaccttatgaccatatgtgtcattgacttccttaaaccggtccaggtcaatgtacatcaggctgaccgtcctgccgccacggttgttatgtatgtactggtaaaaacatctgcggttataaagtcctgtaaggaaatctgtattagagctgtggcggatttgtttctccagatcccgctccactgtcacatccctgaaaatgcaaagcttaccggccacatgattgaatacatcatagacggaattttcgtgaatctccagcatcttacctgacccatccctccgggatacacgcgcttccatgtatccttcgctgttaatggtgcgctgttcctcaaaggcccctgttatccacgcatcatagtcctgcccgattactgcttctttgggaagcttaaaatactcctcaaattttctgttggcattaagtatcttcccgttgttatcccacaaaaggatggcatagggcatactctgcagcaaaatttctatctcagcgctcatatttaccaggtccgtcacatcatggccgatacccacagttccaagaaccgtgacaccgtccctgtccactataggggacttataggtgcgcagctggcgcatgccgtgggatgccttgacagactccgtaaactgcagggtacgccgctcctttataaccgcatcctccgactcccggcatgaggcctccccattttcataatcatccggggataccccccatatatagcagtggttccgccccgtcacatcctccctggtctttcccaccacagagcagaacgccttattcaccttgacgtgaatcccgtccagtgtcttaaaccagagcatgtccggtatactgtctatggccgtatccaggtaggtccgggtcatgtaataatcgtagcccagcttaatctgttccatcatgcgtttcaggcgtaccttaatataatccctgacaaggggcgtctcccaaaactcatccgcagccccaaattcttccggaggcagcgcgcctatgcactggcggctgccgcagaatatgagcgaggcttccgctgcacactgggagcgcagcttagagggcggcacagagtcgtccagattccatatgagaagcctgctctccctcataatttcctgatttgcctcaggcgccactgtgatttcatgtgtaaaatgctccaatggttcgagagaacggaccagctcagagagcatggtatccttgctgaaaatcgctatcttcatcctgcatcggtacatatgatttcctccccgcggaacatcagcttttaccaaatgtatattatttaattgtagcataagcaaaatctttaatcaacaatatttaccaaattgcggggcaattgaaaggcaatccatcccttcaatccaaatgacattcaatttccctatatatattttcaatctcaaatcaaaactcattcagaatatcaattggactattttttctcagctatttatactcaaataggtataaaagcgaaaaaacaagggagtttatatgtttagtttagggattgattcaggctcaaccatgaccaaaggggtcctgttcgacggaataaatgtggtaggatgccacatgcttcccacctccatgcggccgggccagattctgagggacatttacgaccggctttacacggaggaaaccgggttcgtggtgagcaccgggtatggccgtgaacttttaaaggaggcggacgccaaaatcacggaaatcacctgtcatggtgcgggcgcttcctatctggcccctggttgtgatactgtcattgatatcgggggacaggactgcaaggtcattacccttgacagccatgggcaggtaaatgattttttaatgaacgacaaatgcgcggccggcaccgggcgcttcatggaaatgattatggcccgggtaggaagcgacatctcacatctggacgacttcgtgcagggctgccggcccgtgcctattaacagcatgtgcgctgtctttgcggaaagcgagatagtaggactgatggcccaggagacgcctcccggcgacattgtacttggatgcgtccactccatctgccacaggaccgccatctttgcccagcgtctgacaggcggacatccccatattttcttctcgggaggtctggcacagtcagagattatgcgatccgtgctgggagaatatatgaatacctcccatataaccactcacccgctctctcagtataccggggccgtaggagcagccgtactgggatatggaaaactaacgaaaaggagccgaaactgatatggaattgaagaaagaactgcccgaaatatttgaagaatttgcagatgcaaggaaaaattcgtttcttgccataaaagaattaaaggaggaaggcatacctgtggtcggtgtcttttgtacctatcttccaagggaaatccctcacgccatgggtgcctctgttgtgggactctgttctgtgactgatgaaaccatacctgatgctgaaaaggatctgcccagaaacctctgtcccctcatcaaatccagctacggctttgccaagacagacaaatgtcctttcttttatttctctgatctgattgtaggcgagacgacctgcgacggaaaaaagaaaatgtacgagatgctggctgaattcaagccggtccatgtcattgaactgcccaactgccagacagaagccggaataggactttaccgccaggaactgatacggtttaaggaggtgctggagaagaaattcggcactgtcatcactgaggatgccatccgctgccagatacataacagaaaccagattcttgcggcccttaaccgccttcagtatgtgatggccctggacccggcaccggctcttggactggatatcgtcaacattgtttacggcacgggatttaaaatgaaaattgatacactggcagaagaagtgaatgccatcacggataagattgaggctgaatacgcccagggcaggaatattggaaagagggccagaatcctggtgaccggttctccctccggcggtgccgccctcaaggtagtgcgcgccattgaagataacggcggcgtggtggtctgctttgaaaactgctccggcatgaagcccttagatcccattgatgaggataaccccgacgtatatgacgccctggccagaaagtacctgaacatcggctgttcctgcatgtcccccaaccccaggcgtatggagctgttagacaggcttattgacgatttccatgtggacggcgtggtggatttggttctgcaggcatgccacacctacaatgtggaaacctccctggtgcgcaggctggtgaaggagaagaagggacttccctataccgttgtggagacagactattcccaggccgacgtgggccagctgaacacaaggatggctgccttcatcgagatgctataaggaataatctaccacgattttcctgcatgctgcgcagcaataggcgttttccactaccgctgcccccagtgtctttctggctaactgtacaccgctgttcctgtcattacgggaaaccagaccgggctcatggcgctcccttctccatgcaatgcagcgggcgtctgatgtgaggaatcctgcttccatctcttgattgcaataaggacatttcatttcttccactgcctccttgtttttcttctcattgagcatagcacagagaagaaaaaaacacaataagctcccgcatgggccaggaattggacggctggtttcaggaaccggtgttgcagtgtcattttccctgggttataatatttagtatgtcggacaaagaatcaaaggaggagatacatatggtagaaataaacagaaacgcctgcaccggctgcgggcagtgcatgagtgattgtatcgcaaacaacctgtttctgagggaaggaaaagcagaggtgtccggaaactgtatcctctgcggccactgtgttgccgtctgtcctttaaacgccgtgtccataccggaatacgatatgggggatgtggaggagctgagtcaggaacaggccggactggattcagaccggcttctcaaggcaatcaagttccggcgcagcgtgcgaaggttcaaacagaagcctgtcagctccggggacctggatatgctgttgcaggccggacggtatacagccacagccaagaatatgcaggactgccgctttatctttgtccagaaggagctggaaatcttaaaaactcttatctgggacggaatcggccgtattctggacagccctgctccggggccggcccaggcataccggggcttttatgaggcccatatggctgattcaaaacaggactatctcttccgcaacgcgcctgccgtcctgttcatcgcttctgaggcaaatatagacgcagggctggctgcccagaacatggaactgatgggtgtctcactggggcttggattcctctataacggctatctgagaagggcagctgaaatgaatccccaggttttagactggctgggagtgggagaaaaaaagatagaggcctgcgcccttctgggctatcctgatattacatataaaagaacagctcccagaagggcggcggatgtgattttccgttgaaatcacggttttcctctacatccgcctcataaaagcaatatctgctccggctgatgcaggattcatctcctcccggagcagatacatgtccggtttgttttcatgaagccagcggctgatttctgcataccgcaggatgccttcccccagctgttttggctggtatgcgcggtctttccccagactgtagtcttttatgtgcatcacgtcaatatacgtcccgacggacgcaagccactggttccagtaagcatcctgatccgtggtctccgggaattccaacagattggaggcatcgaatatcagccgcaggtgctccgggtcatccaccatccggattgtcttaagcgtggtctccaggtacgcaagaggatgccagtacacgggttcgattgccagcttcatgtcaatgcgctgcgcctcctccataacccgcataaggctgtccatcatgtacggacaccaggcagccctttcctccctgctcaaacgtggatatgctgtctcggttcccaccacgccggctcccatttcctttgcgtaaagcaggcagtttttcaaagtctccaccgcatactcccttacactgcggtcgggattgcccaggtccatgtagcatcccatcaccggaatctccacccggttcttctcaaatgcccttctgattcgctcaatgtgggacagccggatatcctcatagctgtcaatctcctcaaataccttgggaagcgccagctgggccccatcatagccttcttcacgcagcagggatgccagcccttctatactgtgtttaccgtaatcgtgtgcacgtacgcctattttcatcttgtatccctctctgtttgtattaatgtctgtttgtattaatccctgtctgtattaatctctgtctgtagtctgaaaaacagcccatcatctatcatcatacagaaataccgtctgaaaacaagaacgtggttcgccaaagaatgtgtccttatttgtatctttatgccttcttcagctgcccctactgtcttacaggaagcatcatcagtatctccgccacttcattgtccgtggcaacccgctggggaggcccccaggttcctgcgcctgaggtgacgataacctggggcgaatcaacggatgcccggtaatatccataatccacatcaaaaaccgcatccgtaatcagattaaaggggaacatctgtcccttatgggtatgcccgcagagaatcaggtctgtctcttccccatagtcccggatatttcccggctgatggtccatcacaatcacaggcagatcctctgtcctttcaggcagttccaggctcccccgccgctctccctgcccgccgataggaaatgagtcctttcttcctgccagtacaaaacggctgtctatcacaacggcctcgtcctgcagtacccggacacctgcctctgagaggaattccgtcatccggtcatagctggggccggcatcatggtttccgaggcaggcataaacaccgtaaaccgattctattttcaaaaacagttccttaagagtcccggcatcagccagggccgtggcatcgccgtcaaatatatctccggcaatacagaccaaatccggctttgtggagtttaccgcgttaatgaccttttcaaggtgatgttctcctatgacataccccagatgcaggtcgctgattagggcaatccgaagaggcgccttctcttgtgtctggcccccaatctggatttcatagggttttatctgtatcacagcgccatggactgccccatacacagaaagggccgccgaaagaagcagcggtatggctcccgcggcaacgccggccctgcatgacagcggcgccggcaagagacgaagcagtcccgccaggaacataaacaatcctgccagattaaccagcattaccatgtagacaataaaccccagaagatagtggcagacataaaaaacaggcgcaaatatgccgtttccgggaacacggctcacaataaaagcgcccagaatcccggtgacagccagaccgtaggcaattccatagggcaagggtcctatacacggaaaaagaggccccagccactggaacaatttccgtccggcattggcgaacaatccgatcacagccgcaagtgcggcaaacaggcttatcagtttcatcctatactccatctctcttcctgtaatgaagaggcgtgcatcccatgtacctggtaaatgtattggaaaaatggctgcttcccgaaaacccggctgccagcgcaatttcgagaatgctcttacccgtgtgggtcagcagatactctcccatgcgcacccggtaggaaataagataatccaccggggactggcccagtatctccttaaaatccctgcagcattcacttgtgctgacactggctgccctggcaatatcctccagccgtatcttcctggcatactcctggtggataaacgtaaggcaggaacggacccgcctgtatgggacatcagaataggaagtgtgcttttcccgttttaagtccatgttttcgtacagcgtaagccctgtctgctgaagcagaatctggagacgccacaggtaccccggaggccgtctgcagtcgcacagatacatgtcatgtatgcaggacaatgcctccttatgccatggacatgtattgtccaacagaaaaaaatccacatcggcccctgtaataaaggaggcgcactgtgcctctaccaatccgcccgaaaggccgtgaagcagataagggtccgccagcacggcgcagtaggcgctgccgcgctgatggtgatagggagcgaccatgtgcagcatattaggaggcagaagcccgccctgcccgctggaaagcacgtaagaacggaccccggtctgaaactcgatggcgcctctcagcacgtagaccaattccaattccttatgccaatgccatgggatactgcggttcgggtacaaatccagatcatccagatacacctccatgggaaatgcaggcgtgccgtggcaggttacttcctccaaatttccatttacttccagatagtttaactgcatctaaagtctcctccagcccaagacaggattttgttatttttagccgctatattattacaaatttttctatagctccattataatgaaaaaagaggacatatgcaagagattctgtttcaaaggagtgattatggagatgaagttaacttatattgccatccatactgcaaaaccggagagaatgaaggatttttatgtgaaatatttaggtgcggtcgcggatgagccgcgccctgccggcaaagatggccaggaagcggataccggcctggcagacagcacattcggcgggaccgtgtacaacctgtcctttgagggcggagtgaaaatcaggctcataccggaacggcctgttatttgtgatgccttatcttccgtatcttttgcctcagcaatcatatcctccgctccatcctccacttcccctgccatgcaggcccgcccctcctatgcggtatgtctgaccttcacggttggcagcaggaaacgtgtcaacgaactcaccggccagctgataatggaaggttatgatgttatctgtgagccggggttttatggggtggagcattacagcagcagcgtttttgacccggagggaaatgtaattgaattggtggcgtaaaaaacaactgcgggcagccggatagagccatccggtgcctgtcaaaaaatgagccttcaaagggatttatccctccagaagactcatgtgttctttatccaggaccagaaggcatccacccaggccgaacccgctttctgccaataatccttctctgattttcacctctctgcgtatggtgttcatcttcctgacatccagcgcgtactgcgcattcctgagaatatatgaaacgtcaaaggacgcagagaccaccacttcggatatatcgaataaattggccacattcacgattccgatacccagatacctgccgcaggtctcaaaaacctgcagggctgccttgtccccgctctctgccaaaggcaccaaatctcctgcctgctttatctctttccctgtaagctcgctatatatccgcatcattgccttctcgcttgtatagagtcccaggcacccgcggctgccgcatttgcattccagtccatttttatcaaccgtcatatggccgatacggcctgaatttcccatctccccctgcatcaggctgccgtctgtccagatggccatgcctatccctgaacggataacaatatagagcatattctgcacatcctcaagatgggccgcttttctctccgcccaggaaagaaggtttacatcattgcatatatagaccggcttacccacatatctctgtatgatatctccaatgggtacgttctcccatccctcgatccgttcaaacagcaccgaatggttctgtttatagtcaatcactcccggaatgcccattccaacccctaaaagccggcttctgtcaatacctgaatcctgaatcaagtcatccatctgctgtttcagcagacgtatcatctggtctttatctgagtccctgggatagacacggacggaaaagcagatattctcacattccagattgctgatagccatacgcactttcggaaactccaggtcgattcccatggcataggccgcaccagcatttgcgtggtaaagcacgggatttctgccgccgttggatgtgccgtaaccgcttttaaccaccaggttgtccgctgtcatttcctgtaccaggctggttacggtcggacggctgagatgggtcatatatgctatatctgtcatggtgactgccttatgggaccagatacattcgtataccacctgcctgttggctttcttcacatcactgagattattccccttcatattccccctcctgtaacggcccaatgctttttacatttttccgtattaccatcatcattatatcttgcccctgcttccagtgtcaatagataaaaggcagccgtttcctctgtataaaacggctgcccaatatcataatcagaatttgtccagcttcttttgaatcacctgttttctcgtctccgcggcctcacgcagctgctttttgtgctcctgtatccataacaggtttgcctcaacctctttttttgccctgtcaatcatggacttcatggccttatcaccggttcctcccctgacctctctgcattttacaaaatgccagggattgatacactgggagatgggcgtaaaatcaaaagcaaaaggctctccaaagaactcatgataggcagaagaaaagaattcttcagatatattttttaaattgtaatccatggttcccgcctttttaacaagaaaactaacaaaggaatgggccttcctgaatggtatcttataagagcggtacatttggtcggcaatatcagtaaccacggaaaaactttcataggccctgctctcaagcaattctttgtttacctccagcgtactgataactgcgcggaacaactgcacatttttttggaacagctccaggcagccaaatacactatcctcgatgtcttcataatcagaaatatccccgtacgggcttttcagaaacccggtcagtaccgtatccgccattcccttcagaacagacagagaggaccgcagatgttccaatgcaatgggatttcttttctgaggcataatggagcttatggaaatgtagccgtccgccacatgaatcatattcatttcctgtgttgcccagagaagcaaatccgtaacaatcctgcccatatccaaagcacacaatcccaacgcactggctgtctgcgtcaaatagtcgctgtttccaatggcatcgtatgcattctcaatcatgcctgaaaaaccagccagctctgccacccgttctctggaaacaggaaaaccagtggtcgtcactgcggcagcgcccatgggcgactggttcactgcattataagctctgcacagacgtttaaaatcacgttccagcatatccgcggctccgagaaaataatgtcccaataatccgggctgcgcatgctgtgtatgggtatgaattacatacaaggtgtctttatgctcctctgcaaacaatacaatggcatttttcagatacaggaactgttccatggcctgcaaaaggccatcccgcaccgccatgtgggaccatgccacgcacatgtcattgcggctcctggccagatgcagattgcccgcaataccgtctgtcgcctctatcagcttgctttccatataaaaatacaggtcttcataccgcccatcatacaccgtatttttatagaactcctgatccagttccccaagagcctttagaataacgtttccactgttttcatccacaatcccctgttccatcagcataatcagatgggcttcatttattgcctgaatatagggaagcatccggtttttagctctctcatagccaggttccagctccatggcaaccagtgccttccctgggtatttcatcccttcctgttccagcgtctgctttcttaattctgtatatgtctctggcagcctcatgccccttatgccctcctctttcatcttttcataatatacctactggtctgccacagctccgtcctcccgcagctttgtcacatataaacgcggcttgtacggatagtcattcatggccgattcatttagctctattccgattccaggtccctccggcacggtcagatagccgtccttcagagtaagagtggattttactatcctatttttaggtacactgtcctcgcccagcggatattcctgaatcgcaaagtttggtacggccgcagccaattggatgcaggccgccgtactgaccggactcagggggttatggggcaccaccagaactcccttggcttccgccagggccgcaatctttttggcctgtgttattccgccgcacaggcatacatccgggcgtatgtactggcatgcattacgtgaaagaagcattccaaattcctctaaagtgtggagcctttcacctgtggcgatgggaatatgtattttatcagctactttttccatatcatcaaaattgtcaggtctcaccggatcttcaaaaaacatgggtctggcctgttctatttcccttcccagcgcaattgcttccgg

SEQ ID NO: 3325 - DNA, 6766 bp, Unknown
  gut microbiota DNA sequence
atcgtggtagaaaagctaaccgtatcttccccgttattcacatataagaagataatctcctcatcgccggtcaccatatacatgtcatcggcatcttccggcaaacgtacgaatactctcagttccgcatccatactgccgccgtccgggtcagggaatacttctaatactttcccctctccgtagaacaaactctcaaatttagcaatgtctccattggtaaagtcgagatcgcccggtgatattacattgccgttttcgattgcttcttcgatcgctgtcaccaattgggaaccagtcatttcgaatgtgacagactctgacgacgatgtagccgcataagctgcgttcaggtccgcacctacattggtgcataccatggctgccgctaacgcgaaggccaccagacgtttccgcatgttataaactgatttctttaacatgccagacctttttcgtccttccatacttacactcctctcatactttttctttctacatgattccagataaatccaactgtctgaaactagtatagcaaatcgcagttacaatctggttacaatttaagaaagtttaaaatttttcttaaattaattatgtaattatagattccctcgctataatcatagcaaagagggcgttatacaaagcgttatttacccctgttttttcgttactttttatttatatcattgaaattctatctgttttttataacttttccatccacttatatccatacttttccaattacaaaacgttgaaggcaatctcaatcaatgagaaaaaacctcatttctaattgtaatatcaccaatgttatggtaaaatggttttagatacaaatgacacatatttttgagtttttttctcacaaattgaggtgctatcatgctaatccagttcagttttaaaaatttcaaagtattcaaggaggaagttttgttggatttcctacctgcctccattaatgaacataaaaacacgcttctgaaggacccggctgacggagaatgcatccttccccttatcggaatctatggtcccaacagcggaggcaagtccacggtcctcaacgctttatcctgtctctcatccctggtcacagcatctgtaaccgtaccaaccagaattaaagatgtccattgtctgttttcatcagactgcaaagacatccccacccagtttgacgtgttattccgcagccagggatttctgttccgctatcagctccagttcttaaagggaaacattgctgaggagaatctgttctatggaagtctgggcggaagtgatacgggtattctttttaataggaaggaatccgtcatccatcccgggcgtgaactcatctccttcccccttaaggccgtaccgccatcagtaactttgctgtcatggctcaatgcctatacggactccatgcacgccaaagccgcctattcctggttcagcagaatacagggcagcagtcccagagaactgccttccgatgccgatacacgccggaggctgtgcggtattctgcaggatttgggacttgatatagcagattacagcatcataccggactctgaccacaaatctcctgctgcattcctggttcacagtccttatgaaggctgtacctatgaacttccatgggaagaggaatccatgggcactaaaaaactgctctcactgctgccctcaattcagaccagcctggatgacggcagcctgatgatggcagatgacctggactgtattctgcatcctcacgcgctccgttacctgattgctctctatgccaatcgtgagagaaatcctcataatgcgcagttgctattcaccgcccacaatactgccattcttcagccagcacagatgcgcagggatgaaatctggctttgctgccgccaggaggggcaggatacggaattataccctctgtccagttacaaaaaagaaaacggcctcatcccgcgtaatgatgaagcctacggcaagcagtatctggaaggtcgttacggggccatgcccaatatacatgcctagcggattgattatatcgtcccaatgtacggataccatatgccttctgtatcataaagaaaaccgccgcagattcatttctgcgacggcatatttaatacaagcttatctcttctattgtaatctttctctgcaaacattctataataggcttctcttataaacttctcctcattcctttatatcaggctctccggcatcacctggtaattaagcttcaccttcctgcccccatcccagagatgcaggttcctgtcaatccgctcataaatccgcaggcaatactcattggacgtgccgtttagcataaccagatattggctgggattataacaggtaaataaatcccctttcctgagggactttccgatggcatcgtggagcttctctgacgcggtttttaaaagctctccgcctgtatccagaggcttccccttagaatccagcaaagtacagcacagcagtacactggaaaaatccacccgctccgccatacgggccaaaagccggtaacagtcgataaaggccgggtacgcacagtagtaaggcccgttaatcctgtccctctcatgaagactgtctcttatatcctttagcgtatcggatgtataacgaatctgtccgctcatgatacggaaccgttccagcatcttctcggaaggaggcagtccctgttcctcaaaatactgtgaaacagctgtatcgtatacctgcatggcctccttgaaccgcttcatggcaatgagacagtcaattttcataatctggcattcctcatacggatacagctcgcaggcataattacatatctccagaagtccgttgtattcccggtttttcttcatgagactgctggcaacccgcagacagctgaaataaagctcctgatagcggactcccaccactgatacccatttctcacctgcaagctgggccagaaattccccctgatacagactgcaggcccgtttcaagagtgcctcatcatggttgcgcagggccacctttgccgtattctcaaaatccctggcatcaatgtacaccggcagttccccgccatcccatctgtagattcctccgtctgtgcggatatattcccgtggcggcagctcactaccctccaaaagtttgcggagccggaataccgtagcccgtaaactccccgaaggattggagcattcaccatttccgtaaagcatatccagaagctcctccctgtgtacgccctcctcacccgaataaagcaatataagaaccagctgcagtacctttcccgaaggccctccgggaatctgcaggggctttctgttatattccagcatgatgcttcccatcataaaaacggtcaggccttccctgtctctggccggataatatgtaccttcctccttcatttgtatcccccttgtggcaaagcgttatttaatatataacacattttactacagattcttttatttttccattatttatccttcataaaccaaaaatagtaaggaacctccaccaaaagcatgacactccagcctatggcacaggcatatgcaacccccaaaagtccgattccggacgtcagcaggtatacaaataccactcgcaggctggtctggacaaaggtccccaacagtgtaacgctcatgtttcccattcccctgaaaaatccctgaatcccattggtaaatgctggaaacacataaaataacgccatcagtcccagataactgctgcccaatgccacaattccttcatttcccgccgttacaaacagccccataagcggccttctgaataatgtgatggttatgctgataaacacccagtaacatgcttccagcataaggcctctcctgaatcccttcctgatgcgttccttcctgcccgcccctctgttctgcgccacaaatgtggtaattccatgtgaaatgctctgctcaggggtaaaggcatagtcatcaatacgattgaccgcgttgaaggccgcaatcatatccacgcccagcggattgacagcaccctgaatcaacagctttccgatgggctggcaggattgctgcaaggctgtaatactgccgtaacgcagtgtctgcctgagaagctgcctgtccatggtgaactctccccgtctcaactgcagcataggaatttttctgtatacatatattatgcagagaacagctgaggccgcctccgacactaccgtggtaacagcagagcatacaatgccaaatcccagccccccaataaaaatcagatccaaaaccgcgtttaatatagaagaaaaagctaaaaacttaagtggtgttttggaatcacccacacttttaagggcagccgataccgcgttataaaagtaagtaaacggcgctccaagaaaaataacagacaggtaagaagccgccttgcccagtatctcatccggcactcccagtgctcccagcagagattttgagaaaaatcctccaagtatggctattatcaccgaaaaatagcagccgaatataactgttgtagacatttcccgtttcagcttttctttctgtcctgctccatagaactcactcatcagcacagacgcgcccatacagatacccgatatgccgagtatgacaatattcatcaccggactggccgtaccttccgctgccagcgcttcctttcctatgaatctgccggcgatgatggaatccactgcattgtaggtgagctggaacatatttcccagaatcaggggaatggaatagtccaccagatgttttgtaatgctgccttctgtcatgttaactgccgccatatggtactccttctgacactcattttatgtaaatacgcttaccgcccaaaaggcccggcaagaccttctgaatcttttcaaccttctgccgggcctgaatctataaagaatggatcgctaatgatattctgttaataactgcgcagcttatcttcatcatcttccgtggtcttatcaatggagcgaatctccacatcatatccaaaatgatcgtctaccttcacataaaccttatcccccatcttgcggcctcttatggccttgcccaggggcgaatcaatactgattaatccctgaagggaattacctctgacagtagttacaagtttataacgttccgtctcatcatcatcaggaatatagacctccactgtatctcccaggcccacttcgccttccctggaattatcggatataattctggcggtttttatcattttctccagatagcgaatcctgctctcattcctgttcttatcctgcttggctgccttatattcaaaattctcacttaaatccccatgggccctggcttccttcactgcctccagggcttccctgcgtaccactaatttgcggtattctatttcttcctgcattttctttatgtcattggctgtcagattatcatacatcctattgttctaagtcctttcttttccggtaccgccggaatcatttttaaaaattctctctccgccatgctgttaagccttgccttggggactacggatatttccggagcagtccgccggcgcttaagtcatacacatttccgggagccaggtttccataatccacatgggcaatatatggattggccttattataataagcggcaaaaatgcgctccacatcctggtttgccgtggtcttaaaacaccggtccaccatcgtctggggcatcagccctgtcacggacaagtccaccttataccaattgcctcctgcttccacgtaaacaaacatgtggtccttatcattatcatccggcgcacagaagcagttaaggcccatggacctggcaagcatctggtatgccacggaaatgccttcgcagacagccttatgattcaccaggcagccgtaggctgtgaaggacaggtctccggaagtgtcctccccgttcacaaaccggttatacaatcctgtatcataggtgcagcccgaggcaatgtaaagagccgcatgctttgcccgttccagttcactgacatctctccaccggtagctgttcagataatcacggatcaccagggccagtgcattgcgccgctgtttatagatatcgcttcccacattttcctgatacagggccacctggcccagcaccagaaggctgtcgccgtccacagccatttcccctgttcctatctggtcgctttccccgtacaatgccttgcacaaatcatcggaaagcccaaaataattgtacagcccataattataatcctggcgcaggcgcctttccatcacaggttcaccctttgcattccatcccatgataacgtccacatattgaagcccggcctggtccaggtagtccttcagagggtaattggcatcataggatgcttcccatcctccaactgtccacgctccgtccggtcccacctggtacccgtccggcgtgactgtgtccgtcagcatcctgccgtttgcgtcaaaataataccattttccatccgtactctgcatccatcccctggcataggaaccgtcgtctttctggtatctccatgatccgtccgcctgggaccaggctcccgcatacacaggagtggttaataaaaaggctgcggcggatgccgctgccagcagccgtatcattgaccggcctatatttgagtgctttatgcccggttgtttcataccgggttccatcataccagatttcttcataccgggtttcttcataccaggtttctccatacccgg

SEQ ID NO: 3326 - DNA, 2950 bp, Unknown
  gut microbiota DNA sequence
ggaaggaaccgtccaacagataccaattgaaagtggttgaaatatatatatcactattatattcaattgtcaaatttcttttcatgtcttgtacttgaaaaaatacaagttttcgttgtgcaattatcccattatttgccttttggactcttttactttatcaaaacttaagggcagttccccatttttctgggaaccgccctgattcttttccgttgcagcaggtattttttatgtgatttttaactgtttcatagaaaatataagccccctctgccttctaccgcttaagaacaaggtgctggggaaggccgtttaccataaacggctggtagtctccctggattaaaggctccacataattgacaaattcctgggtcacataacttccatccttgttgacccagcttctgggaactgtcttctcattattggcaatcttgtgtacgtcatatatgccggctgcgctcatataggggtcgtcggaaacccggtcaatgaccaccatcttgcctgtatccccctcgtccgccgccttgacagccgcgcctcctaccatgaacgcctcgttgatatccacccttgaagccacatgggaagcgctcctctgcagggtggacagttccacggacctggtcttgcaccccagctcacctgccaggaaacctgccaggtaatccgctgtcccggccagctgcttgtgtccgaaggcgtccacgtaatcgctgcctcctgacagctggcatacataccgtccgtccggcaccttgattccctcggacacagcaatgacaatggacggcttcttctgaatcagatccttacattttttaaggaatttatcaatgtcaaaggggatctccggaagataaatcaaatccggtccgcagcagtcctctgtcctggccagggccgtggagccggtgagccagcccgcgttccttcccatgcactccataatggtaatggtcttgcggcggtaggataagcccatggcatcccggatcacttccttggtggaggtggctatgtactttgccgcgcttccgaaaccaggcgtatggtccgtaagggccaggtcattgtcaatggttttgggaacacccaggaacttctggccatgtcccttgacaatggcataatcagacagcttcttgatggtatccatggaatcattgcctccgatatagataaagacctcaatatccagcttatccagtatggcaaatattttttcataaaatgcaggattctcatggatatccggcagcttataacggcaggaacccaggaatgcagacggcgtcctctttagaagctcaatatccatgtctgaatggatttgcgtggacagatccacatacatctcatccagcagaccctcaatgccgtggagcatgccgtatactttgtggaagcctctctccttcgccgtcttatagacccctgccaggctggaattaataaccgaggtaggtccccctgactgtcccactatgatattgcgttttttccccatacaaagtcccctttcttataataaaataacatggattacattctaataaggactgtcctcctcatcaaacccatggtcttcatcgtccccgtatcctccgatgaattccctggacgataccctcttattatccctctcctgctccaccagccgggacagctgctccttcacatcctcacaatttcttatattgctgatgtcaaaggccttcatggtcttatcgctgctgtccacatggatggtgcccaatcccaccatcctctgccacagggttttcctcagggacagatccagtatccggtacaggcgcacctcatcttcatgtatgttaaggacccctgtcttaatgaacagccggtcctctgtcagtccatatacagtaaatgtccatggcagccccagccagttccttttccggtcactccaaaccaaatcgtcacgtttcatacagcgtcctcctctgtcttagggatacaacccctcttattcattattgtactataaactcatgcaaatttccagaaatatcttgcaaatataatcaaatttctgcgtttttttcttttatttacagactttccgaacataccgccatactgtctgccaaaacaaaaaaacagtccccactgcacggactgtttttaatcctgtttcttctataactattataatgcagaggccttactgctcctgaacctgcatatcatcttccatcttctcttcccatatgtagcctcctgccgtcttctgggcaccgctgagcgcacatgaaaggcttctccggctgattttaagactccggctggcatgggcaatggaaaggaattccccaacgatttctccatccagatttttctggaccagaggacgtttatcatggttgccgattttactaatcaaatctatctcaatactttcctttggcgaatccgccagtacttttctccagacataaccgcctccggtcctgcgttcaccatgagcagctcttgcgatggaaccaatggaaactcctgttgcctcatgggcagccctggagcttttataatccgcaatataaacaccttcggtagaatattgacgatatacataacctgcactaattgtccgactcatctgtatcttcatcctcccattatcttatgattgccacgcgtacatggtcattatatcaactattgacttttttgtccagacaacttcttacacgtataaccacccctacattaagtgtattcggagagtcgaagatatagctgaacaggtttcaatcctgatgaattcttccacgaattcagtaatttgttcttcttgttgcaaaagtcatagtattttctcattatatgtgctaaattatatatatcggacatttattatatatatcaaacattcaggaggtattggactatgtacgcagaatttacagacgac

SEQ ID NO: 3327 - DNA, 1574 bp, Unknown
  gut microbiota DNA sequence
attgatacccagcacaaggagctgatttgcaagatcaatgatttattaaagagctgtgaggagcgctccaaccagagcggtgcagccaggatgttaaactttctggcagattataccgagtatcattttaatgaagaggaagctctccaggaatccataaattatccaggcatcaaagagcacaaggaaaagcatgaggagctgagaaggactgtccaggagcttcatgagatgctgacagaggaagaaggccccacagacgcattcgtggaaaaggtctccgagaaagtcagggactggctgtactaccacatccagacctttgaccgctccgtggcggaattcaaattcatgcgcgataatgcagagcgtatctgatgcctgaaacagcggtccggacactgtatcggcaggaaaatcatgccgttatagcgccctggcccaggggcagaaaactgcccagacaggaatctttcttaatacaaaaatccagacagcggccgtctctggcctctgtctggatttttttgtatactttgaaacactcttctgtcagttttcaggttatattgatatgctcacatgacatattcctgccccttaactaaagttcacccatcacgttctgtttatcatggtccttttcaagccgttcgctgacatccacaaaatcctcatcctcatatattttatcaatatggaatttagtgattgaatatataatgactacaaccggcgtaatgtaaagcagcggaatatatggaataaacgacaatacagatacacccagtgcgccggcgcagaataatgcatttgtgttccatgggatgaataatgctccgtatgttccccctgcttccaaatcacgggaacaattttttggaagcatattataccgcttatacaaaggagccataagggttccggacattacgatggcaaagttttggctcattgcaacagcatttccgacaaatccaaacaatatagtcaggaaggtaacgcccgctgtaccatgtatatgttttactgtggaatctgcgatgcatttcagaacatccatatggtccagcataccagctaccgtaaatccaaacaatgtaactccaaccagactccacatgcttgaaatacctccgcggttcagcagcgtaaacagcatctcattctctgtttcaagtgtaaacccgctgtaaaatgtattgaatgcagccgccacatccattccctgataaaaaacagccactgcaatccccataaccgacccgataatgatacataaggtggccgataccttcttaagcagcagaacaatggtcacaagtaatggtaaaaatgccataatacccagcttaaagtttccctgaagaccttccatcatggcgtttacttccggcgaatcaatgtttcctccatatttaaatcccagcacaaaaaagaatatcaatgtgattaaataggatggcacctggtcatataccatatgtctgatatgtttaaaaatattgactccgcatattgaggaagccaagatggtggtatctgacatgggagacattttgtcgccaaaaaaa

SEQ ID NO: 3328 - DNA, 20914 bp, Unknown
  gut microbiota DNA sequence
cccccgcggttcctacagagccaagggaggtaccgctaagcagtgatatgatagagcataaaataattgccgttacgagaaaaaatttaggattaatgaatttaataccataataaataactgccggcgttgttcctgccgcaatccatgtaccaatcaatgccccgacggacagcatgataaaaacagccggaagcgatttggccgtaaatttaaccgcaatgtcttcaagttcagatgccttaaatccgtaaaacattccaaacggaatcaggaccacccagagcattaaaaacatggctcccatatcaccatcaaatattactttttggactgcaatcgccgcgcaaatcaccacaaacacaataattgcaggtaccagagacatttttctttttttgctgtctatattcctgtctttcatttgcttcccccatttcacttctacatatttagataatttcttggtatacgagctgaaaatataacagttgtttcaggagccgacgcattgcacagctctgcataatctcctgctgtctgtgattcttctccgttccttccaaaaatcgtaacctcatcccccacttttacttcttctatatcagtcacatccaggattgtgtgatcgcagcatatctttcctatgataggtacccgtttaccgtggatcagcatttcccctttgttagataaggcacgccggattccatctgcaaaccctaccggtacaacggcaatcttcgttctcctgaccgtcctatataaaggaccatagctgacttccgtatctctgggtatccattttatctgcacaatatatgtattcattgacatacagtttttgatgccgcagcaggaataccgttcaggacaaataccatacagaatggaccccacccggatgtaatcacctggcgtttgaggataccagatatatgggtctgaactcattaaatgtgtctttatggagatattctttttctttaacatctttatgagttcaaagaatctttgctgctctgctaaatccagtgccgcgtatgctccctctgtaccggctgccgtgagatgagagaaaacggcctctgtgttcagattgggtaatgcatgtattttcgccgcttcctcagcagcttcttccaaccggtctttaagtacaatgcccatccggctcagtccgcaatcaactttcaaatgcgccggcaggctgtatgactgttttacaagttcatctgatatctgttttgccatttcataatccgttattgtaattatgagcttatgttttccggcaattagtaattccttactttctgccggcatcatcaccagaatcggagctttaattccagcctctctcagctttacagcttcttccataaaagtgactgcaaacatgggacaaccggctttctccagtttttttgctatggggacagcccccaaaccatatgcatccgctttaaccactgctataattcccgtctcttccggaagcctatcagatacttttttgtaattttcagcaattacatccaggtctatatccatctgtgtatacatcataattaatatcccttaagtcaacgaactttcatttgatattgtttctccaaaatatccaaagccccatccaatcctgttatactctccgggaattcaggcaaataagaggaagtgacctttgtgtctttgacaccgctggccgtaattaaaagtacgaccttctcgccttttttaattttcccgccggcaaccagctctttcagccctgcgtacgaggccgcagatgccgattcacagtaaacgccttccttttgtgccagctcactctgcgcctggtaaaagtcctcatttttctccagggcgattgccaatccccttgattttctgagcgcgtaaagtgaatggtatgtgccccatttggtggatatggaggatgccacgctatcccatgcttctaccggttcaatcatttcacatccggaattatatgccttggccaccggaccatagtcttctaccgaaaccatctggggaatatggttaataaatcccatctcctttaattctgaaaagcctttcatgattccgaacaaagcatctccgtagcaaatgggaacaacaatcttatccggaagctcatccatctgcttataaagttcatatgcaatcagcttatagccctcgatagcccatggattgctgcccacaatcggaaccacataatttgtggcaggataccatccacattggtttaccagatatttcagtacttcccatctctcagatactgtttttacaccaattaatttagccccgtacacctgcatgaatgtttccagggttttattgactcctttaactgtcagaatcacacagggcattcctgcctttgctgcaaatgctgctccggatgccccattatttccggtcgatgcgtacacaacgccaggcacccccagctccattgccttatttatcaagactgcattcagacggtccttatgtccccaggttggatttctcgtctcgtcttttatatatagatccaatcccagttcttttccgattgccggcagcttcgtaagtgctgtgtttcccactccaaggtcaactaagggctgatttcctttaaatggaagcagttcccgatatgtttccatgctgttacctggaaacatcttcaaaaatgttgccttttttccatctgtttttgggagttcatacacaggtgttatgttggaaacaaaggtttctgtcctgcaataagaacagccttcataaatacgttctgattcaaatacatgcccacattttaaacaaactgattttcctgtatacattgatttcccctctgctatacggttgcaatggcctcaatttcaatatctgcccctttaggaagcgccgcaacctggacgcacgcacgcgcaggcgcattcccgccaaaaaatgtcccatatgcctcattcacttcgccaaacagttcaagatttgttacaaaaattgtggtttttaccaccttatccagaccgcttccggcctccttcaaaatttccccaatattcatcatggactggattgtgcggtctttgatgcttccttccgcaatggttcctgttgagggattgattggcagctgtcctgaaacaaatacaaacccattggcagatatcccctgtgaatatggcccaattgctgccggtgcttttttagttgatacactactcattttttctcctttcgaataaccattttttacttgatacgtagattataagatctcctctatatatttgtccaacgaattaaattgattaaaataatctatttttcgaattgtttgctatataagaaaagaacctgacttacttatgcaggttctttacatcctatccctattctgttgtctgaacataagttaccgcaggatctatttcggaatcatctgaggaaataattcaaaaaaatatctcatggccgcagaccccagtctggcgcggttatatgtcacatacaaatttacataccgtgcagatatttctccaaccggaatttccactaaaatctctgcctccagctcgtgttttacaaggtcagccggcaggaaacagcagcccaggcctgctatgcaaaagttcttcgcacttccaagcatattgcagtggatacggtatatcctttcatccaacagaaggtgctcagaaatatctgacagataattgtcccatatatcagaatatatcaacggaagattcaacaaatcttccccccgtattcctttctgcaaacaggagtactgctccctttttcccacaaggacaacctttgattttttgtaaagctggcttatcagactatttgtgtttatgttataggcagtgattgccaaatccagcgtactggtgtgcatcattgaaatcaaagtttctccatggtccacagtcatattcaccgctatgtccggaaaatctctgctgtagcgcaccatatcatccgcaaaccagcaatcatgaatccattgagcacatgcaacattcaagtggtcctggtatacattcagcatgtgtatttcacgtaaagccactgtttctacgttgagcaattgttttgcatactgcagaaacagtgttccttcctctgtcaattcaattcccgttttatttcttattaccaattgacattttgtatattcctctaaaaggcggattcgattggaaattgtggattgtgccacatacataatttcagaagcacgggtaaaattcttacattgagataaaacgataaatgtctgtaaacaatcaaaattcatatggtgattccttactctcttttaagacagactcttctgaatctgccttttctgttttcctgactctatccctgtctgttcagacatgtcctaaaaaggtacattttcatcctcatcccctttcggcgcagccacggggcgtactgtgattccgttaatctccacatgttcattgatggctatgacaatacagggccgtccctcaatcatccggttctccaccagatatgtcttatctggtgataccttgatgctcacgtccggggtcttgatttcaaagctcctggtgttgaccacattggctgccacaaagctggtgccggggccgtcctccacttgcgcatacctctgttcaaactcctccagcttctcaggggtggcgccgttggtctctaacagcttcttcacctgatacttgtccagggtcagggggacaggctcatcctttgtctcctccaccagctcgctcaggttctcatggatgttcttcactgtctcaaaatcgcagttctcacccagcgtctcctccacaatggcctgaaacgtctccttctggcttttggcagacatgggaatcacgcagcctaacagctcgtcgatcagggtatccggcagctcttccggattcttggcatagtacaaaaggctgtggatatccgtattcctgtcgttaaaggcagggaacagaaatccctggacgggcgcttccaccagccagtccctgtcgcggttttcaatggtatttgtaaggctgttgtaacacaatccggccttggaaagcttgacaggacagatggtacactgtatgaattcgtatacatagtccgacgcgtcaaacatctccgtaccgtccgttgccttggccgggatatcgtaggcgcagtggataaggatgatatagtaattctcgccgtagtcatatgccgcaatgaccttgtcatagaactcctccagtatcgcgtcatcctttaactggctgtccctgagctttaagagaaaatgctgggtacctccttctgcctccgtatgtaaaggaaactccatattaatcagattcttttcgatggtcccggaaagggcgtttctgaatatggtaaaatatttaaaggcctcttcctcctggagggagaggaatgcctccttaagctccgtctttttatttttctccgcgtccacatagcagccgcagatacgggtgatggcgcagcctgcaggtgtaaacaattttttgatctcatttgcttctttcttattcatgaaccagtctctcctaatctcaagtctaatctgaaattccatttaatagtagaccagatttcccaggaagtcaagagtcctgcatccggcgataaccaggcatctgctgtccggtttgaacggcaggcacaaatgcccggtttgaacggcaggcagacgaaaaagggccggcaccgcagtcacagacaatacggtacagcccattttccattatactatgtatatcttattccgcttatcgccccagcaatatctccactgcctccctgagagtcgcatcctctcccacattacccggaaatatcacatatggaatatgcggaaaccggctctccttccccgtctgccagaccggcacgccgggacatatctgccccattaccgtggcccgcttcacccggagcgcctttgtgcccacatcagatgaagtgatgcctccttttgctaccacaaaagcgggtaccaccttcaggttccccaccagggactgcactgcctccgatatcttcacggaacgcataagggcggcttccctggtgtcatccttaaattccagcagtttccttctggtatagaccgcagccgtctttccctccgctatggtctggctaatcagctccagggtccgctctgtctcttccctgaatgcggcgtcatttaacaccaggtcggaattgaattccaggaaccgtattccgggtacctttttaagctccataagctgtctggtggtcttggctgtatgtgaccccaccacgatgacgccaccgtgtccgttctccggcagcgccatcttctccctggtaagaaggggctggtccgtgatgcctcccatcacctttaccagggaggctgctgtccggaacaggaaccgttttccctgccccatggcctcatagagagccaggacaaagacctttaagtcgccgtagtccacagcgttcacaatcaccttattaaagttcctgacctccatcagctgtccagccaccttatccactctgccgtgtcttaggtcgtccaggccgatgcagatgacttcaccagccggataggcgcctttcgtcttctcctccacataatcagccagattggaagaacgatatccaaaggtcctgtcggcggcaaattccgtctcccccgcaggcaccagttcccggccgtatctgacatagtggatgtttccgatggtaaagcgtcccccctctttgaaaaaggggcagatgacttcgccgtctgtttcctgctgtccttcccggctcagtacatcccgcagcacctgggtctccaggggataatgtcccctgagtgtggaatcgccgcggctcataatgagaaaatcccggcctgttttcctggcagcctttactatatttccggcaatctcctggtgggccttttttgtctcgtcctctgtaaagcccctggagttggtaagaatatagaacaggttcccttcctcctgaaagccctgcagcacggattcctccgaccagtccgtatacaccgagacgtcatgaacggtctggacaccggtgggatcgtcatccagcaccacgatcttcctgccgctccttttgattgcgtccccaaggagccgttcaatccgtccctcatcccgttcagccttctgctccagctctcctgccggtaatctggtgatttctctcatatccaccccgcctgtctgtttttgatctatggttcgcctgccggcctttttacctgccggcctttttacctgccggcctgtttacctgccggtctgtttagctgccggcaggctttattgcctggctgttatttcttcaggttgccgtgttcgtcgtgcattgcgtcatactggatattgttggtgccgttataacccagaggattgcggaagcccagaggattcacgccgcatggatactttgtctttacctcttcaagcagttcgcagtacagatccgcgcatctctccacgattttgtcgcccttttccttgcttgcattggtgggatccccaattacacctgtatccaggtcatccttctccatcagggagaaggttccctcgaagtggtacagcatgccttcacctgctgcctggcctggcgcgatcttccacttggagtcgatgaggccgtgggccttgcccggtacagccaggtccatatgtaccttgtcgggatacagggacagagccacagaagtctccgcctcatctgcatgccacataaatgtatccagtgttttcttgttgtctctcaggaaatcataccaggtgctgccgatggtaaagtatccctcgatacctaacttatgaaccgcctcaaacatggacatggtctggccatgggcggagataatcaggaacttgttaaagcctgcgttggcagcgccgcggacgatatcggtcaaaaggcccacatgggtctcaaaggtcagcgggatggttccgggcatgccccagtggtgagccggatgggagccgtacatcgggcaggcgagaatcatggcgccggactttctggcaaccgcctcagcaatacccatggcgttaaaggaatcgctgccgcatgggcagtgaggtccgtgctgttcgatggctccgattggaagaatcgcaatgtcacacacttcctttgcgtaagcacagtttacagctgccgtattgtcctggaaccatacggaatctctcttgtctaatttgaattctgtctgctttttcattttaatatatctccttttattttaatattattttgaatactggttaaactcttttacaatgtttttcgccatatttccaatcatgccctgatcggagctgatagggatatagcgcactcccttttccatcagttcctttgccatctgcgcgttgtccgccacagtgcccactgccttgcccgccttgtttaccttctcgatgatttggtcaatggcttccagaagctttgggtgcttcctctggcccatcacatcccttcccagggactgggacaagtccatgggcccgataaataccacatccagctcctctaacttaagaatctcgtccagattgcccagggattccatggtctcacagtggataatagtcagaatctccttgttggccttgtcaatatactcctgcttatccatcattccgtaattggcagctctgtgggtgggcgcaaatcccctgtttccaagaggcgtatatcttcccgcgtccaccgcaatcctggcctgctccggtgtatccacgttcggcgcatgataacccagggctcctgtatccagggcctgcataatgttcaccgccgtggcttccctgacccggacaatgggcacgattcccgtcaggtctgaggcccttaccaaatccgtgatggtttccgggttataggagacgtgttcactgtctataacaaagaactccatcccgctgcatcccagaatttcaatcacactgggatccactgtctttacaaaggttccgattacggcttcgccgtttttcagtttctgttttactttattttccctgaccatttaatatcttcctcccgtttttatctgcgcggcctttaatccggaagctgtagagcgtggtggaggctgccagataaagaatatccatgtccggtcccccaaaggcgcagttgccggtctgctcaggaaccttgatgattcccagatagtccgcatttttattaaaaatatgaattccgccctgggcgcagcaatacacgttttcccggctgtccgtcttcattccgtcaggcaggcccgcgccctctcccgttgtctctgcccatacggccccgccgcttaaggtgccgtccgcttccaccctgaacttacggatgtgctttttcggcgagtcattgacatagaggaaggcttcatccggggaaaagcacaggccgttgggattttcaaaatcatctgccagcagcttaagctcccctgtccccgggtcaaaggagaacacaccctggaaatccagttcctggggcctctcaagtcccacccgggacggattccttccaaatctggggtccgtaaaaaagataaccccgtcgcttctgaccaccacatcgttgggactgttaagctccttatccccataatggcttaccagcacttccaggttttccccctggtcattggtcctggatatgcagcttcgcacatgctcacagacaatgatgttgctatccatgtcataggcatttccattggccttatgtgtatcttcccgcaaaagccttaccgttttgccctgttccagacggtaagtcctgctctccgggatatcgttaaaggtcaggcatcctgtaacatcgttccatatagggccttcgatgaaggtaaagccggaacagaccgtcgcaagatcctgtttcacatccaccacatcgaaaaaccgttcatcaaaactctcatagaaaagtcccacttacaccgcctcacattctactgtatcacaaccggctcaatgtccagcagactgcacagattgataagttcctttttataatggcccgccacaccgctgatgtggttggagttgaatctgtccacaaatttctcaatatcaaaatccgctttcataaatgcaaccggaagctgatgcacgcctcttgctttcacaaaggcatccagaatctccttggacggatccacaaactctgtctcaataataaacatctgatactttccatccaccctgcaaagccttgccatggtcatctcgcccgcgctcggcacggtaaaggtgacagctcccccggagggcctgtttgccctgcgcagctcgatgttcttcatgttcctgcatccgtcgcagcaccggcccgcatagtaggtgcacatggaaccgcagtttggaaggtatataagcttttccttgtatcccacatggctcacatccgcgaacatggtgggcattcccccggagataagttttaacatctccatggtcagggctccgtccgcatcagcctcacaggaaatagggaatgggtcgaactccccgtccgcatcgtatccgccgttgagcagtgccgtggaaatgcactggggcgccctgaaattcgtcatgtccggcatacatttgatggcgccgaaatccagatggcggtcagcgataatatccttggttgccagataacaggccacctgatattttaaccgctcttcggtcagcttttcgtcatacttcacagagcccacagaatccaccagccacttgaatacggcttccaccctgctctcatcaatcgcctcagccctgcggacgatttcttcatggtcaatgtggtcgctgtcaatctgaaacagtttcttccactgcatgggatcaaaacttcccgtgtcaatgcccagggaacggcctccgataaagccgaatatcctgccctgcagctttctcacagcggcagcggcccgtatgtaaggcatcatcttggtgtcaaacagattcgggtgctcatccgtaaaatcctgctgtatccgaagatgtttgtagcctatctggtttaacgctcctcctgagcccaggaatcctacggttccatgggttccgggatcgtcattggagagcagtatggtgggaaggcccatattcagcactccccggaccactccgttgggccaggtccagcaggggatattggcaataaatacttccacccccttcttcttaagctcatctgtctgacggtcaatatcctggggagaacgtgccacggtgtcaaaggtatgcagctccatctcatagtcagcaaagtattcaacggtccgttttatcctggctgctgtcttttcctcgtaaagcaccttgtactcatgttctcttgcatcgctaaaggtaatcatgccgactttcggcaaccccattttcttcaccttttattcctcctctacttttgctccagctccataagcttctcatactgttcatccgtaaccgtcttgtaacccggtaccgggaatgcctggaagcttctgccgccgtcaatgtatatggactgtccgtacacgaaattggaatcatcgcaggccaggaacacggccagccttccgcattcattaggagttccgatcctgcctatgggcgtcctggaaatcaccgtgttaaacagctgttcatccgatccaacacgcctcataagctcactctcaatgggacccggacagatggcatttaccttgatgtcatagggagtgagagccacagcctgtaccttggtcagctggctgactccgcccttgctggtggtataacacatctggctgtccaaggccaggtaagcgttcacagaagaaatattgacaatggctccgccctgcccctgctttaccatctgccttgccgccagctggcctccaaagaacagtcccttcaggttgacgcccagaatcctgtcatactgttcttccgtgatgtgcagatagtgggtcttgtcaggatcattgattcccgcgttggccacaaaaatatccagccttccgtacttctttactgtctcgtccaccagcatctggttatcctcgatagatgaaacatcggcctgcaggtacagcacctctcccagctttcccagctcttttgccgccttcacgccctcttgggcgtttctggaacaaatggtgatttttgcgccttccttcagatactcttccgcgattccatatccgattccctttgtaccgccggtgataatggcaactttattttccagtttcatattgtatcctctccttatattatgtgttcagataaatcactcttggattatggtcagcggagcctggatgtcatattccttcttaagctctgccagttcctcgtaggtggtcaccggaataggaagaccgttctgacgtctctcctgttccttacggtactcaatctcgcccggcagaagcatctgagccccttcctgccacatgggcgttgccttcagctggtccttaaactgcgccatgcgctccttcatctgttcctttgatataatcttggagatatccatggcgataaagaaatggccggtcaggcttgggtccttgggattggcgtacatgctcttcatatccttcgagaaaacgcctcctgttatcaggccggataatatgtccaccacataggataagcccaatcccttgtgtccgcccatgggcagcagatatccgtcaaaggctgcctggggatcatcggtgggacggccgttcttatcagttgcccagtccataggaatcttttccttcttctttattgccagggtaagcttgccgccggccaccacggaaagggacatatccagcacaaatgggaattcgccgtatgtagggatgccgaaggcaatgggattgtttcctgtcaccggaacactggctcccggagccacaatcagaggttttacattggtcatggcaattccaatcatgccccgctcagccgccatgcgggcatagagggcgcctgctccaaagtggttgctgttgatgacgccgcaagccgctatgccacttacagcagcgtggtccatggcgcgctccatacctgccctgccgccgatgaatccggctgccgcgtccacgtccaggacctcaaggcatccctcgccccgcaccaccttgatctgagggttggtgttaatggccccatttaacattctcttaaaataagccggaacccgaatcacgccatgggaatcaattccccaataattggtatttacaagacattctgcatgatacttcgcatctggttcgctcattccggccttctggaataattcctgcgtaaacgcagtcacggtttcaccgcgcatcaatactgtattgcccactgtttttcctcctgattacttgtttttatctgtattttccaattatgtatacctattcattttatttttttatttaagctgtatcttccgtttttttaacttaaagtattaaaactgttgtttttcgaaatatacaactttgttttttgctgtttttgaatacgtatacatttgtttgtaaactcattatattcccaatgccgcctgttcgtcaatgtattttttaactttttaagtattttagttattttactcaaactatcattacatttattgtacacttctaacaatttctatttggtattttttaaattacaacgcagctgctgcattataaatcgtattcacccatattttccctttgttaccttgcaaataaccataatttatggtactgttaactatattcagtgcggttaccgcacatattcagcacaccaaggaggatttttcttatgaaaagctctgattctggcgacagcatccagaataccggcaagcgcgcaaatgggcgcggccacaatacctccatcgacgtggcaaagctggccggcgtatcccaggccaccgtatcaagggccttcaatcccgcctcgaagatgaatccatctacgcgccagcgggttctggacgctgccagcgccttaaaatacgcccctgacgcgattgccaggagtcttatatccaacagcaccaacattgtggccgtcattatgcagaacaccaccaatccattctacgcaacggtcttaagcaagctttctatccggctgcgctccatgggcaagcagatcctgtttttttatctggacgatgaaggccatatgaaggacctaatccatcaaatcctgcagtacagggtggacggcatcctgatcacatccgtgaccctgacatccgatctggccgatacctgcgtggacttcggggttcctgtggttctgtttaaccgctatatgaatacccctggaatccaggctgtctgctgcgacaacgtacaggcagggcgcgactgcgcggattactttttcatgaagggctaccgcagctttgcctttataggaggccacgacgaggcttccaccagccacgaccgccgcagaggctttgtgtcccgtctggaggagcggggaattcatgactgctctgtcatcaacaccccgtttacctacgaagggggcagggatggtttcagaaggcttctggagcaggaaggaacatgccccaaagccctgttctgtgtcagcgacctggtctgcgccggagtcctggactgcgcccggtttgaatacaatctgaaggtgccggaggacgtggcagtcataggcttcgacgatatagagctggcttcctacaactcctacagcatcacttcctttgtccagcccatggacagcatgattgacagagtattggatttgctgctgtcagagaagcagccctcggaatccaccaatctgacgcttttcccctgcaccttaaagaccaggggcaccgcatgagacgccgctgtttaagcagcgttccgcctcactgctccgtgtcggatagcctgcatgaatctgcataagatatggccttattctgttaaatgaatgagcgcggattaaaacaacgcaaaaacggcggctttgatttgtcaaagccgctgtttcatatccggttctgttgctgtcaaatcactcccatcgcctcaggcagcgccatggatatctgtggtatgtatgtaaccagcatcagaagcgccaccatgaccacgatccacggccatatcttccgcgccagcttatcaaaggatatctcccccacctgacaggccatgaacagattggctcccaaaggcggagtgataaagccgatggacaggttcattaccacgatgattccgaaatggatgggattcactcccagcctggtcacaatcggaagcaggatgggcgtcaggataatgatggccgcattggtctccatgaaggttcccacaatcaagagcagtacattgatgagaagcagcaccagtatcttgctgctggtcagtcccagaatggcatccgcaatcatgaccggcacctgggtaatggtcaggatgcgtccgaagccggtggatatgcctatgatgagcagtaccggcgcgcacatcagcacggaacggtacataatataaatcaggtccgacggtttgatctccctgtatataaagagtcccacaatcacaccgtacacgcctgctatggccgctgcctcggtgggtgtgaatacgccgccgtagataccgcccaggataataacaggaatcatcagaccaggaatggccttcagtataatctgccatatctctcccggagtataccgcttatcttcccctttatacccatgccttcttgaatagaatactgagtacagaatcaggccagccccaataagaagccccggcatgattccggccatgaacaggccgctgatggaggcgcctgccgctacggcatagaccaccatacagacgcttggcggaatgattacgcccacggttcctgcggttgccaccaatgcactggaataccccttgtcatagccattcttcaccatggccggaatcatgataagtccgatggctgccacggccgcagagcctgtgcccgcgatagcggcgaagaacagggatgtgacaatagtcacaatgcccaatccgcctgtaaaccggccagtgaataccctcgccaggtctataaggcgcctggaaataccgcccttccccataacctccccggcaaatgtaaacaagggaaccgccatcagaggaaaggaattcagtccctgtatcatggattgtacaaaggtggtcatgctgatacagtccatggtccggatggtggtcagggaggccagccccaggctgacgccaatcgggatggaaagcagcagaaacagaatcaacgatacgaacaataagattgcaaccataagcctttattcccccttctccaacagttccgccgcctctttttccgccagttccaggacatcctttaccttgggttcaaagcagatccggttgttctcataataatcgccgtcgtagttcacaaaccgttccagatcatccccccagtgccggaatttccacaccaggatctggatgttgcgcaccaccatcataaagaagcccagcattccggccagataaagggcgttgtagttccacggaacagctgtcagcatatcctgaaaacgccatgcgtcagaacaaagctgcaccattgccctcagcccgcctgcggaaaatacgagaaagaggacatcgcataaaatcagaatggctttctgggtccggaccgggaacagctccctgaaaaagcccacccgcacatggcggcttcccctggtcagatagccaaagctggaaaaggacatccatacaaacagcagcctggccacttcctcgccccaggaaaatcctgttttaaagataaaccgcagcaccacctgcacagtaaccagcaatatcatcagggagaaaaagagtaccatgaggattgcctcaaaattcacatccagccatctcaatgtttttttcattttactcctccccctgctcccgccgctcagccgccacggcagccatcagcatgttatatgtatcctctccgcagttggctataatatcgcccttaatggacgcgttgattttctcgcccagctgtctcctgacagagatatccacgtcgttgacaggaaaacctgcgtcctcaagctgcttaagtatctcctcctcgctctggtccgccagttcccaattataatcaatggcctcctgagcgctctccatgataaatgcgcggtcggaatccgacagggagttcatgaaatcctcattggcataccacaggaaattcgtgaacacatgcctggtcaaggaccagtacttttgtgcctcgtaaaatttctcagtatagaagctggtggtggcgcattcctgaccgtcaatcagtctctgctggagggacgtaaacagttcgttccagctgacgctggtggtgttgactcccaccgactcccacgccttaatctgcagcggattatagccgcggattttcaggccctttaagtcctcatcagtctgtatgggacgcttgctgttggagaaattgcggaagcccagctccatataaccgattcccgtaaggttcatccgttttaagggctccatcattttctttccggcctcgctctcaaacacccgctttgcgtgggccgtgtcgtcaaacatgtaaaagctctcccatgcggcgaattccggcatggcccttgtaaagttgctggtggtggagccgctcatttcgatatccccgcgcctgcactgttcaaatgtatcctggacactgcccatctgtccacccgggaatataaccacctccatacgcccctcagaccctgtctccaccagatccttgaacttcaaaaatgccttgtgcagcggtgtgtttacattattgtcatgggcaatcctgattgtgatcacatctgatttctccgtctgggcgcatccggtgagcgcaaacgcgctcaccgtcagaatacagacaagacccatggctgcttttatgcgccatctatccataagatacctcctcccatcttcgtcccctctgctgcttatgcttccagtacctctaaatcacattcctttgcaaatgcctttacctcctccacgtaatccccatatacgagagcgaagtgatgtcccacgaacttctggcactcatggaaccgttttgcgtccttcaccgtgtagcgcaccgcgtgcttgcattcaggtgtaagatagtcgtcgcatccattgatggtgccttttgcaaccataattttcttcatatccggactcatgttaatcatggtcagcgtttccccgttatccttggagaaatcataacgcatggtggtcccccatgaatccattgtaaaggaaacgaattccgtaggcagggcaggctcgtcgtaacccttcatctgggcgcaggccacatcgtgaagagtcctgcactggtttgtattcttatccaacaccatggtatttcccatgtaaggagcctttctggcaatgttcataaggatggtgatggtcagcacagaccccacgtcgccggcgcaggcagaggcgattccctcatccttaaacagggaatgggccaggcagaaggtcagcctcctgcggttcagctccctggtggcgcagacctcgaagcaggggatggtaaatgcattgcagtcgtaatgagccatcattttcttaatagtctcataaaactccgtatcattgagtatgtattcagccggcatatgtacgccctgggattccttttccagcttatcggccagcgcttttgcctctgccttctcctcatccgtcagtgcgtccagccactgaaacacctcatccgagttcacatgggaaaaccgcaccttgaacttcctggtgatatcctccaggttcaggtaagaactctgacatccaaaggtgagcatagcgctctttaaggggaagaatatctttgtgcaggccagagccttctttactctcagggctgcaaatgtgcggttcatctcctcgaaatccaggaatgcatagccgggttttccctcggcaaacaggtgggcagtcatatccacatggtcgcatttggatatggcggatttattaggagtatggccgataggtttatctgtccgcttagacagttcaaccgcgaagtaggaagaaattctcaggccgcggatcaaatagaaatcagtctttgcatcgtcttccagggccttctgaatctgttcctccttaagcgcgaaatcctcattccagaaaataaccaccggctccaggaattccacattgcgcaggtccgcttcttcctccatctccttcttgaaaatatcgaattccttctgagttacttccatgtcggattccgttgtcagggcatatccctcaccgtaacggcacggtcccatatacgcatgtatatgatacatggtaaataaaatcggtttaactgtcaactttacatttaatgtactcttttcattaatcttgctcataatcatttccctctctttattaattcatttaatgtttctactaatacagttacttcttccctggtattcttttttcccaggccgatccgcacaacactgtccgccctggggccttctatgcccatggcccggatcacatggctcctggcccccttttcgcaggccgagctgcccgacagatatatacccctcatacgcatctcatgaagcagctcctccgtggcaaagggaagtaccgatatattcagcacataaggaaccgcccccgaaggggaattgattaccacatcctccatctgccgcagacagtccgtcaggtacaggttcagttcctttacatgctcccagttctcccgtatatcccggagggcttttaaagaagcatggccgaaggctgcgattcccggtacattctcggttcccggccgcaccttactctcctgggagcctccaaagcacaggggacgtacgtttacgccttcccgcacatagatggccccgcttccctttggcccatgaatcttatgggagctcatggtaaccatgtcagcctttatccggtttaagctgaacagaatctttccgaatccctgcacgcagtcgcaatgcaccaggacatccggatttttccgtttcacacccccggcaatttcttccacaggaaggcgctctcctgtctcgttatttacggccatgaccgacaccagcagagtatcctgattcactgcatgaatcacatcatccgcctgtatcctcccgtccctgggccggataaataccacttcgtatccatcctcttccagcgacctgcaggattccaggacagaagaatgttcgatggcagtggtaattatcctgcccttgtttctcccctctccccgggcagccaggacgcttcccctgatggccaggttattggcctcagtacctcctgatgtaaagaagatctgcctggtaggggcgcctatgacctgggctacctgctgcctggctgctgtcagccgccccagcgcatcccttccaagcagatacggggatgatgggtttccgtaaacctcagtcatcacttcacaggcagtcatggccacatccttgtcaacctgtgtggtggcgctgttgtccagatatatcatatctttcttcacctctttccactttatatggtttgtatatatcctccctccgcacaccgcattattttctgctgcttattatgtatgattgttttctaaatacgtatacattttattggtaaaaattaggcattatcgcaattaaaccccagtacatctatatgctttttattgcttttgccttttgttttcatctattttattaatacgtattcactttctatgcactcattataaaagctctcaaactgtttgtcaattttttttattaaattatcttt

SEQ ID NO: 3329 - DNA, 1080 bp, Unknown
  gut microbiota DNA sequence
gaattaattatcgccctgtatgttcacgatcgcattatcagaccttatataggggatatgctggtggtggtgctggtgtactgctttgtcagggtgttcgtaccaaggggcttgaagcggctgccgttatatgtgtttctttttgcggtatgtgtagaggtgctgcagtatttccgtctggcagagctgctggggctgcaggggaacactgcggccaggattatcctgggttctgtttttgactggaaggatattgcctgttacggcacgggatgcctgcttatacaaatatttgaaattcgaaggagggccttatgaaaggttatcagttgaaaattaccataaaaggcagtaaaccgcctatatggagacgcgtggtggtgccggagcagtttacgttttgccagctccatcaggtgattcaggaggcctttggctggtatgattaccatttgcacgagtttgagtttaagaaactggggctgcttataagggatccgggagaggaagacgatctgatggagtcttgcagctgcgatgtgctggaggaaggaacacagattggaacgctcataacggagaacccccgttttatatatacctacgacttcggggatgcatgggaacaccagattctcatggaaaaggaagtggagtatgaatacagctatccccaggtgttaaagtataagggagacaatattccggaggactgcggcggcataggtggttactatgacctgttggaccagctggctgaccctgaagctgaggagcatgacttgatggaggaatgggccagccggcagggaatggaagagtatgatttggataaagtaaatgccaatttaaaggcacatccggcattcggacaaggcggagcgggagacgggcaggagaatgcagctcaggaacgtgggggacaggaggatgcggtacaggaggacgcggctcaggaacatggggctcaggaacatgtggtacaggcacatgcatcccgggaacatgcagcccacaagcaggtaaccggcctccgggatactgaaaagccggaaacacagaggccggccccaagggtaa

SEQ ID NO: 3330 - DNA, 1448 bp, Unknown
  gut microbiota DNA sequence
tacaggaggatgcggtacagggggacgcggctcaggaacatgtggtacaggcacatgcatcccgggaacatacagcccacaagcaggtaaccggcctccgggatactgaaaagccggaaacacagaggccggccccaagggtaatccacaggctggaggacctgttttccaggtttgaaaagaccgagcttctgcgcattgccaaggttcaccatattgggggatgcgatgagctgggaaagaataagctggccccggctctggctgcagccctgctggattcccggcgcatgggtcagtttttcggcaccataagcgatgaaaccgcggcagagtttgagaaggccgcagcagccggaggaatggaataccagggggacctggaagcgctccgttttctgcactacggcggttactgcgggtttaccagtatgggcacagcagttgttccttcggatgtggcagaggcatatgatgaactgaatacggagaaattccggtctgagcgtcattaccgcagccgggtatgggcctgctgtaaggcggcagtatacctttacggcgccgctgacgcgggtcaggtggagacaatctgcaaggcagttggctgtgaggcagatgcaggggaaatcacccgcctttgccgtgagatgaaaggggtctggactgattttgcttattgggacggccggttgattgactgggatctggttcaggcagatgcctataaagatgtcttgaattatcagaagggcaaggagttttatataccttctgccgcccaggtaaaggagattgccagaaccggagcagtggagattaagaggcatatccgtccgctgaaggcatttttcctggccatggttggctgcgatgaggagactgctcaggaggcagcgtcctccatccatcaccacataaggctggggacaacgccaaaagcagtggaagacatcatggagcatttcggactgaacctggattcccaggaaaagatgaatggattcgatgaaatcatggaacaggtatggaaggaaaccaggacggttggaagctgtggttataaccgggtggagctggacgccaagacagcccgtattgacccggatgcgccctgtccctgcggcagcggtaagcgttaccgccagtgctgcggccgtaaataggaagcggaggtggaatacagccatgtttgagcgtgtggattacagagtggaacggattgatggggattacgcttatctgaaacgcacggatgttttggatgacgatgagaaatgcgtggccagggcccttctgcctggtgatattaatgagggcagcaggctggcgtatgagatgctggagtatacgcttttgtgacatgccaaagaggcccaggcgatatgaataagaggcagtatggataagaaaacagagcgtctggtcaatgtggccagaatgtatta

SEQ ID NO: 3331 - DNA, 10091 bp, Unknown
  gut microbiota DNA sequence
gcgcacggatgttttggatgacgatgagaaatgcgtggccagggcccttctgcctggtgatatcaatgagggcagcaggctggcgtatgagatgctggagtatacgcttttgtgacatgccaaagaggtccaggcgatatgaataagaggcagtatggataagaaaacagagcgtctggtcaatgtggccagaatgtattatgagcaggacaggacccagagtgagattgcggacagatacggtatatcccgtcccatggtcagcaagcttttgaaggaagcgcgggaccggggcattgtcaccatccggataaatgcacccaagggggaatccggcggcgcgccgtcactgatggaactggtgggacgctgctttgggatttatgacggtgtggctgtacccggagggccaaatgaccagactaccaatgaggctgtggcagaggcggccatctcttatctgtcagagctgggaggcgccagcctgggcattggatggggccatatcataggggatgttgtaaagcatatggagcagaaggcgaagctggtgcccataggaacatttgtctgcccgctcataggaaacggcggcgtggggcttaagaattaccactccaatgaactggtgcgttccattgcggagcacagcggggcccagcccagatttatctattcaccggcctgcgtgctttctgagcaggagctgaaactgaccagagagctggacagctaccatgagatatatcatgtctgggaaaaactggatgtggcgctggtcaatatcgggaattttccttcggtaccggattttgcttcggaggccagatatggagacctgctcataaggcagaaggcagtggggcggatcctgaattattttatggacagccagggacatatcatccggtcagatacggattatgccattcagattccactggagcttctgaccaggacaaggcatgtggtgggtatctgttctgccaataccagcccaaaggcattcagggcagccttaaaaaccggttacctgaaacattttattgcaccggagcatgtggtcagggaagcgttagaataatattgggttacatacgtaaccataaatgcgcagtttgctaaagggactgcgcattttttgtgcattagggcaaaaaacaaagatgggagcgatgaataattgacaaaggaactaacaaatgttaatctaaaatcatgaataatttggggaaaatgcatgagaggaggttacatatgttactttcaaagccggaaattacaaaaatgttcagaaaagccgcccaggtctggaatgagaacaaggattatctcagcgaaattgattccagattcggcgacggggaccacggcgttaccattggaaagattgccggtctgatcgagaagagcctggatggctgggatgacgatgacgtggagacatttctggaggacctgggagacaataccatggagatcggaggaggaagcgcaggtccattatacggaaccatgataggaggactgtcaggtcccctggaagggaataaacccattgatgcaggtactctgaaggaaatgtttacggaatgcctgtcggccatggaagacatcactaacgcaggcgtgggggacaagaccatgatggatgccctgattcctgctgtggaagcagcccagaacgcaaaggacgatgtgatggctgtgctggaggcggccaagggggcagcggccaggggcgcaaaggagagcgaacagtatgtgtccaagtatggcagggcgagaagctataaggagaagaccatcggcactccggacgcgggtgcggtgagcacatccctgttttttgcaggactttgtgacggactgaagtagacggttacagaagtggacggtaacggaagtagaaggtaacggaagtggacggtaacggaaatagaaggtaacggaaatagaaggtaacggaagtggacggcatacggaagtgaatggcttacggatgcggtcaataaaataaaattgggagaggtaaaaattatgaagatgaagaaatttataaacaatcctgagaatctgacgccggagctgttagaaggctttgccgaggcacacaaggagctggtgaccctgggtgaaaaccgcatgatcattaacaataagctggctgaagccgacagggttactattgtgactcagggcggatccggccatgagccggctatcagcggatttgtgggagaaggaatggtggatatctccgtggtgggagatgttttcgcggctcccggacctcaggcctgcctggatgccataaagctggcagacaagggcaagggcgttctctacatagtcttaaaccatgcaggcgacatgcttaccggcaacctgaccatgaagaaatgcgcaaaggaaggattaaatgtggtcaaggtagtgacacaggaggatattgccaatgcgccccgctccaacgccgatgacaggagaggcctggtgggatgtatccccacctataagatagcaggagcagcggctgccgagggaaagagcctggaggaagtggctgccattgcgcagcggtttgcagataacatggctaccctggccgtagctgtatcaggagcgacccatccggcaacaggaagcctgctcgcggatctgggcgaggatgaaatggaaatcggcatgggacagcacggagagggcggcggcggacgccagaccatgaagtcagccgatgaaacagccaagatcatgctggacggccttctggctgacctggatatcagggaaggcgagaaaatcatgctgattctcaacggaaccggcgccaccacactgatggagctgtttatcatttaccgcaggtgcgtatcctacctgaaggagaagaacattgagattgtggccaattatgtgggcgagcttctcaccgtacaggagcaggccggcttccagatgttcatggcaagaatggacgatgagcttctgcactactggaatgcaccgtgcaatacgccgtatatgaagaaataagagggggtttaagaacgtactggcggcacaaggaaaaatcagtttaagagaaagatgaggaggatatgggtcatggcggcagaatatatgcatataggaatcccggtcctaaataaaaaagagggaatgacatataacgaggacatgaagttctgggtaagcaatgtggacgactatgattttaagatagagtacctgaaattcgaggagggaacacccttcccggagattctttccaagcagccccatgtggcttacagggtggacgatttggaccactatgcctcccaggctcagaggatcatattcgggccggctgactgcggccctggcgtgcgcctggcatttgtaatctgggatgatgccatcgttgaactctatgaggaaaagtaaggagaatgccggatgttagtaaatatgaaccatgttctgcggtatgcggaagaaaagcaatgctgtataggtgcctttgacacgccgaatctggaaattcttatggcggttatacgggcggcagagaaacgtgaagaaccagttattatccagcacgcgcagcttcatgagtgcgagatgcccattcatatcatcggccccatcatggtgcgtatggcgaaggaggccagggttcctgtctgcgttatgctggaccatggcgaggacctggactatgtgagaaaagccctggatttaggtttttccgctgtcatgtacgacggctcctcccttgcttatgaggaaaacgtggcaatgaccagggaagtagtggccatggcaaaagcctgcaacgcggatgtggaggctgagataggcattgtcacgggacatgagggaaaaacctttgccatcaatgatgtaagcgacgcgtatacagaccctgagctggcagccaggtatgtaaaagatacgggcatagatgccctggcagcatcggtgggaaccgtccacggattctatgcaaccaagccaaagctggattttgaccggattgtgaaaatcaaggaattgacagggcttccgctggttatgcacgggggatccggcatcagcgtagcggatacccagagggcgatccgctgcggtatccgtaaaatcaactatttctcctatatgtccaacgcgggcgtgaaggcagtgaagaaactgctggaggagaaggaagtcaaatacttccatgatttggctaacgcggcagtggatgcaatggagcaggatgtgctgaatgccatgtctatgtttgcgttagagtaggtttgagataagagagctgtttttgttccggcgggtcatgtgatgacgtgtcagggctggcagctcttttttgatgtccaaatgaatgctttattatgccctgttgaaatgattttttatggacaatgagcaaattcatcttgtattttacatgatgttatgatatgttatacataacaatatataacgtcaaggaggagctgttatgtttaattttgatgaggcaaaggttctgcaggagcacaaaaacggactcagcattgtgggagcaacagaaaaagcagtagatgaggtggtaaagagaggatataaaaatatcttctatatcggaatcgggggaaccgtgctctatgccaaccagatggcccacatcgtaagggaagaaggttctaccatcccgctgttcatcgaaaacgcagcggacttctgtgtggtggacaatccccacttttccaaagattccgtggtagttatcgagagtatttccggtgatacaaaggaagtggtggcagcggtggataaggcccacgaaatcggggcagcggttatagggtatgtggagaaggaaggcagtccgctctatgaaaaatcagattatcttataaccaccataggcggcggatattatttctggtacaccgtgaccctgcgtttcatgtatcatgcaggccagtttccacggtacgagaagttttttgaggaacttaagaatatgccggagaatgtggtggagatttataagaaggcggatgaaaaagcagcagaatatgcaagggcatatcaggatgagcccatccagtatctggttggttccggcaatctggaggactgggctgtctgctatggcatgtgtatcatggaagaaatgcagtggatgcgcacaaggcccatatcggcctctaatttcttccacgggacattggaggttattgacagggatacctctgtaattttaattaagggtgaggataaaacgcgtccgcttatggacagggtggaaaattttgtccacaagatcagcgccaaggtgactgtgtttgacagcaaggagtttgagcttaaggggatcagcgacgagttcaggggaatgctctgcccgattatgatgcgctctgcgttccagagggtgtccacgcatttggagtataacaggcggcatcctttggctatcagaaggtattataggaggctggattactaaaataccaggcccttcagaatgtatgctggcagttccaaaaatgcattgaaatcaaggagaaaagggatgtttgaaacggttgcacgaatactttcccaatggtatacttaagctatatatggtcatgtatcgtataataatgatacagacataatcaatggaggcggaatcatgggaaaactgaacaaggaatcaagcgtccctttgtatcagcagctgatggaggtaatccagaatcagatactcaacggagaattaaaagaaaatgacaggatacctactgagatagagttgagcagggagtatgacgtcagcaggataacagtacgtaaagccgtggaattattggtggaggaggagatattggtaaagcgccagggcataggaacttttgtgtcgcagaaaaagctttgccgtaatatcaatggtttcatgggatttactcagagctgtctggcagagggaaacacggccggggcacagttggtgtctgcggaactggcagaggccaccatggtggacgcagaggaactgaagattcaggaacatgagaaaattattaggattgtgcgggtgcggacctgcgacgggattcccgttatgcttgaggaaaatcactttccggctcgtttcgcataccttttagggcatgatctcacaggctccatctatcagatattggcggagaatgggacaattatggacaatggaattaagcggattggaatatgccaggccaatgagattgagcacaagcatctgggtgtggatctcgacaagcccctgctttatgtaaaagatgtcagctatgatcgggagggaaatcctgtccacaattgtaaaagtgtgattaatccggaccgttataagatgacggtcatggttaatgcttgagaaaaggcggatagagaatgataacaatcagcaaatcccagatatcggtaatgaatattcaatatggctattatccactggagaaattcttagatgacgctgccagagccggcgtagagcatgtggagctgtggggagcagctccgcattttcatttggaagatatgacgtacacagatgtgtgccgtgtcagaaagcagattgaagaaaggggcctgtcactggtgtgctatacccccgaacaatgtatttatcctgtgaatttagcggcagactcaacggtacagaggcggcgcagtcttaagtatttcgaagataatctgcgtgcggcagcggaattaggcacggataagatgctggtgactactggatggggatatctggataatagtaatataaatgaagcctggaaatatgccagggaaggtcttatgtccctgggggatatggccagggattacggcatcaaactggcccttgaggtgctgcgccgggatgaaagcaatctggtctacaatctgcccactcttaagaggatgatggaggatttaagtcatccggcaatcggggcaatgattgatacaattcctatggcattggcaggtgagcggccggaggattacctgaaggtattcggggagcaactggtccatgtgcattttatcgacggtgctcccagaggacacctggcatggggggatggagttctggatatgaaagggtatctggaagagttttcacggtattcttataaaggttacctgtctctggagataacagacggcagatacagagtggatcccacatcctctgttttacaaagtgttgagaggttatatgacgtattgacttgaagtccatggtgagtggtaagtatactaataaagcggattccttgcgtgcagacgattggagttcgcttttttggataaatagcacaaaaatatacgtaattaatgtgctaaatatacgaaaattagaatgggaccacattttatgtttacaaaatatacataacgtcatataatgattacatgataattaaaacacatcaacaaagaggtgaggacatgttaagagtactgggattgggcgataacgtggtggataagtatatgcacatccgcaccatgtacccgggcggaaacgcattgaattttgcagtctatgcaaagatgttcggaattgaagccggttatctgggggcgttcggagatgacgaggccgccgctcatgtatatgatacgatccgtggtcttgggctggagctctcccactgccgtttttatcctggagagaacggatatgccgaggtgcgtctggacaacggggaccgggtgttcatcggctcaaacaaaggcggagtgtcaagggaacatcctctggaactgactgcaatggacagggcttatatagccggctatgacattgtacataccagtatcttcagttatatagaagatgagctgccgttgctccgccaggcatcatcctttgtatccatggatttttcggacagggcagacgaggaatatttgagacaatgtgcgccatatgttgactgtgccagcatctcctgcggcgatatgcccagaagcgagattgagaaacagatgactctgattcggaaattcggatgcagacatattgttattgctaccaggggagccaagggggcgctggtaatggtggacggacgtctctatgaacagtcaccatgtttggtagaggcggtggataccatgggagcgggagattcctttattacctgcttcctgataaattatgtggatgccatgaaggactccagggacttcccggcagcatcgggaactaaaggaacagtgacagctgcagactatcaggatttggcagtcagaaccagtctgtaccgcgcagccgtttactcggcaggcaactgccagaaggatggatccttcgggtttggaaaagtgtttcagaatgagtaaagcattatataaaaagtattatgaagaggcgaaaggagtttattatgagaaagtttgttaagaaagcggcggctgccctgttggcaggaaccatggcaatgtcacttacagcttgtgcgggatttacccccagcggcggtaatgacaagaaggacacaacggcttcttcggaggcaggagctgacactggtgttactcaggctgctcagacatcaggagcgaagaaaaccataaagtttttccacagatttcctgatgaaccgttcaatggctttattgaaagcaagattgctgaatatgaggaagcgcatcccgatattgacattgtagttgagagtgcccagaatgatccatacaaagagaaaattaaagtagtggttggcggtaatgatgctcctgatattttctttagctggtgcggcgagttttcggagcggtttttaagagaaaacctgattatggatcttactccatacctggaagcagataaggagtggaaagattccctcatggagtcccagctggtaaactatacgaaggatggtgttacatacggtattccattcagacttgactgcaagcttttcttctacaatacacaaatattcgaagagaatggcctgaaggcaccggctacatgggatgagctcattgaagtgtgtgataagctgaaagcggctggtgtcactcccatatcttatggaaatcaggaaaagtggccggcagcacactatattggcagtttgaaccagatgcttgtaagcgatgaggtgagagagaaagattttgatcctgcccagggagagttcaccgatcctggttatgaagaagcattaaaatgctatcagcagttgattccctattgcaacgatgcagtaaacggtacagcagcagacatggccagaactaattttgcaatgggcaagtccgctatgtactatgcagaactcattgagattccatatattacagacctgaacgccgatctggattacggtatgttcaaattccctgtagtggaagggccaggcaaccctgatatattaactggcgttccggaaggatttgtggtttcgtccaaaacaaagtatccggacgaatgtatcgagtttctgaaatggttcttaggaccggaagtgggcaaggagcaggcacagaccatcggctggtttaacgcatcaaaaaatgtgacagaaggagtcaatgatacgaaactgctggacggttataaagttgtaaatgaagccaaaatcatgggaccatggtttgacaacgctctttattcaacaacatgtgatgaatatctcacagcggcttccgaccttacaaatggagatattacacctgcggaggcaatggcaagagtacagaaagtcgctaaagaagcccagagtcttgtatccgggcagactaagtgagagtaatctatagggggatgtggaaacatccccctgcaacataagaaagtaggtaaaagctatgagaacgaagaaatccactccttatttgtatatgattcccggtcttattatggtacttgtatttgtatacataccggtcataacaaatatcgtatacagctttttcagcttgtcatcctactcctcttcggcaaaatttgtgggtatcagtaattacatccgtttttttactaaggatacccttcctatcatgctgaagaacaacggactgtactgtattatttccctcgttgttcaggtgggtttcggaactttgct

SEQ ID NO: 3332 - DNA, 170 bp, Unknown
  gut microbiota DNA sequence
gaagctggagcagataggcacgaccaaggaggagcagaagcagataggcacatccaaggaagaacagaagcaaataggcacatccaaggaagagcagaagcagatagccacgtccaaggaggagcagaaacagctaggcacttccaggaagaggcaggagcagatagcca

SEQ ID NO: 3333 - DNA, 3526 bp, Unknown
  gut microbiota DNA sequence
ctatctacggcattatatacagcacactatctacggcattatatacagcacactatctacggcattatatacggcacactatctacggcattatatacggcacactatctacagcattatatacagcacaccatctacagcattatatacagcacaccatctacagcattatatacgacacactatatacagcattaccactggtacaacattcattatacctttctatactgtgtatgccgcataaaaccatggaccgttactccattccgaattttttgatatacctccaaatcgtacttctgtgtattccaagaatccgggcggcttttgttttattgcctcctgcctgctccatagcctgggccaaacactcttcagttatttccctgcttatattctcctgacccggttcctcctgacttctgtttacgcggcctttagttgctttgtaattccctattccattacttcccagaaagccgctgctatttcccctctgctccatttcgcaaggcggttcatagttttgaatcacatagccagcagcttcccctgatatgacagaggaatcgcatatgatacgcaccttctccataaaatgcctcagctgacgggcgtttcccggccatccgtaagaggtaagcaccttctctgccgcaggggtaaggcagcattttcccccgctttccctgagaaacagattggccagatcaggaatatcctcaacccgttccctgagcggcggtatctttagggtcagcacattaagacggtaaaataagtcctccctgaatttgtgctcacctaccagctccatcaggtttttgttggtcgctgcaaatatcctgatattcacgggaaaaacccggtcgccgcccagacgcatgaccttacgctcctgcaaaacacgcagcagcctgctctgaagggacatgggcatttcccctatctcatccaggaaaatggtcccattgtgagccagctcaaagagccccatctttccgctgcgcctggcgccggtaaaggcaccgtcatcatatccaaaaagctcactctccagaattccctcgggaagagccgcacagtttacagcaacaaaaggaccgtttctgcggctgctggcattgtgcatgctctgggcaaacatctccttaccggaacccgtctcacccagcaaaagtacagtcaggtccgtatgggcgtacctctttgcatgctggatgcactgattcatctgctggctgcttccgcatatatccttaaatgaataggtggcctgaaatcccttgatgcctttatccctgattttatgttcccctctggtgatggttcccgcatcattgaaggtgataactgcacccaatatctctccatttttatatgttaagggaatcatatcataaagaatatcagccccattaatggaacctgtctcctgtatgatttcctctcctgttgccaatacatcatggactgcctcgaaggcgggcagcacctctgttatgggcgtatcgtaaaccagcccgcccggatttggcaggtaaggcttggcaacacggttcatccaggtaatatttccttttatgtcaactgctacatacttttcattggtggtattgagaatagtcttaagctcctctgcctttctggtggcagccttgaccgtggcaatcagcttctctgcttcctgacacgcataggacaatgacttgtccgtcagctcaatgcggactgcgggcagtcccaattctctggcataacgtgtctggataagcccgcccacaatcacgtctaccccttcatttttaagcttctggatttgatggtacgtatcatcttcatccacggcaaatatctgccgtatgcttacattcagaatgggatttaaacgctccaaaccgctgagaaggttgttatagccaatgaccccgatgttccttccatagctgctggcctcaatcagggtgtctgccatatcctcaaaggggatggggatctccaccaccggcaggtccactaccttgcgtatccgcagcgctgtggccccgcggcctaatataacgctgaccccgcgcctgagcatctccggaaccagttccggatcccataccgtgacgattacatccttatccaattttttgaatattttctgtgcctgctccacgaagtcttcgctgaaagcggcgtaccaaatctggctcatggaaagtcctccgattcttcaccacatgatcacatcaagctaaaccgtctatatccatatctctgattcgttttaccacatccaaatccgccggaagccactctacatcatcgaactgttccctgttcatccaacgggctgatttgtgctctttcagttgaattttcccctctgcaatcgagcataaatagcaatgcatcatcagatggaactggggataattacattcaactgtcatcaaaaattgttccacgatagcgtcaatacccagttcctcttttaactctcgcagcaatgccgcctggggagactccccttcttcaattttcccaccagggaattcccaaccaccttcaaactctccataacctctttgggtgcctaaaaatgttccatccttatgcagaaccgcggctgccacttcaatcttcttcatcctaatgaccccagctttgtagaattatattaatcaaatgagcctttgcttaaaatcttgttcacaccatcattatattttaatagcaaatgtgttctatgccatgtcaagaagtccctatctggctcaaactctttacgaacattaagtctcttcccttcataaggtctgaggctttcatacaatgccgcatccgttttcgcactgtcagatacgattaactttaaatcatctgtaaagctaataaaacctttatcaaatgccttatctataagcggagatagacagattccatttcttggattgagccgattatctttgtcctctgaccatggaacaatatgggatgctactaataactcctttgttttaatgccagttacagcacattgaaacccatactcaagcttaacttgatttgcaaaaactttttgtgccgctcctcttgttttagaactgccttcttgatcctctactctataatttcctccctcctgccgttgataaaacttgacttcctcatccattccactggatatttcttttggttcttggagtaccccaggtttaaaacttaatagatgaataaagtcattcttggtaattttattcataccatattgattaaaaaaatgctcccagttcttcccgcggttacgaaattcccacttaaaatcttccagttcttcctgtaacaaaggctcatcaaaaataaatgcttttgatataattcctttcaccctcttaccctctatggactggattttactaatttttccagctccaaagaaataaaattgtccctttatctcagatgccttctgctgtctgcgatagatgaataagtctccatcttttacctgattataatggtcaatgtccca

SEQ ID NO: 3334 - DNA, 614 bp, Unknown
  gut microbiota DNA sequence
cgcccggtggtgggaaggatatagccgaaggcaggggtgttcatcgtgaggtgaaatctgaaggaagccggatgtggggaacatactaacccatgggcaaatctctggtctgacggacagaaatcacatcaggccatgcgtgagggtaaggctgctgaacaagtcgaagcccaataaccacacggaatcacgtatggtaaatgtggcagatagatggagagaaggggacgtgtggtacccggggaggtctgtgcggaatgtcctgaaagggataaccattatcgaaagatagtgctgaacgtacagaagtcagccgaggccgtagtagtcgagagatgaaggaccgaatcaacaggagtctttagtacaactgggaaaggaggaaggaacattgggtacagaaaacaaagacagctgctcgcaaagagatagcgcggaacgtgaagggtatgtgagagcgcaccgttctttccgccggatatggaaggaaagggacagtgcacagccggaactcttggaggagatactggagaagggcaacctcaacagagcttttaagagagtaaaggcaaacaagggggcgccaggaatcgacgggattaccgtggaggaaa

SEQ ID NO: 3335 - DNA, 29277 bp, Unknown
  gut microbiota DNA sequence
aaatgaaagtgattactatgtcttggtggtggctggtagatatggttctatagcagaagatggagatagctatacagaaaaagagtttaattacgcagtcgagcaaggaatacccatattagcttttgtgaaaaaggatattagtaccattccactgggaaaagttgatacggatagtctaaaaaggaaaaagttagaattatttagaagcaaggtacttgacggacgtttggctaaattttggaacaatacaagtgagttaaagtatgaattacatagtagtttgtcacgagctttcaaaatgaatccaagaataggttgggtgagaggggatacgttgatgaccaatgattcctatgagaaattgcatacattggaaacataaaatataaaattgaagaaaaagatagagttattagaggcaaacacaaatggtgaggagtccttgttaataaaataagatagcaatattaaacttaaatgaaaagttaataatcaatgatacagttgaaccgcgaacaggaatgggagcagtatggatacagtaataacaaattggaaaaagaatttcttcacaatctggaccggacaggcaatatcccagttttcaagttctgttcttcaatttgcgattgtgtggtatctgacagaccataccggttctgccatggtactgacagcggctatgatgatggggtttctcccacagggggttttaggaccgtttatcggcgtctttatcgaccggtataaccgaaaaagaatcatgattatctcagaccttcttatctcggcagcaagttttgtaatggtgattgcaggctggatgggcaggttatcgacagaactgattcttgtggttttgctggcacgctcggtcggttccgcgttccacaatccctgcctgcaggcagttaccccgcagattgtcccggaaggccagttgactagatgtgcgggatattcgcaggcgttggaatcggtatcacaaatcttaagcccggttgtggcggcagtgctgtacagttcctggagcctgagcggaattatctccctggacgtcataggggcgctgattgcggtaattacgcttggaatcacgcaaatcccggaattgccgcaggagggacgtgacagaaaagtacaggttttgcgggaggcgaaggaaggctttcagattctcagggcaaagaaagggatgctggggctggtgctgattggaagtctttatactttggcgttgatgcctaccagcgcgctgtttccattgatgacaatgtcatattttaatggaaacagtacaagtgccagtattgttgaggtggtgttctctgtcgggcttttgtttggatcgttgatattgtcaaaatggggaggaacaagaaacagggtttataccattgttggttccttcctgttaatgagttttagtttatttgtatcaggtattttgccgccggatggcttttatgtctttaccttatgttcctggctcatgggagtctccggaccattttactgggggatgtatacgccgctgctgcaaagcaactttgaagcaaagtatctgggaagggttctgtcattgtccagcagtatccggctgctcagcggaccgctgggactggttgtgtccgggatatatgcggaacggtatggggttgagaaatggttcctgattgcgggagtgctggtactggttgcttctttgttatgtgtggcagtgccttcagtgcggatttgtgatgaggccaggatttggaagaagttatgagtctgccaaaattgcttcttgtaaatggttggggggtggggctttatggatatacgggttttggaatattatctgattgttgcacgggaagaaagtattacaaaggcagcggcaattctgcatgttacgcagccgacgctttcccgccagctaatgcagctggaggaagaactgcaggtgaaactgtttaaccgcacaagccacagtgttgttttgacggaggacggtctgctctttaagcgcagagcgcaggagatcgttgcgctttctgaaaaaacaaagcgcgattttatcagggggaacagggaactgtcaggagaaattgggattggctgcggagagttcagaagcatccagataattgcacagattatgaaggagttcaagaaagaacatccattcgtaacgtttcagatatacagcggaaattcgtccaatataaaagaacgtatcgaatcaggcattttggatattggtgtcattctcgactatgtggatatacgcaaatatgagtatgtccggattccgctgagtgaagagtggggtgttttggtgagagaggattcacctcttgcagccatggaatatgttacgccggaagatatccgggagctgccgcttatcatatccgagcgttccatgagggataatgagctggccgattggattggaaagaaatacgaggatttgaatattgtatctacctataacctgatgtataatgccgcgattatggttgcaaacggtatgggagtggccggctgcatcaaactcgactgcaggtatgagggaacgcgttttgttcccgctcggccatccgttaaaaataattctgttttcgcatggaagaaggcgctctcacaatctcaggcggtttcctcctttatagaattttccaggatatacataaaacgtatatcatcaaatacaacataggtatttcacatatcaataatgatgatttacaatataggtgtactgaataaacagtatatctgtatcttgcaatggagatggcagcctggcttggcgcggatttattcgagaacaggccacagcagccgtatctgctgggaaaaaatttacaggaggaacctgttatggaaaaacagacagcgggcagagacgccctgggagggtttgcccccaaatttgcggagcttaacgatgatgtactatttggccaggtgtgggcgggagaggataaactgtcctcccgtgaccgctgcattgtcactgtgtcggcactcatggcgaaagggattttggattcttcgatgatgtatcatattgccaacgccaaaaagcatggtgtaacggcggaggaaatggcggaaattttaacccatggggcattttatgcaggctggcccaatgcctgggcggcattcaaaatggcaaagggagtatatggaaaataaagggagaaaacaaaagtggagtatgcgaaactgggcaaatccgggattgaagtatccaggctgtgcgttggctgtatgagttttggcaggccgtcggaggattttcatgaatggacgctgaatcccaatgagacagaggaaattgtcaaaaaagcattggacctggggatcaacttctttgatactgccaacacctattcccatggaacgagcgaggaatatttgggcagggcattgaagaaaaatattgcaagaaataaggttgtcatcggaacaaaggtatactttaacgaaggacatctttccaaagaggctgtcagacgggaaattgacggctccttaaaacgcctaggtaccgactatgtggatttatatatcattcaccgctttgattataccacaccgattgaagaaaccatggaagcgttgcacggacttgtaaaagcaggaaaggtccgcgcgctgggggcttcggctatgtacggctatcagtttatgaaaatgcagtatgccgcagaacggaacgggtggacaaaatttgtctccatgcagaaccattataatctgctttaccgggaggacgagcgggagctgattcccatttgcaatgagatggggattgccagaacaccctacagccctctggcggccggccatttgtcccggcctgtctggaattcagaaagcagacggagtgcgaccgataaaatggcggcgcagaaatacaatgcaactgaagcggtggatatgaaaatcgtggactgtgttgcggcgctggcggctgaaaagaactgtaccatgacccagattgccctcgcatggcagtttgccaagggcgtgaccgcgccgattatcggcggaacaaaggcaaagtattttgaggatgccacgggagcgtttgaggtgagattgacgaaagaagatattacccgcttagaagcgcattatattccacacaaggtggtgggcgcattataggggatagatattacattagaaaacaggaattgccatgtgattatgttcacagacaattcctgtttttatggttcaataagaaaagagaaagtcacccctaacgataaacatgtatagatttattctatcctggctattaatgtatagaaaagaaccattggtcaatggcatggcagatgattagaatggatatggtaagtatttgggaaagggggtcgaatatggaaaataaaaaatcaaaaaagatagggaaatatgttgttatatctctgattgtgttgggtatactggtatgtttttttgtaccatctgttaataccacaatgaatagcattctaaagatgtttgccaacggggattttaccgtggtacggcagtttgtcgaatcgtatggtgcttacgcagcgctggtgtccttcctgctgatgatactgcagtctatagcagcgccgttacctgcgtttctgcttacatttgcgaatgcaaatctgtttggatggtggaaaggagccattttatcatggtccagtgccatggcaggggcggcagtatgcttctatatcgcaaggctgttggggcgtgatgcagtagagaaacttacaagcagaaccggtttgaagcagattgatgagttttttgaaaaacatggacgtctcagcatactcattgcaagactgctgccgtttatttcctttgatatcgtaagctatgcggctggcctgacatccatgtcatttggcagctttttcattgccactggtattggacagcttccagccactataatttattcatatgttggcgggatgctgactggtggcgctaagatgtttgtcactgcgcttcttctgctgtttgcgctgtcagcgctcattgttttgttcaggcagttatatgtggaaaagcaaaagaaaaagaattcgaattaatatgcggatattgcagacaatatctaatcgaccatggaggtttcgtgatgaaattgaagaaattagcagcaatgatggcagcggcagcaatggtattttcgcttgcagcctgcggaggaaaaagcaatactgtggaaagtaagtctgtggagaatgcagcagaggaaaccatgacagttgataaagataagaaagaaatcctcatgctctgtgaagtaaatggtacatattttacagaaccgaccagacatggtattgtatataagggtggttctaacggagaaaaggcggttttgcggggcctggctgacgagaaggagttttatcaggcattgcttgacatcggagccaaagccggtgataatttaaccgcagcagacatgaaagcaggaccggataatgggaaatctgtggatggggataagctcgatgtcttcgtaaaatgggatggacaggatgaaattccattccgggatatcattcaatgcacagaagactataccatggatctgcggtttggaggaaatattgagagcgccaaagaaaataatacaggctgtgtgctttgtctggacagttgtgcaactggtattgtgagcgatgcagcctggcctacgggaactacccagaatgatattgccaagttctacggggataaggatgtgctgccggaggatggtacccgggtaaccgttattttccgtctggcaaagtaaccgattgatatgatgaagctatttaaaattgtttataatagttttttatgggctatgaccatggctattctgtgttttaagaatgaatggctgcagatgcgggtgaatacaggttatatttttgggggattgttaattctttcaaccgtggcggtgtggtttgttttcaggaaaagggaaaacgtgtttaatagcctcttcacagccggtaatttggttgtttgttcagcgatagggcttgtcttgtatgggagtgaacggatgaaggtggtaccggccgcattggtgcgggagggaatccatcagacaaggataccgttctccaaaatcaatctgatattatgtatcattacggtagcaggcatgttcattattggcctgaatgatatcttaaagttaaaacaggcggacagataataggaaaacagtaagcgttgtgctttgaaaaagttcaacgcttatttgtgtcaatgggggatggagatgaagacagtatttcatacatataaaaaactaattctattcattggaatgatagcagccgttttagcctgcaaccatatatttggctggtcggccgtgttgagtggagcaggaagtttgaatcttctcaggcagatggcagaagaaaacctgatgaatgcaattttcctgtacatcgtgattacagttgtgggatgtgtggcgttaactctgccaggggtcacctttgccgttctggcaggactgcttttcgggccggtattgggaacaatctgttgttctattgctactatgataggtgcgatggcggcgtttctggcaggccgctttttcctgaaggatagtattaaaccggtcgttatgaaaaacagataccttaaaaagtggcttttcgatgaagcaggtaagaatgaactgtttgtgctgatgattaccaggctggtacctctgttcccctataatcttcagaattttgcatatggcgttacggatattccgttcaccacctactcggtattctcattgatttttatgctgccgggtacagccatgtataccataggaacatcaggcttagcggataaggaaaacagggtgctttatatcagtattgcggttatactggcagtaatcgtcatgggcatgggagtgtacttcaagagaaagtacgtcgttcagccggagcgggcggaggaggccaatggacaggaaagttaggataaaggatggagacaaatgcatacactgccatctctgtcagaaacgctgttcttttctgacaaagtacaaggcggatattggtgatacgattaaactgagggagcttgcgtatcactgtttcttatgcggaatatgttcgcaggtatgtcccatagggattgatggccgcggtattatattggacatgcggcggactgaggtagaagagaacaacgggaagtgccgggaaaaaggatatgcaatgctgttggcggaaaagaaaaattatatctttcggaatgagcggcatatgtcaggcagaagtgtactgtttccaggatgcaatttcccgtccttttatccgaagactaccaggaaattaatcaaaatactgaaggatgaggcagacatgggggtgctgtttgactgttgcggcaaaccggtgtcggaacttggactggaagaacaggaagggaagataatcaggcggctcaatgagagacttcgtgctgcagatatacaggaaatcgttatgctctgtcccaattgttattatttcctgaaggataagctggaaatacaggtccttagtatttatgaaaaattatcacaacttggaatagggcagaaggtagaggggaagggaggtctgttcctgccgtgtccggacaggaaagaacagcagtgggtatcatggctggcaccattccttctggagaacccccaaattatagaggggacccagtgctgtggattgggaggctgtgcaggaggaaaggaaccggatctggccagaggtatggcatgcaatgtggcagaggaaggatatgagcatgtctatacgtattgtgcatcctgtgctgggaacctgacgcgtaatggcggtcagggtgtctcgcaccttctgacagaaatcctggattgccatgaacagccggatgtggcaaagtcaatgataaacaggatgatgactagattctggtaagggtcttgggagagggaaggatagatgacaaaagaggaaatcaaaaaacttataggtgctgcggacagatgaacccttttcggatggagctgtatcagaggtatttcctatgaagcaattttatgctttgattggcggaccatcttataatcctatgacaatggacgggacattgtcaaggaactgtataaagctctccctttgttgctatttatattcttatttgatatacttaagtgaattactatgtatgtgaacaaagtaaaataagctaatgaggaacattggggtaaacatgagaaaaataagagcgagtgaacccagagtgtggaaaataagcaggaatatattgggcgtggtccttgcgatgatggttgcaggactgctctttctctatgcaaggatggcgcagcagaccatgtatgcggaaagttctcagtatttgaatgaggtatctctgcagatggcggcggcgattgagaagcactgcagcagccagtggacgatgttagatatgttttatcggtatttgatggatatgtcgggaggagatcttgaaaagttccaggattatgctgtgcgggaacagcctgattggggatttgagaccctctgtctgattgatgaaaattcccagtactatgacaggacacacacatattcacttttaacttataaagacgtgacgggccgtcttctgacagaacacaacaaagcgattgttgataatgtgatttatgaagatgaaaaccggttgattttttttatgccaatcgaggagcttaaaatcaatggcaaggagatgaaagcgatcggtgtaagctatgacacagataagctgttccgtgtcctgcagattgaggcatttcaggggcagagtaatctgtatgtgatacacgaagatgggacggaggtgttttctgctgtcaatagtgaaggggtaaagggatataatctgctgaacagcctggaaaaactgacctttaaaaacggttccccagaggaattccgcaggggacttgagaccggcagcagagaggataatctgatgaccgtggagtttgaggggaaggattattatatcaatcatactccgattacaggtgaaaactggattcttgtgagtatgattcctgttgaagcggtgagcggaaagatggaacagtactcttatcatgcattctttttgatggctggtgtatgcgccctgattattataggatttgttatcttctattctgatgcggcgaagcagatacttcgggcggaggagaaggcgagaaaggcggctgaaagcgcaaatgaagcaaaaacaaatttctttacaagtatgtcccacgacattcgtacgccaatgaatgccatcatcggcatgacggaaatagcggtaaatcatctggatgatccgaataaaaccatgaactgtctgggtcagatccgcagatccggaaaactgctggttggacttgtcaatgacattttagacatggcaaaaatagaaagcggaaaaatggaaatccatgccgaaagaacatccttagcggagctgattgaaaatattgtcgtggtgataactccgctggtgaaagagaaaaaccaggatttccagatttgtatccgggaagtccgccatgaacatctgatgcttgattctgtccggatgaaccaggttctgatgaatctgatttccaatgcgataaaattcactcctgagggcggaagcatccgggttacggttgaggaaagcttatcaccacatcctgggcaggcgcattttacctttaccgtatcggacaccggcatggggatgagtcgggaattccagaacaatatttttacagcgtttgtacgtgagcgtgattcacgggtggatcatattgaggggagcggcctggggatggcgattacagggatgattgtcgctaacatgggcggaagtatccgtgtggagagcgaaccggggatgggaagtatctttactgtggagctggatttctgtcgggcggagcctgaaatggattctgaatcggaaggaatagcgatatcttcggtaaagtgccttctggtagaagcagacccggagatatgtaaatgtgtatgtgaatttatgaatgtactgggactggtacccagtacagccggcagtggtttggaagcagtagaactgatgaggacggcccgtgagaaaggggaggattaccagtttgtcattctggatagggggcttgcggtttatgatgcctgtgaggctgtgggcagactcaaagagcttgctggggaaaggcagctgactatccttctggccgcctatgactgggctgatatggaaacgaaagcctcggaagccggagtggacggttttgtgcgcaaaccaatctttaagtccacactggagcagattgtcaggcagtatgtgcttcatacggaagctgtccggagaccggagtgtgcagaaacgcccattctggcaggaaaacggattcttctggtggaagacaatctgattaatcaggagattgtaaaagaactgatggaacaaacgggggctgcggttgatgcggcgtataatggaagggaaggtgcagaccggtatgccagtatggaagatggatattatgacctgattctgatggacattcagatgccggttatgaatggatatgaagcgacacggctgattcgcggcatgaatcgccgggatgcgggaagtatcccgatttttgccatgacggcagatgcattcgcagaggacattgccatggccagacaggccggaatggacagacatctttccaagccgattgatgctgtttcgctgatgcaggagataacccgcgtcttaatataaaataaaggaagagggaccttgaagatgaagcttggaaattatctttgtatatctgcgctggttctgactgtactgacattatcatcgtgcgggaaaaagcacaatgaagaaattgacggttttgctgctccggggacagaaaatgacagagtgaccgttaccctgtacggtatccagccgctgcctcactttgaggaggcagtggagaataaatttccgaatattgacctggtgcagtatctgtatacaggagattacgctgagtgtgaattcacagccagaattaagagcggggatacctgcgatattatgatggccaaggccggacgtatcgctcttctggacaccacggagagcctgatggatttgtcgaccatgtcttttcctgctaactatacaaaaaatgcgctgccgcagaatgagaggggggagatttattttgttccggggcccctgagttttaatgcatatatttataacaaaacactgtttgaggagcatggatgggaggtgccggaaagttttgaagaatatctggcgctgtgcagacagatcgatgattccgggatccggggatgtgagttcccgttgggtcatgccaatatgcccatgtatgtgttctgtgtaagactcgcaatggactatatgactacggtggaggggcagacatggtatgaggactttctggcaggcagggcgtcttcacaggaacccctggaagacactctggatgtatacagccggatgatggatgagggaattatccgcgtggaggatttatcgctgagttctgaagaaaggcttgaactgctccggaaccggcagctggctatgacaactgctgaaatcaatacaatcaaagcattaaatgaagagggaacggatgagtttgccttttatccccagtatggggtggcggacaaccagggctggctcctgagccttggatattattttggcgctggaaaatatctggagcagcctgagaatatggctaagcgggaagcggtcatggatattctggagtttatctcgacagatgaaggacagaatttattgattgaggacaatatcggaatggtatccactgtgaaaggcgcggttatccctgccgacaaggtgtttgacggaatcaggagggcagtcatgcagggaaactatgtgatgcgccctgtcctgggcagtctgattcctgtccttcagccggagttgacctcttatatcagaggtgatatttctaagaaagaaatcatgcagcattgcagggaagctatggaaggaaaagtaaaagaggaagtttctattggaatagctgcagagaattttgacattctggaaactgcgcagctgaaggctgataccatgcgggaagtgcttggaacggatgtggctcttatgggtgtgtcggaagcaggaggctttgatccagtgcagggtgtcctgtcgaagctttatgcaggaacaattggagagcaggatgtgaagcggattgcacaaaggaatgatacggtaccggtttactgctggactgcacaggtcaaaggtgagaaactgctggaaattcttgattacggcgcttattcagaaaaagagcgtgaggcggaagagacagagcattttcatccatatgccgtggcaggcatgaaggtacgttatgagcggaatgccagaataggagcgcggattgcggaagcggccatggtggacggaagcgcgatagaaccggataaaagctattcagtggcctatctggaaggcgtgttggaaccggaacaggtatcggaaccgaaaagaacgggccggcttctgaccgaggtcctgactgaaaaaataaaggcggagggatgcgtcaaaccgggcagtgtcagcatttactacacgtttgatataaaagaataattttgtccagaagttccggggaatcactgctgattcatttggatggcaacctgcacggaaacaatggagtggggggtggctgcaactataaactataattgaagagcatgggaatatatctgatataagcattggatataaacaaagaaaagaccggctgatgcagctggtcctttttgctattcatatgatttttaataaagataaaaaagaaaccgaaatgtaacctttaagatgtataatcccagatatttcagtattgcagaaggaggatatcaccggacgtaaactctgccgtcagggaggtgtgattcaagcgggccacaccttctcttatgagtattccgggagtttacacagaagagaaaatgaattcagcgaaggagaaaccatatgaaatacaagaaaatgcccgggaatataatcaaatagggggaaagagccaataaaaaatagatagcttattatgttttgaaattactaaggataggagcataaacctgtgaatcagaaaaaagtgaagattctcccgctgagtatattaattatttctgttctctgttttctttctgtgggttattggatttatcagaaaagggtccgtaatgtcatcctgcaaaaaacagttgcttcgaccacttttttaaaggatatcatcaatgacgtcctggatatgtccaaaattgaaagcgggcaattggagcctatatgccgtaatatagatttgaacgggcttttatctgaagtcgaaacgcttctggagacccaggcacgccataagcaaattgattttaccgtgaatacacaaggaatcaaacaaaagtggattgcaggcgatccaatccgcatcaaacaaattttgatgaatattctgggaaatgcgattaagtttacaccagagggcggagggcagaacaggggggcttgttcctctggacgatatcattgatgatagaggaagtgggcctggatgaattcattccggaacaggacaccatcgcccactggtctaccgaggactttaatacggtgtttgcaggcttgaaggagtctattaccgatgagacaacctatgtttttatgatgtatgccctgaatagtcagggagacagccatattatgacactgcttcaggcgatgggcggaagcctgtatgatgaaaatgggaatttgcatgtctaacctgaccaatttgtgggattaccgcgaccgaggcatggaggtgttcccggtcaatttccccagcctggacggcagaggctatgctgttgtccgcctggacaacctgaactggcagggggtccgggatgttttctatctcaatatccaggatctgctcaaagggacaaaaagcccggaagaggttgcgaaagcaattgatgagacctgtaatgccgccctggaacaggggcgtccgaagtaaacaggaacagagaaaacgcagggtgttatatgcagcctgaaatccaaggccgggatgcagaagcgccgccccgggatatgctggtcacatgcggactcagcacacataatttccggcaaaacgaattgtcttaaaagattgatatatttgtcaatctttgttatacttgattcaattaattggcatatgaacaaagaatatacctgggtaatcggtgagaatgaaagagccacggcatggttcaggggaggatgaagtaaatgttaaagagtctggagctgtcgaaaaaattaatcctggggctgggaattatggtggccatatccgcggctatgatgattattgcaattgtaagcctgcatgacattggaggacttgttaacaggctttatcaaagcccttttactgtatccacccagagtattatgctgcagaaagaaatacaaaatatgggacgggaaatacgtggcatggtgctgtatgaggacccttcttattttgattccgtattagcctccagcggcagggccaaagcaaatcttgcccttgtggagaaacgatttcttggtgaccagcagttgattctggatatgtaccaaagcctggacgaaattgaggcggcggggaaggaaattaaccggcttgttgccggtggaaaaatagaggaagccaagaacagcgcagatattgatttcagaacggctatgaaatcaggaatagaaacttctcaggaaattgtggattttgcattagataaagctttggagtttaatgaggatgcaggaatagcgttagaaaatgccacggtgatgctgatcgttctgctggtggttatggtggtcctgtgtatgggagttaccaccgtgctgtccagagctgtcagccggccgatttcgcagctcacagatgcagcaaaaaaacttgcagcgggagctttgaatattgagattgactattattcaaaagatgaggtggggacgttggctgagatgttccgggagatgagcggcagtatgaaagcggttatcaaggatattggccaacagctgggagctatgagtaatggcgactttacggttgccccgcgggcggaatatacgggcgattatgtttctataaaaaatgcgctcataaatatcagagaaagtctgtcaaatacacttaatgaaattaacctgtctgccgatcaggtattcagcgggtctgcccaggtgtctgacagcgcccagaccttttcagagggagctgcggatcaggccggttctattgaggaacttgcggctgccataaacgagatatcattccaggtgcgagagacagctgccaatatggaagccgcgcgccgcctgactgccaaagccggggaacaggtggcggtcagtaaccggcagatggaagaaatgctcctggcaatgggggaaatcggcgccaagacggaacagatcagggccattaataatacgattgaagagattgcatttcagaccaatatactggcgctcaatgccgctgtggaagctgcgcacgccggggaatccggaaaaggctttgccgtggttgcaggtgaggtccgcaggctggccgggaaatcaacggatgcggccaaacgtacatcggatctcattgacggtacggttcaggctgtggaaaaggggagaaaaatcgctaatattacagcagaatccctgcataatgtcgtggaaagcacaaatgaagttctgaatacggtagataaaattgatgaggcggctcaacatcaggcggggtctattgtacaggtcacacaggaaatcgatcagatttcctatgtggtgcagaataactccgcgacttccgaagaatcagcagcagcaagcgaagaactcagcgggcaggcgcaaatgttgaaagaacttgtgggccggtttaagattgacggttcggaaaatgtgaatcaggaccatgcttacatctatcattaaaactgtggggccgggttaggcagggaaataagcggtgactgaaccggagaggaggataagtgtatgtctcaaaatccatttcatggaagttcatcagaactagtggaatccgtattgaacaacgctccggcatctatcatcgtttgttcggcagaaagccgtgttctgctctatgccaatgagcgtgcccgcaaactctttttgaaggaggattaccgtccgggtataacctgctatgaagcggccgggcgctgtcgtccatgccccttctgccagtatgaggaaccgaattcttcagagtttactgtgtgcaattatatggatccggttacccggaggatttaccaggtgagcagcaagatgattgactgggaggaaacacgggcccatattgagtatattgtggatgtgaccggggctcagacgaagacggagcggtaccggaaccgttcggaaggcccggaccggacactgtgcagtgttccatgtggtttgtgtatttacccaaatgactgtgtccatctggaaacagagctgaaagacaccaggatgaaaatggagcacttggttaattccattccgggcggaatagtcagctatgagattcaaggaaaaaaggcggtgccggactttgtttccgatggcctgcttgccctttccgggcataccagaagcgggtataatgagctggtaaaagggaacaccattgacataatatatgaggcagatcggggaagggtgctatcggcagcgcgcagtgcggtcgaaagcggacgggtcatggatatttcctgccggatccggcataaggacgggcatctggtgtggattcacataagcggccgcaggattggaccgaaagcagacacgatgcggttttatgctgttttcaccggaatgtctgaagacgccattctgttccgcagtattgccaatgacactgcggagcgtgtttatgtcattgacaaggaatcctatgaattgatctacaccagtgaatccgccgggtttctctgtcagggggcggattgtatagggcagaaatgctatgctgccctgtatggaaaaaatcagccatgtgaattctgcacgctgaagagtcataagccggatggtgctgcccacggcatggattaccatgaaaacggccgtttttacagtacccgtttccgggaaactctttggaatggtattccggcttatctgaaatatgtgcgggatgtcaccgaggaagtgaaagcccaaaaagagaaagaacacatagagcaatactttcagacactggtcagaaagctgccgggaggtgtggcagtagttcggattgaaaaagatgggcgtaagacgccggagtatttttcagacggttatgccatgctgagcggtatgtcaatggaccaggtgtggaaatcatacggtgaggacggcatggcagccgtacatccggacgatgtagaacagctgaatgcggaattatccgactttatggccagcggcgaggaacaacgggaatttacataccggataaaaaggggagatggggaatatatctggattaagaatatgacttccatgctccggcgcggggagggcgaggtgattctctatgccagctaccgcgacttgactgtggagtttaaggagcaggagcagattcgccgtcaatacagagaattgattctgcagcattaccggacaccaggaccaaatgccttgattgtggggcactgtaatattaccagaagccagattacggaaatcagcgattatacggactctggccttctggaatgctttggaacggagagggatgcatttttcacaggcatatctactttaattctggatgaaaaagagcggcgggattatatgaatcgttttctcaacgagcctacccgggctgcttttcaggctggcaaacgggaactggagctggactgttttatcaggctgccaaaggatgtgagaggccgttacgtgaaatttaaggtaaacctggtggaagaacctgacacgggagatatcactggaatcctgaccgtttatgatataacagagcagaccattgcggaacggaatttgaagaagctctctacttcaggatatgatttaatcgcggatgtggacctgtttcatgacttctgtacgattttgagcggaagatttacaaaagacgacctctgtgcaaaatcagggcgccactcagaacgcctggcatacatgatggaaagacagctggttcccaaggacaggccgcgaataatgaaaatgctggagccggaatatatactggagcggcttaagcaggaggatccctattctctatcctattctatattgggtgaggcgggagaaatccagacgaagaagctgactgtttccgccacggacctgcggctgggccgggtctgcctggccagagctgatattacggattctgtaagggaacagcaggggttgctgaatgtggtggcctatacatttgagatgctgggaatcattcacctgggaagccggcacattaccctgtatacgcatcaggcggtgcttcaggtcctggaacccaggcgggccagcattgacagctggcttgcggatattaagaaaaaatacgctccgaaaggaggggaagaggaggttgaacgatgctttggattacagaacatgcttgcccgcctggaggaaagaccaggaggatatgattttgtccttccctatctggaggagaatcagatccggtataagcagattaatatactctggggggacggggaccataagatgatctgtattgtgcgtcaggatgtgacagagacgatgactgcggagcgccggagcaaggaaacattggagcaggcgctggcgctggcagaggaggccaaccgggccaaaagcgacttcctctcctccatgagccatgatatcaggacgccgatgaatgcaattatgggtatgacgacactggccagggcgcatctggacgagcgggagaaggtggaaaattgccttcgcaaaatcactctctcttcccgacacctgttgagcctgatcaatgatattctggatatgagtaaaatcgagcagtccaagattacgttaaacaatgacaaggtatttctttcagacttgctggaacagctgtattctatcataggacagcaggcacaggaagcagggctgcaatttgatgtgaggacttccaatattatacatccatacttttacggggatgcccttcgtatcaaccagatattaattaacatactggggaatgcggttaaatttacgcctgatggcgggacggtaacattcctgaccgaggaactccccacgatcaagggaccgggatatgtccggtactgcttcacgattcgtgatacaggaattggtatgcccgagtcgtttttgtcccatctattcgagccctttacgcggaaccggaatacggaacatgtcgagggaagcggtcttggactcagcataacaaagggactgatagagcttatgggcggcgaacttcttgtggagagccgggaacgggcaggaactaccttcagagtggagatggagtacagaattgccccggaagacaataggggggaatctggggataaaacgggagtttcaacaccgtccggggcagacaggcttacaggccgctgcctgctggtggcagaagataatgagattaatgcggaagtccttagcgagctgttattgttacagggtgtaagaactgttgtgaaaacaaacggcgtccaggtgctgaacgaattccagagcgcggcttacggcacctatgacgctgtactgatggatattcagatgccggagatgaatggttatgaggcagcacgtgccattcgaaatctggaacaaaaaacaggccgccatatgcctatcattgcgatgacagccaatgcttttgcggaggatatacaggaggctatgaaggcaggtatggatgcgcatgtggcaaagcccattgatatgtccgctctcatgaaaactttggataagctgctggtataaggagaactggtacatgataaaacgcagttataatctcttcttttccgcactggttctctgcattgggagcttgagcggctgtcaccgtttccctggttccgggaatgaggtgaatattgtggagccgaaggcgcagagggatctgcctcagggaaagacgctgaccttttttgctcctgtggaaggaaaatccagcggagccgtatcatacagaaggttaattgacaaatacaataaaagccatgatgttcatgttgtatttgagggcatcgcgactgcggacggctataatgagtatcttgaggaacggttaagaaccggaaagggcgatgatatttttattgtcaatgaggacagtgtaaagacccttgcgcataatgggtatttccaggatttgtcttctctggaagcgtttcagaagttaaacgacagcgccagggaggaggcggtcatcggggatacggtatattgcattccaatgaatatgacggcatatgcattatttgtcaatatggatgtgttagagcggtatggactggaagcgccggacaatctggaagaatttaaagtttgctgtactgagataaaggcgcttggagggacgccgatcagccttagccgctggcatgctacggctgtacccactatcgccaacggattatataaactctatgacggcccggatatccaaaaacaccttgaattgctgaattccggggaagagcagattggggattatatggtggagggatttgaggcatttcaaacctctgtggagaacggttggtatggggatggggtggatggggatgccgcggatgcactgcgcgcgggagagaaggatatttctgatttcacttccggtatgaccgcattttattttgggcccctggaatatatccctttggtggaagaggcaaatcccccgcccgattatcatgtacagggaattcccgttccgggaggaacggcattgctgattactgtagtttcccgcctctgcgttaatccggacagtgataatctggacgaggccatggagtttgtgtcatatctgtccagcgagtattataaagagagtatggaaaatggaacgattattctgcccgtttataaaagctcggattttacgctgagcaatgagaagatgcggcctgcatatgatacatatgtatcaggaatcaggattccggcagaggatatgcacttgaagtttggcagttgggatgttgtgcgggaattatgtcttgaaatgtttaatggaaggacagctgtggaggccacagaggaatacaataaaatccagctggaacagatttccgcatatgataaacaggagaaacacccttgaaaataaaagaaggaagaaaaacgtataagtatttaatttatattagctgcctctgtctcttactggcgattggagccatgacggctgtaagcctgatgagcgtacagtctgttcgaaaactggtgcggaatacgacgaccaagagtattacggagctgaccgtcagcaaagcacagtttctggatgaaaagatacattcagagctgctgtcccttcagtcctttgccgcaaatcttggggcctttgatgatttgtttgcctacccggaattactggaagattataaagaaaagcacggggcggcccgcatgtggattattgatacgaatggaacctatcaggacacaggggggatgaataagaacttcgcggataagaaggaactattcaccgaagcgctgcaggggaacgagggaattacggatgtatttctgggagaattaggaagacgtcagataatgtttcaaataccgatttatagagacggcaaagtggtgggcggtctctatgaagcatatcctgtggaattactgcagaatgcttaccacggttctacatacaatgatgccggttacagctatgtattggatgataacggttcgattgtgctggccccggtccgtttcagctatctccagatatatagtacgattcaggatgtcttaaaggatggggaaaatgatgaggaatccatccggaaattttcagcggccctgcggtcccaggccagcggtacggcggtatttgactttgagggagagaaacagtttcttacctttatgcctcttatgcagaagcataactggtattatgtatcggttattcccctgagcatggtggaaaaagacggtacggcaattatcatgcacaccatgaaaatggcttttatcataaccgcggcaatcgtattttcagttgctgttattgctgcgttttttctgctgcgcaataaaaaaagaagggactacgaacggtacgttcaaaatatcaatgaggcgattgcgcaaaacattgataccgctatttttatagtggacgggcataccggccatgtagagtatgcatttgaaaatgcagagaagatactgggcatcaaaccgcagaatcttggagaagactgtggccggtgttccggcagcttttatgagacgctatgcagtgtcttaaaagagcggattgatgagaaaacagtaaaaacaattccggtgtataacgatctgctgtccagacaaatgtggattcaaattgctgccctgcctgtaaaactgctgggggaactaaagtacatatttgccgttacagatgtaacccacgacagacagatacgggaaaatttaaatgccgcggttgccgcagccgaacatgccaatgcatcgaaaagcgtgttcctgtccaacatgtcccatgatatacggacacctatgaatgcaatcgttggaatgacaaagctggcggagattcacattgaggaccgcgaaaaggtaaaggactgtctgtataagataggaatttcttcgaaacatttgttagagttgattaacgatgtactggatatgtcaaaaatcgaaagcggcaagctggtcctcacttcggaatcattttcccttacggagctgattcaaaggaatattgcgattgtaaacccgcagtaccaggcaaaaaaccaggtctttgtgacagaaacaaaggatatccgccatgaatatctgctgggtgattccctgaggtttaaccaggtcttgttaaacctgctttccaatgccggtaagtttacacctgaaaatggaaccattacgttaacggttaaagaactgccgcagaagcattcaggccatgccgtttaccggattgcagtagctgatacaggcataggcatcagccctgaatttctgccaaaactctttctgccctttgaaagggagagaagccggcatcaaaatcaggcggagggaaccggactgggtcttgttatctctaaaaatatcatagcggcgatggggggccagatttatgtggaaagccgtttgggggaaggttctgtatttaccgtggaggtagagcttccgctttccaaggaagcggatgacgagctttgcggccggactggcccacgggactcccgaaatattttcacaggcaggcgttttcttctggtggaagacaatgagttaaactgtgagattgcctctcagctgctggaggtatccggagcggctgtggaatgcgctcccgacggagcggagggggtaaaggcgtttgaagagaaggaccccggttattttgatgcgattctcatggatatccagatgccggtcatgaatggatatgaggctgccaggcgcatccgtaaatccacgcatccgcaggcagggagtattcggattatagcaatgtccgccaacacattttcggacgatgtgcatgcagcgctggaatccggtatgaatgcacatgtcggtaagcccattgatatggatgtgcttgcagacgtattgtctgcagttttgtaggtacagaagcatttcgttctgacgtttacatcatataccaataaccaaaagcttttttgcttcatgaattccctgtgaaatcataatttctattgtaaaatgaaactccccggccattagctcctctaatttcatggaaaaaccagcggcatctttttcggccaggaaaaggtcaaattcctcaaaacaggaaagatagtagtggattctgccctcatccgttttccatatgtctttcagggaatatccccaaaagagcagctgaagcagctctttgtagacagtacgaatagccttataaggggcaaaacatttaagaagctccagtgtagcgtagccgattaattcatactgctgactattctttaaagcagccaaacgttttctgcatgtttgcaggccgtcctctgtcaaggcctgtatggtgccttcggccacgtcccggcaggataaggtgagaaactgcaggctctgcgccatatccaggagccgtttgcggacggcagggtttttaaagtcgcagttttttacaatctcatgtgaagggaggactcttgtgccaatccgtttggcggattttgttgccccaacgccgtttagcagggaaagcgccctgcggactgtgctcactgagacctgtttctcttgggacaatttgttgagagaaggaagaagggtatcagcagggtacacgccattgttgattgaaacaagcaaatccatagccagcgaatagcagatctgggatgccttattataagaattccactgaaatgcgacttcctgttccggcggaggcatcgtgattttttcatcataaaaccggcacagtgccagagacaggctgtcctgagaagcataaaccaattcccgcaggcaatcccagtcctgttttatacagcaatcccaagaacgcgggagaaaatctttgattataaaggtacgccatggattatcccgcatattaaagaatgggttttcacagaacatgaaaatctgccagacaagccggaaaagcagattgttccctagcgcagtgtaggcccggacaacatgttcaaacgtggttgtctggggcagtgaatggctgtcttcaagctggcggagattgccgtaaatctcagcaggaatgtttttaaaaccaatccattgggcatggcccagtagcgggcgcagggatttacttaaatcaatcaggatgtttttcctctgcgcatagaacatctgaatattctgttcaatttcttcttttccgtaattcctgactaccgtagtccctatatttgtggaaatggtgaccaagccatcccgctgcagctgctgataagccgcgcgcatcgtatcaacggagacaaagaaatcagcggcggcgttttcgatggaaggcagaacatcaccaaacccatagattccaaactgaatgtgtgtttttaaaacactgtagacaacctgataccgttccatattgcctttcatgcagggcacctcatttcgcgtcaatcattatatgtaaattagtatagcatgaaaaggagtggttatctacaaatacttgttttagcgtagcagtttgggcggcggggaaaacttaataagcgcgttttattatctcttccatatgtatctgggcttccctgcgtatcttcttctcgtccagagtctgtacttcccgattttacatgacaatcttaccattcataatggaatctgttacatcatgtccattggcggcctccactatcgtgttgattaggttctgggtagggctcagatggggctggtcgatgtttaaaaggatgacatctgctttcctgccttcttccacagttcccaggatatcgcctttgccaatggcgttggcactcccctgatggctattttaagaagcgtgggacagggacatgaccatagggttaaagaatgggagcccccagtatgctatcatgctgtagcgcagcgccttcatttcatcaaacaggtccaggttggacggggctgtgccatcacagccaaggctcacatttaggcctgcctgaagcatctgcggtgtttttggaaatccatgattggacagattggctctgggacaatggattacttttacatcccttctggccatcatggcaatgtcctcatcggaaagcataacgttgtgggcggtcagaagattggggtcaagtacacccatagacttcagaaactgggccgggcgcagatggtaattttgaaggcagaagctgacttcatccttgtgctcacacagatgggcatgaattccggtgttaagttcagcagcagcagcatcccttgccatggcgatcagaacccatgaacaggtcatgacctggcggatggcaaaccagatagagattctgccgtcccctttgccgtcatatgccttgtacaggtccctggtgtgcatgattgcttcctctgctgtttccttcattgcgccggtaattgcattgcccatatctatggtgaatttggcgatggttgcttgcatgactgattccagtaccgcgtcggccacgcgttccatatggatgccgccggaatcggcaaatgaggtggttccgttcttaatcatatccagacaggccagttgtccgttgatataggaatcatcgggccttaagttgctttcaaatggaaccaggaacctggtccacaccataggatattcatcggaaacccttccccgcagaagctgctgacacgcatgggtgtgcccgtccacaaggccctgcatcaggagcatgcctttaccatctaacgtttcagatgcctagaaaatctcttttatttccccagcaggaccgactttcttaatccatgaatcgtggatggcaacactcatttcttctgaaaccgtcatatccggcttaaggatccggcatccatttattaatatatcacattttaccattctaaatcatttcctccttggtatcataacataacacattccggttttatactcatgcggcttaaattgctccggtggcccgcagtacctaatcagctacaaaggcagagaatataaaagttcctgccataacaagcaatgtaattaccaccatcttccaacccattttgacaaagtttttaaggtccttcccaagggaaattcctgcaaatgcaccgagtgcggtggcaggagctatgaaggttaccttggacgtgacctggatgatgatatccttgaccggtgataggggttttctgccaatcttaggttccagcagcgcatacagttttcgggttacaggaagtccgacaaaggttcctatatagattcctgtgattcctgtaagcatgtcgctggcgccccccattaccatgatatcttctgcatatgagggatagatttccccagtgtctctgccgctgagctcagcatagatccgctgccaactccgcttgccatacccatggcaagcgggtggaagatattccaggatgcaaccacacctgccagcaggctgataaacacggtaccgataacagaacctacaatgtatactgcaaaggtaccctctgtctccttggcatccggtccgtatatatccgtggtcagcccaaggtttgaatctctgttaatggaataacaggcgccgatggcttcctttttcaggcccagcagcagcgcgatgggaagcgaaatgaaaatagttcccagattgccgaattcctgtaaaattagagtgggtcctaccgctaccagctttgacagatttgccccggcagcccgtacccgcttccaactacaaacccctgatgtgcccgcataatagaatacgcggccgctcgatccgtatctggctgcattttgccagaggatgggccttctggagataggcatgggctgtgcggtaggaaatggggttaaagaggatcccatgccccctgagttcctgcatcatctggcctttcagctgttccgcaaaaaaagatgacacccaaatccgcaaggtccttttccacctgctcaaagacaccggacgtcttgtactccctgaatcctatgtaatattcaggaacatccaatgactgtataatagacatgaaggaatccatgccgcagatatggtgctgagccgccacatagaaggcatggttgctttcctttttatcctcatactttaaatccagatggtacagacggtttaagctccccttgaattcgatgaatagttccttgccgtcaccggtcagcataacccctttggacgtccttaaaaatgccttaatcccattgcccttccactacccgcactgcctccgaaacactggattgggcggcaaacagccgcttggctgcctcactgatagagaccgaatcagctaccgctacgaaatatttcatctgctgtaatgtcatgacttggttttattccttcccccgggtatacagatattacatttatccgtgcacgtaatggaaaatatctttgtgaatgcctgcttttctaaatatagtcattttataccctattttaaaaacgtgtcaagatggtcaatcagcttcttgcagaagaaactttgttagagactgttttggtatattaagaaacagaatatcaggcagagatcagggcgcggctctgctggttgtaaagaatgtctgccgcagacaacaaaacctaatgttagggttgaattggatgggagaatatgatatgatgcaaaaataaatgatggagaggttggtagttatgggaaggaaggataaaagtcttgaggacaaggcatacaattaccttcatgacatgataatccagcataagctgcaggcgggaaagcgaatcatcgaaagtgatatagcagactgccttggtatgagtcgtacaccggtgcgtgctgcgttgcggcgcctggaggaggagaagctggtttacagcctgcagaacctggggacgtttgtggagcagcttacggtcaaggatgttctggaaatgaatgaactcaggattgtgcttgaggtcaaggcattggagtcatgcgtcatgaaggccgctgatgaagacattgatgaatgcatcagagtgacggaatctattacagtgacggattctgcccaggatatcaaggctaaggatgaatattttaataattttattatacattattgtgaaaattcccgaatacgcgacatcctgcattctctcaacgcggaattgtcccatcccaggcatttagttgcatttactgaaaaaagacttgaggttatgaagcaggaccatcttaagatacttaaatatattaagg

SEQ ID NO: 3336 - DNA, 622 bp, Unknown
  gut microbiota DNA sequence
ggtcacacccacgcctgacagggccacatccccgccctcgctgccgtttgtcagggtaaagttcttgctcttaagccccaggtcattggaattggttgcggcagtgatggtgcctacatctgtctttgtcaggtcaccagttgcaagatccttacacgcatcgttaatggcggcataacccggatgcttcagttcgatgtactggccgggctggtcgtttaacggcgtagttccgtcctctttcagccatacactgttggctgaggtgctgttttcgctgaccttgcctgtaaaatatcttttcgatccgtcatcactttcaaccgtagccttgataatccatgcagcaggttcagtatccgtggctgcctggagcgtcatttcatagctcaccttacccgaagccgtgaatttaggttctgtactggtgctggaaggttttagccctccaaatatgccgtccttgatgtccgcagcatccgtaaatttctggacacctgccttgattccgaagttctcgcctaacagttcctcccccgtaaggctggttttaaatatcttgtcagccggaaccgctgttattgtgaaatcccctgccgggtgggcctttccgttattggcc

SEQ ID NO: 3337 - DNA, 1240 bp, Unknown
  gut microbiota DNA sequence
tttctccggttctcccggaaaatcctaatttaaataattaacgagtaacagccctcacgttctggattggttgacgctagaatttgaccacattctattacttttctgtcaagcaattcttctggtatgttcgcaaaacaaccctcgtatatactttgtccttcatcagacgaagtatcagattttattcgatgactatcttttataattacttccagttcatttgttaacccattagcatctatccaatcttttttccaatcagcgatggtttctctcatattatcctccaaaatcttaatatttcatcacttttacttaactcttataaaactatataatttttcttcgccaaccccctactttacatttcttcaatgtgatagcattataccctccttttaaatttccgggtaattctcaagtttaaaaattgcccaacgtaatgccgcaacggcttctatatcatgttcttttttagccttttccataagttcatataacttctcaattttcttttcatccatggtattacccttcttctgtttcccagaaaatattgattgtatatatctccgttttatgttaaaataaatctgataggggcatagtccctttcgacattttttccaccagtccttgtgattggtggtttttatatgtggcacaagcttctgcagaaactttacatagacataatatattctgcgattttcttatactcttgagatattggaagtttcggatttctttctactaccgcaaggccatcatatattcccttaaccgcttctgatgtttccctgatgatacctattacattatatttttcttgcaacaagtgcaggatttcattctggtccttcacccgcactttatatagagtggcgataacgcccatgatttctaattccggattgaccagctcccgtatgtcattgattgtgttctcaagctggtccaatcccctatatgacagatacgtaggctggcatggaatcaataccttatcagctgcagctaaagcgttaagtgtcaaaattgatagctggggcgggcaatcaataagtatgtaatcataatttgcttcaactttttttaaagccctggccaatacctgctcacgtgctgtcctgccagtcaactctagctccattgatgccaggaagaggttacttggtataatgtcaagattatctttaatattatagatacaatcttctatcccaattgggtccct

SEQ ID NO: 3338 - DNA, 1350 bp, Unknown
  gut microbiota DNA sequence
gttcccccaaatatcatccacttctttttcttttccataccatccccctctcttataaaacagacctctgaatcttgtcacatccagaggtccgattattaatgagtcatgcgtgtattgtttatgagtctactgtttgtaagtgtaccatttataagagttctatttataaacattctatttataaacatgtcatctatgccatctatagggctgttattcatgaatacaaataatataaatctggctatcaatcaacagttatctgaatcaaatagagcgtacaatgtcagtaagcagattaacgctgtgaataatggccttagcctcaaaagcagggtaatctactgtggcactgtcatctgccttatcagaaatcgccctcacaatgaggaatgggatggaattgaggtagcaagcctgggcaatggctgccccttccatttctgtacagtatcctccaaaggtatctgtcagccacttcttttttcccttatcagaaatgaactggtctccagtcaccactcgtcctacgaaggtatggatgtccggattgactttggaacaacattcctccgcaagatgtataagaccttcatctgccttaaaagccagggtctccaccctgggtatctgtcccggttcatagccaaatccggttgcatccatatcatgctgaactgcatcgctggaaagcacaatgtccccaatatcaatctctgccttcagggaacctgctattcctgtatttaccacacctgttacaccatatatatctgccagaatctgggtacacatagctgcattgaccttaccgattccggaacggaccaccactacctctttcccctccagctttcctttataaaagtccatggcagctcttgtctccacctgtacatccgttaactgcgccttaatcatagccacttcctcgtccatggctccaataattcctagcataattacctccttctgtcttgtactattcttctattatataggaagcccgcagattttcaagttcaaagcttgttctcacttgacattatcttttgcataaggcataatcggatatacacgaatttatcacaggaggcactacacatgagatttaaaacacagggggtctgttccagggagatatcctttgaagtaaaagataataaactgaccaatgtccagtttgtaggcggctgctccggcaacacccagggcctgtcccggctcatcgagggcatggacgtagatgaggccatccgaagactggacggaatccagtgcggtcccagacctacgtcttgtccggatcagttggctcgggcgttgaagcagtttaaggggcggtaa

SEQ ID NO: 3339 - DNA, 5675 bp, Unknown
  gut microbiota DNA sequence
cccgctctcccacggacgcgacccctcccccctcgcacaaatcccccatcccacattcccagtaataatcattttcctccaggaatactattaaaataaagccaaccaggcggcgtcgcttatgaagcaatggatttttttgataacactgacaatatcactggtctgcacacagatgaatgcggcggcagacagttggacttcggtacctgcgacaaaagaggtacgggaagatggggatttcctgaagctgtatgcccagtctgctgtccttatggatggggatacaggcagaatattgtatgggaagggacaggatattatccggcccatggccagtaccacgaaaattatgacctgcatcctggctttggagaacggaaggggggaggatgcggtgaaggcgtcttccaatgccgcttcccagcccaaggtgcacctgggggtgcgggaaggagaggagtacaggctggaggacctgctgtatgccctgatgctggaatcctataatgacgcggctgtgatgatagcagagcatataggaggcagcgtggaagggttcgcggcaatgatgaatgaaaaggctgccggactgggctgcggggatacctattttattacgcccaatgggctggatggggtcaagacggatgaacagggaaaggaacatatccattccaccacagcctctgatttggccaggattatgcggtactgtgtgacagagtcccctgcaaaggatgaatttttaaagataacacagacacagaaccactactttacggatatggcagggaaacgctcctttaactgttataatcacaatgcatttttgactatgatggaaggagtactgtccgggaaaacgggatttacagggggcgccgggtattcttatgtgggagccatggagaatcagggaaggacctatgtgattgcccttctgggctgcggctggccgcctcacaagacgtataaatggtcggatgcgagaaagctctacacctatgggctggagcattttaagatgaaggatgtatttcaggaggaaacctttgccagggttcctgtttcagggggactgtgctggaaggaaggggaaggagccattgaccaggtggagctgtccatgatgctgaatccggatgatatgcacctgacactgctgatgggagagggggaggaagcgcgggtggtaaagaaggttccttctatattaatggctccggtcagggaaggacagcaggtggggaccgtggactattacctgggtgaggtgctggtaaaaaggttccctgtttatgccatgcagggagtggagaagatgaatctgaggcgggctgcggaccgtgtgctggatctgtttctggtgaggtgagaagggggagccggccctttggttagggcgccgggaaggggattttagagggctttggccggaatatgccaggatttgccacattatttaatcttttcttacaaatctttgtattatgtgaagtttccgccgttcttgttgacatatgaacgcttttgtcattataataggattaatgtcataaaatagaaattcatacgaattatggatatgaatgaagatacaggagatttttacataatgaagggaaaaaagttaaaaaggggcctggcgcttgtgctgggactgatgctggccgctgaggttccggcatctgtggcaacgccttttcaaatgtttgattcctatgcatatacaggggcggccacggttaaggccacctctttgaatgtacgaagcggagccggaaccggctattcatcagtgggcaggctggcggcgggagcggcagttaccgttatcggggaacagcgcggaacagacggcaatacatggtatcagattcaatacacaggaacgggcggagccgtgaataccggctatgtctcatccgtctatatcaggcttccggtggcctataccaaggattctgattttgaagcatatcttacctcacagggatttccggagagctacaagaacgggctcaggcagcttcatgcccaatatccgaattgggtattcaaagccaagaacacaggcctggactggaatacggtcattgaaaatgagtctgtgctggggcgcaaccttgtggccacaggcagtgtttcctcctggaagtccgttgccaacggggcttacaactgggacaacagcacatggaccggattcgacggcagtaactgggtggctgcttccgaggatattatacggtattacatggaccccagaaactttttggatgagacgtatgtgttccagttcctcaaccatgaatatgatgcgaatacccagacaaaggagggattaaacagcctcatatccggctccttcctgtctgggacaacgaattccacagggacagggggaagcgatttctccagcggaccaggatcttcgacaggaggttccggttcaggcggtcccggctcctcaggcagctcctccggttcttcttccggttcctccagggggcccgggcgcagcagcacctatgaagatacacagcatggaccgggggtttccggcagttctaacggctccggggcagcagcggtctctccgggaggcagttcctccggcgggtcctccgggggcagcagcccttcaggcagcggggaagtgagcctggagtccccccatgcatccattgagcccagggagcgcaatgtggtgtctaccagtgtaagcctggtggctccgggacaggacggatccggcagcagcaatggccctgtgtcttcgggacagagcggcagttcctcgggcccggtggcttcacccggatcggatcaggtggtggaccagaccggcacgtcgccgggaggcggctccacaggtgcagctgctccttatgcggatattattatggccgcggccagccagtcaggggtaagcccttatgtgctggcagccatgattctccaggagcagggcaataatggtacaagccctcttatttccggttcctattccgggtatgagggatactataacttctttaacgtggaggcataccagtccggcgcaatgtctgccattgagatggggctcaggtttgcgtcccagtccggttcctacggacgtccctggaacacggtggagaaggcaatccgtggcggagcccagaattatggggataattatgtgaaagccgggcagaatacattttatctgaagaaattcaatgtccagggttccaacctttacaagcaccaatatatgagcaatatccagggagctgcctcagaggcggccaagctgtcccaggcttacacggctgatttgaaaaagacagccctggaattccatatccctgtatttaacaacatgcctgagcagccctgcgtggcgcctaccggagacggaagccccaacaacaagctgtccggtctcggggtggacggatttaatctgacgccaagctttaacagggatacccaggaatataatctgattgtggattcttccgtgtcaaatattacagtcagcgcatatgcatcggattccaatgcgcgtgtggacggcgcgggcaatgtctcactgcagaacggcggaaatgatatctccattgctgtgacggccaagaacggaagcgtcaggacctataccatccatgtggtgaagcaggacggcggacccacccagggcagcggaggatcgcctgtatacggaggcggcagcagttccggcggtatagtcagtccggacggcagttccggtggcagttcgggaggcagttccggcagcagcggtccgggcggttcaggcggaccgggcagtccttccggaagcggcagcggaccaggcggaagcaatgtgaccattgtagaggtgcagtcctgataaagggaagacattataatcagaaagtgggaaatgataatgattagacgtatgagacatgcggctgcagttctggcaatggcgtgtatgatgacagtcatgatgccggctcagatgataacagcctttgcagcaaatgcaagaatcgccttttccgatccatcggcaactgtgggcggcaagatcaaggtgaatatgaagataaccagcagcgataacctggccaacgcggatgtgatgctgtcctatgattccaacatattggaatttgtggacggtaccaatgcggacggaggggcaggagctgtccgggtccatggggatgcgggcacgcccaatacgggtacccttgtatttacccttaatttcaatgccatagcagccgggaccagcaagattgaggtcaccagccaggagatttatgattccaactcacagattgtgacggttaaccagcagggaaattccactgtaacggtcagcgccctccagtcagcttccaaggatgcgacccttaaatccctccagatttcaccaggaagcctgacgccggccttttcaccggatgtggacacctatgcggtgacggttggtacagatgtggataaggtgattgtcagcgcggattgcacggatgagaatgccaccaaggtggtcagcggaaacgaaggcctccagatgggcgaaaaccgtgtgacatgccgtgtgacagcccaggatggcgagaccatcaaggaatatgttatcgtggtgaccaaggcagagggcggcgccagtgcggcggatgccgatgcttcttcccaggtaaggatgcggattgccgagcgcgttatcaccattcttccgcctgatcctgaggtcaaagttccggagggattcaaggagagcaccattaatatcgacggccacaaggtacagggctgggtatggggctctgaggcagagcatcagtactgtgttgtgtacggtatgaatgaggccggagaaaagggcttctaccggtatgacatgaaggacgatgagaggaccatccagcgttactttgaggatccggccatcagcggttccgtgacaaaggaagtgtacgatgagctggcccttacatacgacaagatttacgatgattacagtctccttaagatactgctgattgtgaccattgtcattgcaatcattctgctggtcatccttctggtggtggtatttaccaggggatccgggaaaaagggcggcagccgggatgaactgggtgacaagaaggacggtccgcggggcagccggggcagaaacagcaggaaggaaaaggcagaggagcctgagcttttggagaattcagaggattatcaggaatatgccggtgaggatgaataccaggactctgatgaatacgatgaatcccgggagtatgaggatgattctgtctacgatgacgatgaggactacagagaccttccggaggaggattatccggtgggcgaagaggacggggacatctatgatgaggaagaagatgtctatgagcaggaggaagagcctcaggtggagactccggtaaagaagccggtgaagcctgcaaggccggtccaggccccggctcatgcgccggcccggacaccagctcatgcgccggttcagaatccggagcgtacaccggcccaggccccggcatccaggcagaagcctcctgtgacgcaggaacagctgtctgccagaagagaagcagagcaggtgcctgcaaaaccggacggacaggatgatgattttgagatttttgatttgtaattaatat

SEQ ID NO: 3340 - DNA, 906 bp, Unknown
  gut microbiota DNA sequence
gggaggtgccggtcatcaggtcgatggcaaagccggcaaagttcagaaggatcaccgccagcaggatggacaggggcatactgatgcccacgatcaggctggcccgcaggtcgccgaagaagaggaacagcaccagcatggtcaggatgatgccggtgatcagggtgttcagcacctctcccagagtctccatgatgctgtccgcctcgttgtaaataacctcgaagctcaggccgtccacgctgtactggtctaaaatttccatgacgtcctcgcagacgttcacggtggcggcgctgtcctgcttggtcacactgagcatgacgctgtcgccgccgttgtagcggctgaggttctccgcatccttctcatacacgttgaagaaggtgcacagatcccccagggccaccatctggcccgacggggtctggatgggcaggttccggaagtcggcgttcacatccacgctgccgtagacgcccagggcgatgtcctgggtgcctagggtgacgtcacccaccggcatatcaaagtcggccgccgcaatggcggagcccaccgccgaaatggagaggtggtactgctgaagggccgcctcatccagcacgatgcgcagatactcgtcctgggccccggtgacctccacctgggccacgccgcccacgctctcgatcaccggcaccaccgtgtcgttgaggtagctggccgcgtccatcccctcgggggccacagcggagaggatcatggtgggcatgaagtcggcgctcagctccatgatcagggggtcctcgcagtcctccgggagagtaggcatcaggttgtccatggagttcttcaggtcggagtagacctcatccatgtccacaccgtacttataggtcagctggagcatggcgtagttgtcaa

SEQ ID NO: 3341 - DNA, 6383 bp, Unknown
  gut microbiota DNA sequence
agcgataccgtgccggttcaagtccggccacccgcatgtataaaaggccctggaatttatttccagggcctttttttatactttatccaagtacgttatccttgtgctttatccaacaaccttctttcccttaaccaatacactctgaaccctgatatcatcatcgaatatgaccacatccgcgtccatccccgcagaaaggcttcccttcctgtcctggataccaagaatctttgccgggttatatgtcatcatacgcaccgcatcctccagcctcacctctgcctggtgatacatggtgcgtacacaccggtcagcagtacaaacgcttcctgcaaaagcactccggtccggcaggaccgctaccccgtcgtcaatgatgcattcctgcccatgtgccaggcttcccagcaatacatgctcgccatcatccataccagcccctctcatggaatcagtaacaagacagatgtcctcaatgggtttcatcttcacaataaatctaagcagctccggcggcagatgtttgccgtctgctatgatttctacagtcatcccatctatcaggtacgcactctctattactcccagatgccggtacgcattaattctgcggatagtggacattccggaatacaaatgagtcacatgggtataccctctttcccatgcctctatgacgtgatcataggtggcgtctgaatggcctatcgaggccagtattcccctggccttcagttcgtctgccagttccattgcgccttccagttccggggctgccgacatgcggatgatatcatccgaagcatccagcagctttttatagtcgtcccttgcgggcacctttatatattgggggtcctgtgcccctctttgctccagggagaaatagggcccctccatatggattcccagaagctccgggccattttccatctgtttcctggcttcacggtagcagtcaaaaaaggtcagcagctcctcgtccgtacaagtcagggtagttgggcagattgaagtggttccgtgagccagatgggccatacatgcctttatgattgcatccggggtaccatccataaaatcatgtccgccgccgccatgggtatggatatctatgaagcccggactgacatatgccccttcagcgtcaatgcagcagtctgcctccggttttcttcccctgacaattcctgctataaccccatcttccatgacaaggctggcctggtccaatatcctgtggggcgttatgatttttccgttgataatcgcagtcttcatggccttctcctgtttctttatacctgaggaatagccttggaggctgaatcaccatccaggaacagattccagtccggatgtgttttcaggatagtggccggcaccagatttgtcactgtttctgctgacaatgtcttctgtatggcatcactctttcgtataccgggtacgatggtgacaatggtacggctcttaagtatctgaggcacggtcatggatatggcctgggccggtacctcatccagagaaccaaaccacccttcatttacctgctgctgcttacacgtctggtccagattaacaataatataggctttatctgtctcaaaatctgcaggcggatcattaaatgcaatatgtgcgttttctccgattcccactaaagcaacatcaatgggggccttttccagttcttctgtaagagttgcaatattttcctctacattgccctcgccattaacaagatatgccttcttgggattaacaacctgtatgaagcgttccttcaggtacttgcgaaaactggctttatgtgtttccgcaaggttaatgtattcatccaaatggaacatgacaaccttatcccactccacctccatttcggtcagatacctgattgcctctatctgggactctcccgtggacagaagaattctggcctccccgttctgtgcaatggtacggctgattgcctgtgcagcacatgccgccgctctctgcgccatctcacctgatgttctggaaatatttatattcataatcaacccatctcctttaatccatacttttcattgcaaatattagtattcaatgtctaatatcctgcctgtctcagcactcatatgtgcatattggcacattatggtagacacaattgcctcttctccggtgggatacagtccttccagctctttaagggcggttccatccttcatccggttcaccagctgaaggaagaacagcatggattcaatacaatacccggaaggtaccggtcctgcaaccgggtcgtctatcatcatgtttccatagggattcaccacatggctgtagctgtccgcgttatacgcagccaccacgcccctgtcctggctgtccacttcctggaatccttccgtacctaccagacggatctgttggtttacaatagatgaaaagctgtttggaaggatccaggatgcatcaaccgtaatgctggccccgcttgcaaactcaaacttagactgcagggaatcatatgtatcaatacccatggatgtaagtttcttctttattccggaggcatatacgcgcactggtttctcgcccagaagccagtatatcaggtcaaagaaatggatgccgatgaaccaggccggcgaactgttctgcgcccagttcttaaaccagactgagggaaccaggattttgtcctccatgcagacataaccatattctatctctcccaattttccctccttaatggcatttcgcagctggatatgggccgggtcaaaacgcttgtgaaaatccacgtacagcatgacattattttccttcgctgcctgtatcatcctcttaccctgttcgatgtccgtggacaacggtttctgggcaagaatatgaatcttccttttagccgcctccagaaccacctcctcatgaagataatccggagtgaccactgccactgcatccaatccctctttgtcaaacatttccctatagtccgtataccctttgattctatacttttcatccatagatttgagcgtatcagggttgatatccgcaattgccgcaaattcaatttcccctctcctgtgcgcaccatagtatgcgttaataaggacactgccataggttccggctccaacaacgccaacttttgctttcatttcttttccctccataataattattctttattaaaatgtatgttatattatacatagccaaacagtccgggcaggaacatggtaataggctcgatgtatgttaccatagccagggctataaacagcggaatcagccacggagataccatcttcaccacatctccaaaggaacgtttggatgccgatgacagcatatacagcgacatccccaccggcggggtcagcagtccaatcatcatgttcagcaccagaatcacgcccatatggatagggctgatattggctatggccattaaaggtgtaagaataggcagcataatcataattgccgctactacttcaataaacattcccagaatcaacaggataagattaatcagcagcaggattacatagcggttggacgtaaccgaaagaatcagttccactaccaccttgtctatctgctcgtaagtcataacccaggcaaagagagaggcacctaccaccacagcaatggatgggcccacctggcggacagtggccactgccagagacggaagctttcgtatatccatttccctgtatacgaaacaggatacgatggttccatacagtacgctgaacatagcagattcagtaggagtaaaccatcccgtccatattcctcccagcatgatggccgggaacatcagggccggcagagcttccagaaaagccttccatttttcacgtccggatgcctttgcgtgtctgggatatttcctcttttttgcaatgatatatatgtagatacataagacgatacacaggaccacaccaggacccaggccggccataaaaagggctccgattgacacatttgccattgctccatatataacgaacggaatactgggcggtatgattgggcccacggtactggaggcgcctgtgacgccaagggtcaggtcatcatcatacttctcatccctcatagctttaatttcaatcattcccagtccgcccacatctgccagggcagaaccgctgataccggagaatataagactggacagcacgttcacatacgcaagtccgccgctccaatggccaatcatctttttagcaaaaccgaatatgcggtctgtaacacctccgttattcataacctgccctgcaaagataaaaaaaggaacagccagaagggtaaaggaattaggtgcattcatcatcttattcatggccgtcatcatggacagctgtggcgtcagataaatatagagcagggaagaccccaaaaggcacagatacatgggcgctctcatgaccatcagaatcagaaacaccagaaaaaatactttaatcggttccatatactcctactcctcctttcctttcatatctccaatcttccggacactgtttaccgcatttaccaggcaccggacagatcccaggaaaaaacccaggaccattcctgccgccaccaccgccatgggaatttccatggcagcggattttaccactttctgaaaatcaaagaactgaacagaccagtacagcaggtaaaggtgaattccaaagcagaacagacttgtaagtgcccggaggagctggtttggtactcccttgacaaacgaaagaaatacctcgacattgaaatgttcaaatttcttttctcccagggaaatacacaggaatacaacccatatataacaaaagcgggatatttcttccgaaaacagcagtgctttcttcaggaagatacgggagaacatctggcacaggattgtaatacacatgacgccaaataaagagcccgctatgatctcctccagggagttaaataccttcaatagcttcttcatgcttacctccgttgtttcactctgtcagcaggtttcattattccttccagttagccttaaaatcatttaggtccttaatggctgcggcccattcaggatcacttccaaaattctcttccactaccttggctgcattggccttaaatgcctcgacatccggctcaatgaccttcattccctgctctttcaggaattccagtccttcttctgtctctttgttgattctatcttctataataggacggtacttggcaagtacatcggtaatcacctgacgctgttcttctgtaaggctctgccaaatctgctccgaaacctccaccgtgccaagatggacggaatgctttgtcagcacaattgcatcctgtacttcatagaacttctgggcaatgatggttggaacaggattctcttctcctaccacaacgccggtctggagggaaaggtataattcactcatattaataggaacaggattaccgcccagtgcagccaccactgtcttggctataggcgtgtccatgcaccggacggaaaggcctgccaaatcatccggtttcatgggttccacgccctttatggtcagattcctgtcgccgtaataccatacatccaatgtacgcacgccgcttgcattaaggactgtctcattgtacatcttctgagaaccttcagaggcaaagtagtcatacgcctgctttgcgttatcaaaggcatagggcagcgagtaaacctgtacctggtcacagaaggatgccagaatactcggacccgtgacctcaaaagccagagaacctgtacgcagcatatccagcgcctctgcctgcgtacctaacgtggccccgggataaaccttgattttaagagagccattggttttttcttcgatctcctttgcaatatcataggaaacctggctccacgcatggctttcaggctcacccacataccaggacaattccagggcttcacctgctgcctcgccggcagtatcctcagtcttactttcttcagctttatccgcctttgtatcggctgctgccggagctgccggggccggtgcttccttctgcccgccgcaagccgccagacttcccattgccatcatcaccgccagtgccagacctgccattcttttgtttcttctcctcatattacacgtcctcctttttaataaaacatagttatagtggttatatgcaccacagttatcctggaatgcatgtatgctttttgctttctcatatccgttttctgttttgtaagctcattatattatagaaaacgttttctgtcaatatttctacaaatatttttattttcatccttatttcacagcattttcacgttagtttcctatgtattacagtttattattattatatttttctat

SEQ ID NO: 3342 - DNA, 329 bp, Unknown
  gut microbiota DNA sequence
caaattctactaaaattatgtaatatcgacaattccgttaaaagctaaccagctccatcacacgcacttagtatattataaattccggaaaaataccataacttttacctgtgcattttcttacataattattacaaagatgttatgtctcctgaatattgtatttatatctatgcatgatgcggattttcacgatacatgcaaaatctatcttctgtaatttgctcatctctgcggcttaaatcaagaacgggcaccacctccatgaactagtccggatgtgatgcccgcttatataactctaaattatttattcaatcaatccatat

SEQ ID NO: 3343 - DNA, 1504 bp, Unknown
  gut microbiota DNA sequence
catagtattccttcaccatgggaatcatctcacagagatcagcgtgccaataatcctccctcttcatgatttcttccacagaagcagttttcataaactgcattatttcatccccatcatttgctttatccgtacggtagaaggagattagtgctgccatagaaaatgtaagggcctttggataattcccgaacttttctttgtactctaaaatagtaggaagaactcttacctggaacttgcttacggaatttaatgcaatgctcaacagctggtgcttgataaatggattagagaatcgttccagaacagccgctccaaatttacggttatcttctgtatctccaattgtaggaataatttcttcgaatatacactttttaaggaatgcggaaaccttctcatccttcatacattcgccaactgtttcaagtccatacagatacgcacccaataccatggaagtatgtcctccattgagaatacgtacctttctctttttatatggatgaacgtcatcggtccagacaatattgtagccggctttctggaatggaagttcatcttcatggtgaccgccgataacccacaggtgaaaaatttctgctgtgtctataagcttatcctcatagccaatctgcttagtcagttcctcgacctcatcccttgggtaaccagttacaatgcggtctaccagtgtgctgcaaaaatcattttcatcttccagccaggttgtaaatccattccccagctcccataattttgcatactgaagaacgcactttttaagattgtccccgttgtcatcaattaattcgcagggcagcagaataagtcctttcaaaccagccttatagcgtttatataagaactgagtaagtttagccggatatgacttgggcggcatatcagccagattttctgttcccagatattcaattcctgcctcggtagtattagatacaagaactcttaagtctggattctccgccaatgctatatattcttcatactgagtgtatggattcaaagctctggatatggaagttacatgtgtatgctcatttaccacctgtccattatcaattccccggagaaacagattatattcacagttctggtcggagagcatttgacacatgcctttttcaatcggctgaaccactacaatcttaccatcatataaacctttttcctggagtttgtgaaagaaatagtctacaaatccacgcaaaaatcctccttctccaaactgaatcacagtttcttttacacctgtactcattttttacctccatagctatattttttgtaagtgcttacatttttagttgcaacaattatcttttatttctgagactaatatacaacataaattcttaatttgcaatagtgtaatgacttttttgtaagtatttacatttaaggtaatctattttttattactgcatatactttggcctcttctgcaatcttatcgcatttttcattttcaaattctgtg

SEQ ID NO: 3344 - DNA, 7826 bp, Unknown
  gut microbiota DNA sequence
aattccggtttgtagggaaattgagcttaccgacaaatcggaattttttaagaaggcaataagtatggataaccttgccattcattttcttaatgatgatgagcaactggtcacgcaagaagcagtaaataaattggttttcaataatacctgggctaatgacgaggcccaactggaagcccttgctgaacatctgggcgctatggagtggaaataaagatattgtgagggataataacatgccaatacagaatacgaagatatctgcaaaagaaagacgcattttcagatatacccgggcagatgcatgggaaaccacaatatcccaggtcgatgtgatggagggtgtggaaaaagggaatgtaaggtgtctatattttgttacacctagattgcatgcaaatacaatcgttgattcctgcactatcactatcagtcaaaaccatattgatatgattcgggatgccatgctcacccgcctggaggtctgcaaatataaggaaattgagttccctgtggtattggatggattcatcaatacctttgagtttgcacctgaggaatccttttccaacataattactgttttcaacatttccgcatttagggataatgtggatgtggctatcattggcaatcccccatatagggggaaagaggtccttaaattgtatgatgatatttcaaaaatactttcagataatggggtgagccagaaatatcttgcgttggattcctctatatttccgtaatagcaaaccatctgattgatgatagaagcttaccagaattcataggaggttctatatgaatataagactgttttggaaggcagttttggaacaggacagggctgcaataaaaggattcttccaaagtaccgcatatgtgaattggcattgtacaaatgaatgttttactgtggatgaatttatccaggcaaactgcgaatatccgggagattgggatggaaaggttgagcgtgtcgaatgtgcagggaacctaataataactactacgcatgtctttccaaaagacaggtcctcttcatttcatgttgtatcatttttccgaatagaggatgaaaaaattgtgtccgttgatgaatactggtctgatgatggcgaagcaccgctatggcgtaaggaaatgtgtataggcaagccaatcaattagcctattgtgttaaaaatccaaagtaagctggtgatgggatgggaaaacagataaattattggatggattatgataactttttgctggtcgcgcaaatggcagttgacttgggctgtacggttgtaaaagaggaccttaagttaggcaaagtcattgaaagcaaggatgccggtatcatcaccccctatggaacatccaattatccaggctactacttccatcttccggaggcaggagccatagaggtccttaccgtaaatggcaaggaatgtttggattatggctatactgcaaccgggaatgccctcattgaagccggctactcttccatcgtcaatgagcccgcaggcgttgccgggtcacggcagaaaaaggaaatccacagggcaagaatctattgcatatctggatattacgatgaaaatgaaaaatatatacaaaggccggactgtttgaccaaggtgtatcactccctggtgagatatgtgaaaaagatagctccttatacagaatttacagatatcctgataagcatgaaggacgaaaactacggggaggaatatgaatatagacataaggaatacataacaaaaaactgcctggatttgattaataacaaaggatacaaattatgttgaggatatcggttacacttttaacagcttgaattgcatgagaaatcggaagttgtaactgggattatttatattttcaaggtaaaaatgttatgataaaagggttgcaacttatagttgcgaaacttcgaggtttatgtggtagatagcaaccgcttataatgttaaatttttatataacacaggaggtgctaatatgacatttggagaaaaacttaaatttttaagaaagcaaaaaggcttttcacaagaaaggttatcacaacaattaactgtatcacgacaggcaatatctaaatgggaactaggagaatcattaccagatacagaaaatgtaatacaacttagcaaattgttttcagtttcgattgacttcctgctaaatgataacatctgcagtgaggctgatattccagccgtccagcataatacaactgttttacaagataaatttcgttctaaaatactacttgttattggcttcatttgttctgctatgggttgtgctggaagtattacactaattgtcctctctacaatgataaaggttcatgttgaaaagaaacgtatattgccagacggttcggttcaatattacggtggtggagatatccttggttatgatttttggaaattcatatcagaatataggctgcaggcattattatttatttgcattattttaattattgctggtattgctattatatgggtgtcaaagaagaaggctaaaactaaaagcttattattttaatgaaagtaggaacatactctatgcttgccaacttccggtttgtcagacaatcgcaaagaatgaaaaaatagaatttggaggaataagcacatggcaaataagtataaagtaattgatgaaaaaacatggaatagagcaatgcactgtatgatttttagaaatagtgttgaaccagcgttttgtgtaacctttgaagcggatattacaagatttaaacgtgtagttaaagaacagggggtttcttttacattggcaatggtatatgcagtttgtaaatgtgcaaatgatatagacgcatttcgttatcggtttgttgatggacagattgttttgtttgacaagatagatactgcatttacctatctaaatcaagaaaccgaattgttcaaagtggttaatgtccccatgatagacgatttaaaagaatactgtgagtttgcagaaacgatagcaaaggagcaaaaagaatattttacaggtccattaggaaatgatgtttttcaatgttctcctatgccgtgggtcacctacacgcatatttctcataccaattccgggaaaaaggataatgcaacccctctgtttgattggggaaaattttatgagaagaatgggaaaattgtcattccaatatcagtacaggcacatcattcctttgttgacggcatacatattgggaaatttgtagataagcttcaaaggtttttcgatagatgttagattccaatttgataaggtatctgagtggaaaaaaatatattctttttttcatatgatgcatttgggccgttatttatttatgtttggctgtatacatatggttttcaaaaaagcaattggtttctggggaaataagaaaatgtttgaggtgacggatataagaaagtataatcataccatgtccaaactttatgttgcacatgacattgtatttattctgcccggacttcctttgcttgcaggacattgttgcgggagttgtagtggaaaccattgttttaatggcagtttattcgttggtgattaagaaaaaatacaaaagtaattttgacaggggtatcgtttgggatgaaacttaaaattataatcggattatatgcaggaatcctgttattcagcggttgtgcttcaaatacatctgttgtcgccggacaatctgctgcagtgaatgcagaatccgcaacaaaaggcattaacaatgaggaaccgaatgtaaatgacgcacatttagatgataccatttatatcggagaatatctggattctgatgtcaatgagccaaatcttgaaattgcgagaggtgatgataacaaatatatcgtacagataggaatttaccgcctgacttcattaagtgatggcattggggagttgacggctgatggtatgaactttactgcgaccgatgctgcagggaatccaatcaggggcatcattacagcagacggccaggcagcaaccgtcacttttacagattccacttgggattatctgcaaaacggttctgttttccagtacacaaaatcatctgatacttcaaatatctggaatgaatagaccgcttatcagggattgggttaagcgattacgaatgggatgaagataatctctatagtcttgaatctatggtaaagaacacatagaacgcggtaaaaataaaaagggatacagcgtcacaatcgtataatggaaaagaatttttacaaaatgaactgtgaaaatcgtaatttatctgggggtgcttcatatgaaacgctatgaaatttacaagcatatcggtaatctatccccattaaataatgggtggataaaagaactaaatttgatttcgtgggacaataaagagcctgtttatgatatacgaacatggaatagcgaacatacggagtacggaaaaggggtaacaattacagcgggacagatggtcgttttaaaaaatctgcttaatgaaatgtcaatattctgatttccaccaggatgattcctacaattacatcgccaccagtacccagaaataaaataggctgctctcctatcctaccgagggcggcctgtatttatttccccattctctaataacaaaagaacttacttctgcagcaggaaggaaacgtggacggattaggcggtatatgataatataaaagtaatattgaaaccagcgaggcaaataaatggatgagttccagtcaatggttgaagaaaccaaagcccttgtacaaaaggaaataaaaaataaagacaatcgccctgactttattttggagaagcagctatatttaattttagaagaattggataaaatggagcgaatcagagacatccatctattccatccatattacccaaaggggatcgcggatagctgggactattcaaatccattggcgattcgattactggaattattagaatcatatcgggagttacaataacgttgaggcagtttccggattaccgggctgacaaacctggaattacagagaggaaggaactttcaatcatgctgatttatattgaaatgtatccaaaggacagattgctaaatggcccgaaatgttctgtgtctgaattaaagaaaagactggcaaaaattctggcagaagccgaaacaaaggattttatttcaatattttgtgcgcaatataattttgaagaaatgcctcttgataatgtgccgattaatgaaaatattgaagttgactattatatggacatagatgcaggacttattcataaaccatcgcgttgagtaaaactttcactcatggtaagaaaggattcccggcttaccgggctgacaatcggaagttgaggagatacgaatggaatgactgaacgccagaaactaattgtatataaacagaccgtacaggctgccaaaaacaaattaaaacaaatgagcggtatcagcatactggaacttttagagcacaatgaaaatccgggtttaaacgaaatgttttccgcctataccactacttttggaaatgatattgaaccatatagcaagttatcataccaatctccagcagagacggtttattcctggctcattggtactatggatttgaaggaaaacgatgagtattacttttactgcggcatatggtgcaggattaagctattggatttacggcttgcaatcccctccctgtggttacataatggaaataccaaaggctttctgctcgctgagacagatttaagccgtatgctggaggccggctctgattcccgtgatgaatatcattatctaattgacatatggaattatagtgaacagagaaattattaaatcggagtttgaaggaggtaaaataagatgaaatataaagttaaaataactgtcattgataaaaaactttatcctgaattgcaacaacaatattgccatgaccccaattcgggtatctgtccttgctataatgtgggagatgaatttgtattttatcgtgatgatgaaagagatgatttctggcatatgggtttgaatacattaattaagaccagtggtaatgcagatacagttgcaggcggacctaaaatgccattttgttccgaagcatgggacgctatttcacgttatatttataccggacttcaaggcggctctatcatgaaaggttggatgagagaagaaaacaccatgattacctgctgctcggacggaacaaggcctgtaattttcaaaattgagcgaattgactacgaataaaaatctggaacttttagtttatgcaaccggaacacagaccattaggaggaaaaatgattttatacagacctgttggctcaaaagaattggagctgataaagaaaagcaattatcgcagatttccaccgagattagtggaacagcctattttttatccagtcctgaacgaacagtacgcaacggagattgcttccagctggaatgtaaaatataatgaagaccacagaggttatgtcacaaagtttgaggtagacgaccaatattgcggacagtttgaagtccatcaggtcgggggcccgcaccataaggagttatgggttccagccgaaaaactggatgaatttaatgagcatatcatcggggaaatacatatcatcagcgaattttcagatagataatatgttatcctgtaaaaccggtgtggcctcggaagcaatgagagggctatcaggaatagggagtttaaccagaaaggaggtccagagaatcattggaatacaaagtgaatgaccaggggcttaacgcttccgtatttatcccttttgtcaataaagtatggcctggagattatgatgaagagaaaacgcagtcagcattgtcaaaaacactgaacataagcgcttacgaaaataacgtacttgtaggctgcctgcggattctttcagacggctatttctttggcacaattacagaactgcttgttcttcccgaatatcagaaacgtggtatcggcagcaagctcctccagcttgctaaggataatacgccaaccatgctgtattttggcgcacagccgggagttgaaccgttctatgaaaggaacggttgccaacggagcctgcaatcctacacaataaggggcacaaaatgaccaattacacttttgaagagataaaaggattgttattaaaaagcatccaggagcatgattttgaatcagaattacgcttatgctttcatgacaacctgaatgaatacatgattataatttatgacgaccactgctcttttcagcggtgcggcaatccaaaagaagcaagcggcgagtacaactacgaatcattggatgagctgtataacgcccaacaggttgatgggattgttttggaaagggactggggaaaaattaaagagttgcagtgtacggattttgacatattgggcctatgggactaatggagggataccatatgacagcagaagaagtcttttgcgagttaagcgataaatatggtgatgattttaactggcatatgctgccactctcaaatcatacatttacagcagagctaaagaaagaaatcggtaagaatcattttctctatcataaacagatatgggcagtggccaaatgtgattcaaatgatgatgtcttgtatctggctgataatggcggaggcgcagacatatattatattttccatttgacttattctgaatataatacagatggattcccccgatataaaaagtttgaagggataaatgcagtaaaagaatatatagaacaatcattaaatcaggactcatctttttaaaggag

SEQ ID NO: 3345 - DNA, 43099 bp, Unknown
  gut microbiota DNA sequence
atgttatatctgctggtattgactgaccctgaattatcttatgataattattcagatgatttttacattggcctatttgaaactgaacagcaagctgaggatattgccaagcattatcttaaaaatataaaaggcttctgcgatttcccatgtacataccgtattgtgaagaaagacgttattggcgatttcaacagtaggatatctgattacttatggacggtacagggatggaatacaaatgaagacctagatgagatagacataatcgaaagcccatgcttcctcacagaagaacaggcagacgcagagcttccggtcatgaagaagaaataccaacgggaagaatggactgtaacccgatggaaaataggcgcattggaatggcgtgaaggttttgtcagaatggtcgatggcgagcctgtgaactgattgcaaaatcaaaaggagataaagaacaatgagcaaatataataccctatgggaatatgtacagaaaaacggaagcccatcattcacgcttacttttaaagaaatacaggagattacaggcatccccatagaccactctttcttgaattacaaaaaagaactgacggactacggctatcaggtcggtaagatttccatgaaggaacagacggtcattttcaacagaatggattgataaacagggtgttcgaggtgataaatacttatggaatcaacagaagaaaaaccagctgggcaggaatggcaatggtgcctggtcgggaatatcgtcggggaacataaatacggggaaacggacgaaattccggcaacgagctgtgtggccgtatccactgccatatagatgctggggcgtcccacaaccacagaacggtcaaaccgggacaccaggtaaatgtcggcctcggtggcgtccatctggaacgcgcccacccggtccttccacctcatggtggagccatacaatggccgctcattcctctggtaattggagagccctcccctggagacactgcacttgatggacttgctgtatccatgcctgtagtaataatgttcaaagctgtaccatgaagggactacctccatcagcttcccatccggcgtcatataccgggatgccagcatgtggtcgtatgtatcccttagggacatcttctttgcgctgaaatagaacttccgtatggcccagtcaaaattccttacgtccctatcttttcctctttcccttccccctttctccatgagcaccagccttgccagatatttgtaatacagtcccagtatccgtttccttgtggtcccgttttcttctgcaatcctctttgccatggccagccgcgatttcccgtcaacgatgtaaatggaatcctccagcagcggttcaatcaacgcaagcctcttcatttccgcctctgtcatatgctttgcctgctccagggcaaccctgtacccctccggcatctctaccttctcacaggcctccaggaaagcagccgtgatattgcggcgccccaggctcgtcataggagatgacccaggccccatggtccagggcaatcagcctcttgaacaattccccattcatcctaaaaaacaacctcatcccctcctctgtctatgaccacgattttccagtcatccacgtcaagctgcttccagtacctgcgcgacagctccagcttctggatggcagatttcttaactagctgcgccactgataccacttcccgtatacccgtagtcccatccgcattctcaatccagaagtccgaagcccaggctatcccgaagcattccggacgtatccccagccttgagacctcttccataaaacccgggtccaatggcaggatgcatttatacttcaccacatgggggctggcctccagaaggtctgcatatgcttttgcgtccttgctgtgtaccaacatcaatgacttattcttttcactgtaaaactgtatatccctatactttgactccgttttatccatatatgcctcctcatgggtccatgtccctccggagcgattcttccgtcacctcgcttatctccctgttacagcagtccaccctgattttggggaaccggcgcccttccaccacctccggccggaaccgcctgttgaaagggatatagtcaatccacccctcgctgtcgaatatccggtggctgtgcaggtccagtgcctccttgtgcaaatcaaagccataccttggataatgcatctcttccctgcaccacacctccagcgcctacaagagccacgtctccccattcagcccaatgacctgttccgccagctgataccagaggtcctcccggatgtccccgatttgcgtctggacccctttgcgcaaggaacgcttcctttgcctcccaaacccgtctgattcgctcaccccggtcccgaacatgaaacggatatcctcaaagccaagggatgggatgtcaatgcctgaaagcgaattaatttgccgtctgtccatgaaaatcctcctttctgcaatttctgcaattaattcaaaccccattttcttaattaattgcaggatttgccgagtttgacacctattaattgcggaatttgccgaaaaatccatttttacatgcaaaaactgcaattaattctaatctcaaatgcaaaaactgcaattaattcacattagttgcagggtctatgttatcctgccatttaaaataggcacattctgccacaaaacggcacatatataacagacagcagcctcccggccctctgcctcctgcttttgcatccagaatttttaccctctagcactctcatatccctctccctctggccccctctttcctcccctcgccctccggccccaggcagtcccaaccgctgccaaagcctttgtttacaagggttttcagccttttgtctcctcattcttctccctatttttaacggcagaatggcccgatgccgggcaaatcggccgatggccccggggaatgtctggaacaaggggcctgggagatttcaggcacgaaaaaaggacccaaagtatggttttcacataccttaggtccttttttcctattttttgcctcaaaatgatgctattttgtggcagaatatgcctatttcagatggcaggataacaacaaattacattcccatctgcttagctacctcagcagcaaagtcctcgctcttcttctccagaccttcgccggtctcgaaacgaatgaacttctttaccttgatggatgcgccgttagccttggctacagctgcaacatactgggaaacgctctgtttgccgtcttctgcctttacataaacctggtctaacagacaggtttctttcagctctttgttgatacggccctttaccatgccctcgatgatcttatcgttggcatccggcttctcattcttagctgccgctgtaaggatttctgtctcttttgcaatataatcagcgcttacttcgtctctgctggtgaacattggctttaaggctgctgcctgcatagccacattcttagccatatccttgatgtcatcgttaacaacatctgtctctacgtctaccaggacgccaatctttccgcctgcatggatataggatgcaacaaaaccatttgcctcctcaacctgctcaaaacgacggatattcatgttctcaccgataatggcaatctgggaagcaagtgcttcctttacggacaatgtctcgtccttagcccatctctcctccatgaatgcatctaaatccttagcggaagtggtaagcgcctgtgctgcaacatctgcaacatatgtctggaacttctcgttcttggcaacaaagtcagtctcagcgttaacctctacgattacagccttcttctcatcagcagctactgctgtagctacgatgccttctgctgcaatacgtccggccttcttggctgctccggcaagtcccttttctctcaggaactctactgccttctccatatcaccgtcagtagctgcaagagctttcttgcagtccatcattccggctccggtcatctctcttaactcttttaccattgctgcggttactgctgccatttcatcttcctccaattttaaagttttaattaagcctcaacagcctctgtctcgaaagcctgggcaggaatctcgatttccattgcgccctctaaaacttcgccctgctttgcttcgataacagcatcagccatcttggaaacaatcagcttaacggctctgatggcatcatcattgccaggaattacataatccagttcttccggatcacagttagtatcaacaataccgattaacggtataccaagtgtgtgagcttcctgtacgcagatgtgctccttcttcgggtcaacgatgaagattgcatctggcagtctcttcatatccttgattccgccaaggtttctctctaacttgtcccactccttcttcagggcgattacttccttcttaggaagaacatcgaatgttccgtcctgagacatggtctcgatttctttcagtctgtcaatacggctctggatggtcttgaagttggtcagcatgccgcccagccatctctcgtttacaaagtacattccgcagcgctctgcttcagccttgatggcttcctgagcctgcttcttggtacctacgaacagaatggtgccgccgtcagcagcaatgtcagatacggccttgtaagcctcatctaccttgcctacggacttctgtaagtcaatgatatagataccgtttctctcggtatagatgtatggagccatcttagggttccatctccttgtctggtgaccgaaatgtacaccagcttccagtaactgcttcatagaaattacgctcatgttatttacctccatttggtttttagcctgctccgtcgcgtatgggagttcaggctcttccgcctgcttctgacacttcccggaagacctggcaaactgctggccaggcaccgtcccgcagaatccacagacgtgttttttgtcagcctttcaaatatatcacaaaatatggcagcttgcaagcacttttagtaagttttcctgcaaactgccatatatattgttctgactctatattacccggctatccgccaacagctttttaaccggtgccttttatctactttaaatttgagttggatgccttgattgtcttcagttcatcaaacaccacatcattcagaaccttgatataggttcccttcatgcctgaggaccgggattcaatgacaccggcgctttcaaacttacggagcgcattgacaattacagaccgggtaatgcccacgcggtcggcaattttactggctaccaggatgccttcgtttccgtccagctcctcgaatatgtggataatagcctccagttcggagaaggataacgtgctgatagctgattttacaatctgcaccttccgggtctcctctgcattctcctcattgacagaacgcatcatctccaggcctaccacagtggttccgtattcactgagtatgatatcgtcaatatcatactgggaatccgacttgtaaatgaaaagggttccaagccgctctcccgctatatcaatgggagtgatgatggcctgatacttccttacattttcctcggcaaagccaagggtggcaagatttacgttctccttggtggacaaaacgcttaaaagacgttcgttcagcatcttatccacgtaacctccgacctggtcttcgataagttcctctatctcatctaccccagaacagatgctcacccccagaaccttgcccttcttgctgattaccaggatattggataacaatatctcgctcaaaactttacagatgtcattaaaaacaactttatgagaattattgttatgcaatagcttgttgatttttcttgttttgtccaacaattgaacactcatctccgaaagcctccttatccaaattgtatatcacccaaaaatactctactaataatagaattttaacacaatttttaagcaataacaagagttttttgaagttttcgattattttaagattttgatatttttcctatttgtttttacaaatttttctatttttcactcttatccatgcggtagccacaggtctctccggcacataaaagcttatttcccttctctaccatataagaaccgcagaccgggcatttctgagtggaaggcttctgccaggacataaagtcacagtcaggactggcctcacatccatagtagagacgtcccttctttgtcttcctgcgcaccagctccttaccgcacttcggacatgggataccgattttttcaagatagggcttggtgttcttgcactccggaaatccggggcatgccagaaatttgccgtgaggaccatacttaatcaccatctggcgcccgcacaggtcgcagaccacatccgatacctcatccgcaatctttacggattccagctccttctcagccgttttaaccgcctcgtccaggtcaggatagaagttgctgacaacggtcttccaggccacagtaccgtctgccactttatccagcagagattccatgttagctgtaaagttagggtccacgatgcttgggaaggaattcttcatgatgcggtttaccacatcccccagctccgttacatagaggttcttgctctcctttaccacatatcttctggcaatgatcgtggtaatggtgggagcataggtacttggacggcctatgccctgctcctccagcgcctttaccagggacgcctccgtgtagtgtgccggaggctgggtgaaatgctggcttgggtccagctgttccaactttaggacggttcccttttccaggttgccaaggacctgatttttctcttcctcatcgtctgcctccacgtaaacggacataaagccttcaaaatccagcttggaagccgatgttgtgaacaggtggctgcccgccccaatctttacagaagtggtctcatatacggccggcgccatacggctggctgtaaaccgcttccagattaactggtaaagccggaacaggtctctttgcagtgattcttttacaatggtaggagtcaatgttatgtcagtgggacggatggcttcgtgggcatcctgtatcttaacgccctcttttttaacctggcttccctgagcaacatatttctcgccgtaatgctcctttacaaatgatctggccgctgtgtccgcctcgtctgcgattctggtggaatccgtacgcaggtaggtgataagacccagggttcccttgccttttacctctacgccttcatagagctgctgggccagacgcatggttttttgtgtggaaaagttaagtaccttggaggcttcctgctgcagggtactggttgtaaacgggatgggcgccttctttacccgctcccctctctttacttcctccacctcgtatttacatccctctaactgactcagaatctgatccagttcctccttgttgcggataactgccttaccgcccttggagtccctgttcccataatactttgccaccaaaggcttcttgttccctttcaggagaaggtctgcctccagattccagtattcctcagggataaatgcattgatttcgtcctcgcggtcgcaaatcatccgcagagcaacggactgtacacggcctgcgctcagtcctctcttgacctttgcccacaaaagcggactgatccggtaacccaccatacggtccagcattcttctggtctgctgggcatttaccaggttcatatcaagctccctaggggtcttgaaggaggcctttaccgcgttcttcgtaatttcattaaaactgatgcggtaaacatccttactcttaagttcatccagcttaagagccttcatcagatgccatgaaatggcctctccctcgcggtcagggtccgttgccagataaatcttgtctgccttcttcacttccttgcgcagcttggccagaacgtctccctttcctctgattgtaatgtacttgggctcatagtcatgttccgcatcaaatcccaactggctcttcggaagatccctgacatggcctcccgatgcatctacctcatagttggcgcccagaaacttcttgatggttttcacttttgctggtgactccacaattaccagataattcgccattgtaaaactccttactcgctgttcatttattttcacaaaatggagacacaccccggcggatgccggaggatatccaaaatcctgacacttatgtgattgttttcatgtagttctgacctgatgttctcactgcaaatccttccaattccagctccagaagggcgctcatgcagcgtcctgctgaaagtcctgtctgcaccataatctgttccagatgtctgggttcggaatctaggcaactatacaccattttttcaatcttggcaagtcccttctggtctttttcacggttaatacactttttttcgtgaaaaatgcccatatagtccagcacatcctcagggctggtcaatatccctgcgccggactgtataagctcgttacaccccgcactcaggtcatccgttatccggcccggcagcgcaaatatctccttcccctgttccagacccaggctggctgttatgagggaaccgcttttctttcgggcctccattatcagaatcacgtccgaaaggccgcttatgatacggttgcgcatagggaagttcctggccatgggttcctcatccggtccgaactcggaaaggatacctccctgaaaaggaatcgcttcatacagatcataattgctcctgggataacagatgttcacgccgcacccaaggactccatacgtcctcccctttccgttcaatgcgccctcatgtccggccccatctatgcccagggccagaccgctgacaatctgtataccggctcttgccagctcctttcccataaatccggctgcctgccttccgtactccgaacagttcctggcccctatgatggctgcggtgggacattcctcatccggcagttctcctttaacataaagtcccatgggatagtcataaatatgcagaagccgtttgggatattccctgtcaaggggcgttacgaaacggattcccttatcctgtaaacagttatactcccggaccatgccggaaaaccgttccttccaccggtcatacgtgcggcatttttcctcgctttgtaagattcccagtttctttaattccattccttctatataatacgcccgctcaaagcttcctgccatctcccatatacgccgtatggtaactgccccaaagcccggaatacgggtgagccagtacagatattctttttcatgcctcttgactaaatccatctccgggccgaaaaccgcattccggctggattcctgctccccactgttccctatccccatatcttttcctccagtcccccgtatcccaatgcttctgccagatgttccttctttatatccctgctgtcctccaggtccgcaatggtcctggcaaccttcagcgccttgtggtaccttctggcactgaagcctcctgactcatatatccgttgggcaaagtccttctcctcgggtcccaggctgcaatgcagttctacctctttcatacccatgcggctgttaaaacgtatctttgagccccaaaagcggcgttcctgacgttttctggcatgctccacccgtttccggatggatgcagagtcctcattttcaccctgggccgggttcagttccccaaaggtaaccggagacgcctctgcgcagatatcaaaccgttccagtatgggcctggatatatgccccagatatcgtctgatctggttctccgagcaattacagcggttcctgtccggatagaatccgcatggacacaggttcatggctgctaccatcatgaaatctgctggaaattcataattaccagatacccttgtcaccgtaattttccgttcttccaaaggctgtctcaatatttccacagcaaaagggctaaaatgaggcagctcatccaaaaaaagtactcctcccgaagccagagacagctctcctggcctgggagggacgcctcctcctgccagagccctggatgttatggtgtggtgtggacttctgaacggcctctcagacagtaagggacggcctgccggcaggagtccgcagatactgtagattctggatatctctatgtcctcctcacgcgtcagtccgggcaggatagttggaattcttttggcaatcatagttttaccggttccggcgctgccggtcaaaagcagtccgtgcatgccggctgccgccacctccgctgccctcctcaatatggcctgaccgttgacctccctgtaatccagaccatctttcttctgacagccgctctccggacggtaaagcggagcatggcacggttccatggaagccgtgcccttaagtatacctgccatatggcccagagattccacccccaccatatctaccccttccattaccaggccctccgccacattttctatcggcaggaaacatcttttgatacccttctccctggccatggctgccagggaaagcacaccgcttacaggtttcaccctgccgtccagccccagttctccaattaccatgctgtcctccagcgtatctgtcccaaccacctgaaacgcgcccaatatggcaaccgcaatgggaaggtcataggcagtgcctcccttgcgtatgcctgccggagacaggttgacagttatctttttagccgggagacgaaatcccgaattcttaagggctgtcctgacccgatcctgtgactcccttacctctgaagccagctgtcctgatatggaaaatcccggaagcccgtcagacacatccgcctccaccgagaccaggaccccttccacagcccatattcctccgctgttgattcgcgtaaacatccatccgcccctttcaccttgctggtaactataatacacatccataaatcagtggaactttggcacgataccgtaccggatttaaatataagacaggataggaaaaaccctatcctcttgaatgaaagatataattactatactaaagggaacataaaattacaaggggcaatctgaactgttttccataacatgtcttctggggaccatccggggaccgctgcgccttctttcccttcctacttttgaaactccgtcatataaggccggaaacgcagaggcagatgggttctctggcataccgggttacagcgttccctgatggcaatggtatcacagaacatacgccacatgtcctcgtaagtctcctcgtccgtcctctccctaagccagcggctccatccccggtcgctgttctcctgttccggttcaaggggttggtttacaagaaaccaggagcgtccggcgggatggactgctgcccttttatggttctcatcataaataacccagttttcctccggcagccggtctgcaaagtgaggtgccaaaagagtcatgatatcgttcttcggaccgatacgcgacaccagtatgcctcccggagtctctgaaaatcgcagaaactctgtcagcagatgattttcattgtaaacattccggcacaggccgaatatatcatagcaggccggaagctgaagcatgtccagtaccgacgggccgtggcggaaggcctgtatcaggaacctgtatatcttatccgcccgttcccggtcctggctcagggaggcggtgtataccttcctgtatatctcctgggagagcttggcgcacacggaacggataaccttctccgccttttccggacagatctgtacatccctgtactctgcaaaaagctccagttcctcatattctccctttacggccagccggacattctcatggccggccgggtcagaccaggcatcgtatacaccgcagagaatcccctcaagccatggctcgcacatgtaaaccgtcatatggtgcacctcctcaatcctcacaggcttcctgtcacagaagcataatggtcttcgcctgtcaccggcatctccagatgcatgtcatcaaagagtgtgagctggcggaaactgtccctgttctcaatatcccaggctttgcgcctctcatctcccacaagacaggatgtaatataatcctggtccagcctggcgccttccatcatgcgcccgttgcaggtgatgaaatatctggcccgtttcaggaccacccccattttctttacgtcctcgaaccggagtccgccctgctttctggcatttacaattctctggaccgactttactcccatgccgggaaccctgagaagctccccgtaggaagccctgttgatttccaccgggaacagctccaggtggcgcagggcccagtcgcacttgggatccagaaatacgttgaaattcggctgttcctccgacagcagctcctcagccttaaatccatagaaccggagcagccagtccgcctggtataacctgtgttcccttaacagaggcggtctggctgtcacggaaggcagacagctgtcgtcgttaaccggcacataagcggaataaaagaccctcttaaggccgtaattctcatacaatgcctgtgtgacagccatcatctggtaatcattctccggggtggcccccacaatcatctgggtactctggcccgcaggcacaaagggcgtcctggcataccgggagtcgggaaggtgcctggtttctcccccggcgctctgcacggccttctgtccatcatccagaccatcctgccccccgccggataaaccatggtttcccggcaaaagggcgcctggctgtgccagctccggacgaatcagggcagcgccgcctgcaaaaccagccctctccgttgcataaggcttcttaaattccctgtcatatcccaggagatggctggacaccgcaattccctgctgcacctgacgcatgggctttaatatcttatccctggtcttcccgggagccagattcttaagtccctcagccgtgggaagctccagattaatgctcatgcggtcagctaaaaaacccatccgctccaccagctcagagtcagcccccggtatggtcttcacatggatatatccgttaaaatgccactggttcctgagtttatgcagagtctcgtaaatcagctccatggtatgattggcgttatacagaatgcctgagctcagaaacaggccctcaatgtaattcctgcggtaaaattcaatggtaagcttacacacctcatccggcgtaaaggcagtccgcaccacatcattggaacagcggttcacacaatatttgcaatcatagatacactggttggtaaacagaatcttgagaagggagatgcatctgccgtccgctgaaaaactgtggcagattccggcctctgaagtgtttcctatgctgcctgcctttccctttctccttaccccgctggatgtacaggccacatcatacttggctgcatccgtaagtatctttaacttttcctgtacgcttaaattctcctgtatcaacatgatatcaccatccagaacgtatgtttgttctgatagtataacacagaattcggacaaacgcaatcgaaaaagaacatttgttctttttgcttgccggcgaacttttagggatgctgttttcaatgattccacaagttcaggcaattatgttaagtcccatattctcagactattattttcacacacccccatgtatgaaacctaattgtaaagaggcctgcgcccgtccccgccatatcatatggcgtgaatccggccgcaggcctcacagttatggaaaaaatcaatggaacatgattctgtccgggatttggattgtcaaggtgcaatcaaaaacacaccttttgtcccactgaaaacagccttttccattttcgcccttttcttcctttttagatattcagatttgattctttctgctttgttctctgctctttttccagatttggatcagccatatcatttgacactgttccaataaagggcaagaatagaaaccattccgcttgtttgtattggtcttttggttgaatttttcctgtaaatacgttgcttttcggctttcccttcatgttttttctttcttttttgaaagcagaaagaaaacaaaggacagcagaactataattaggaaaatcaattaagtaatcttaaatctggaatattaaaaaaaacagggtcagaaggattaatttccttctgccctgtttctatgggttcacactttttgccttttttcaactggtttttcagtcggttttcggtgggattgtgacatggatttgtctttaatccctgtatccgttgggattcatggactgccatttccaggaatctgcacacatttcctcaatccccttctcagccacccagcccagctcacgctttgccttggccgaatcagaataacaggtagccacatcaccttcccggcggggctgaatctcatattttaacgtcttgccgcaggctttctcatatgcgtggagcacatccagcacactgtagcccactccggttcccaggttatagatgctgacgccctctttgtcctgcagcttctgcactgcctttacatggccctttgccaggtccaccacatggatgtaatccctgaccccggtaccgtccggcgtgtcataatcatcgccgaatacattcagatggtccagtttgcccactgccacctgggcaatatagggaaccagattgttggggattcccttgggatcctctccaatcagaccgctctcatgggcaccgatggggttgaagtagcgcagcagcaccacgttccactccggatccgctgtatgtaagtctgtcagtatctgctccagcatgcccttggtccgtccgtaaggattggtaatctctcccttggggcagttttcagtgatggggatttctgccggatctccatacacggtagcggaagaactgaatacaatatttttgaccccatggctgcgcatctcatcgcagagaatcagggtgcctgtgatattgttgtgataatactccagaggcttgcgcacggattcccccactgccttaagacctgcaaaatggatgaccgaatcaatatcctccttgtcaaacacttccttaagggccggctggtccagaaggtctgcctcgtagaattttaccttcctgcctgttatcttctccactctctccagtgccttctcgctggaattataaaggttgtctacaacaaccacatcataacccgctgtcagcagttccacacaggtatggcttccgatatagccggcgccaccagtcactaaaatagccatggtatctcctccttacgaacaattgattgctgcaaaaaggcggaacaggttaagctgtctgaccgttccgcctgttatgactagtataaagggaaagctgtcataaaacaatgcacaattcttctatctttttacaatattttttgaatgacaccccttaaccgtgttttgcaaactctgtccgtatcttctcaattgcctttttctcaatccggctcacataagaacgggagatgcccagcttgccggcaatctcccgctgggtatgctccttcccgcggtacagcccgtatcgcatccccagaaccgtcttctctgtctctgtcagacaggactcaaaggcttcataaagctcctttacgtcctgttttaaaatcatggtatccagcgtctctttattgtccatctctatcacatccaccagactgacggtttccccgtccttgtctactccgatgggctcaaaaagggacacttccttggaatacttcctgctggctcgcagaagcatcagtatctcattttccacgcatctggctgcataggtggccagtcgtgagcctttatctacgttaaatgtattcactgccttaataaggcctatggttcccacggacagcaggtcctccatgtcgtaatcagagccctgatacttttttaccacatgggccaccagacgcatattatgctcaatcagcatatctctggcagactggtcgccctctttgcagcgttccagatactctttttcctctcctgctgataatggttttggaaaagtcttcaaagaaagccaccctgcatattcttaatcttattctatgcgggggcagcttgccaagtgcttttacaagtttttattggcttatactattttccgaatctatgacaaacagctctttaaacttcttccggtccaggctgtggttgtacacaagtgcctcataatccagtaccgtgtcctgatagggacagcgctccgactctgccttggcccagtagtaataggttccctccctgtcatagcagcccagagggtggaccaccggaatttcctccctcatggcaagcaggaaccggttatagggtgtcatctcaagattggccctccacaagacctcagaggacaggtagacagcaccgagacgccccatattcccggagggcatgctgtaattcgtccatataataaatggggtctcgtaccacatgagatgttcctgcgccggaacttcagaactgggcatgccggctatgtcatcgtaaaattcatcctccacgctgggctggtgatccccgaacatgacaatcatggtgggctggtctgtcaggctgaaatactccaccagatactggaaagcctggtccgaacgcttcatgagggacaggtactggtccgtctttggatattttccctcatattcgccggtaagccatacttcctgttcaaaattgtcgtaggtcccctcatatccgccgtggttctgcatggttacattgaagataaacagcttatcctcaggattttccttggcctccaccacctggatcagcttctggtaatccgcctcatcgcttacatagttgcgcagctcttcactgccctcgtaaaattcctggtccaggaacgcgtcaaatcccatattctgatagcactccacccggttccagttttctccgggataagggtgcattgccacgctgtaatacccctggtcctttaaggtgctgaccatggaataggtccccggctttacattgaactggtaggcaatggaattggcaggcagcagggccatggagtccccggtgagaaactcaaactctgtattgcttgtcatggaaccgaacacgggcacgcaaaggctgcccctgaccgtgttttcctcaaggctgtccataaaggggaaatattctgtattggtggtaaaatcacctgccgtcttaagctctgccaggctctcgttcataatacatattaaattgaccggtgttacaggctgcccgtcctccagcgggttctccgggttttccggataggcccggcttttttccggataagcctgaccagttcctgcttccgcatatatattctcctccaggcggctatatatctcctttagtctggcgttactgtacccctgaggcggcttctttaccacatactgcagggagacagcggtggacagcacatagccgtattcctggtatgtcccgttgatggcccacatattgatgcccagcccccaggaagggaccagaacggcaaagaaccatgccccataggccgctatggaggcagttatgccgcctcccactgccagacggagcttccaacctttaacccggcgcggtataaaccacaggaacacgttcataagcagaagcaggacaaaggctgctttcatctgacgggtaatgaaaaattcatagttgccggatacggtcatggctgtcctgaatgccatcacatcccacagcatgatgggtcgtccgcggaaggccaccacaaaggtctccgccagggaaatgacatataggatgcaggaagcagcgggcacagcgattctggtcctccccgtgacagcaaacaaagccagatacagcacataaatccagcctatgttcaaagcagccatataataaggaaccgtgtccagattccccgtgacatactcaaacataaagtatgacgccactggggccattagcagacacacggttcccactgtataccatatatattttataatctttatcttattttcttttgtcaccattgtcgcctttttgttagaattttgttaataaaatttaataaacttatcctaacataaaggatttaatgattcaagagtcaaatgcttccatgaatgacatttcacagacatttcacagaaccttcacatttttccagcccgcttctcagccggagggaaaaatcctctccctgccccaacgctcttatccttaatattcattcatgatataattgacctttggaacaattatatgggtctggacctgcgtaatgcgggttccttctatcagggaaacatttagtacgtaataggaatcctcatggtaaaacagccggaatgtgaatacctttccctgtatttctttaaaccagatctggaccgggtggccccaggcctcctccgccgtttcatcatattccagtcctatgatgcccctgccggtaaactggtatatgcctgcatatatatggttgtaactcttttcttttgaaatatactcgtccttccggtcattattaaaatcaattttataaaaggtttcataaggtgaaacaactgagccaagccttaaaaactgattcagctcaatctccggatcttcatcacccgtatagacatcttcatcgtttgaacggtatgacaggtccgccaaatctgtttttatttcttccagataaccggtgacatcccctgcgtaagcagcgcggttatcatatattttctgccacataaatgattcaggcaccgcctcaataacggcatcttgtccgccttccggtatcaggcggtgtatcattatattgtccagataacggggacgctcaccccccggaaacggccgctccacaatatacagtccgccggaatgacagattatttttccgcccagatactcaggctgataggtgcttacataagccagaccgcccgcagtcccgcggtaaatatgcagatctcctatttttcctgtgacgctgtactgcagcaggagaaagtaatccgtacggccaagggaaatctggcagacatactgggtgccgccgttaagcgtacgcctggcctgactcaggtatgttccatatttacgttcaaaatccccctggtctgtctggtacatttccattcccagcccgcgctccagacgatccaaagccttgtccgccagtaaaccggccagaatttccgtgaaatcatcgggtatgtccgcacaattattttgaatggcagcagaagaaccctgtacttttaacaaaaacacttctgccacatccggcaggttatagggaaatgcgctgtccctggccggatcctggtatgtaagcggtttatatatggagacatccgtgcccacaccaaactctgtcacccggatatcatccggctccaatacagccatgtaatccattaaaatcgtggtttggccatcctcctgtattctggcgtccaccagatacctctgcccggactgaatctcctggtacagtgtaaaagccgccgcctttccattcaaatgtttaaaccacatatcaaccagcctgtaatgattgtccctccatgcctccactgcggccggacactgcttaaaatccttatcgtaccatttgatactgtgttcaaacggctgcctgtatcccggaggtgtttttgtaaatatctcatctttgccgtcattgtttatatccatgatatacatatggctccagtttatagcatcggcatcctccgcatcctcccaataagccgtatcatcatacaaaaaaggccgctcatcgttccgatactcccattcatccccataaaatgtatttttcgccctgtttgcatagataacgtcatatatgacatcatcgagataatcctgaacaatatgggtatcaggatactgctcattgcggtacagaaggtgtggttcggaaatacggaaggtccggttgaagcatatgctgtctgtaatgttggccagatgaaagatagtccggtcaagcatgtatatctgcaaattgacggttcctgtggaatcatcaaagcagcttgccccataataaaaggcagactcatattggaataacgtaaaaaaccggacatcgtccatatactggctgttgaaaaaaacatacccattctctccctcaaccatcatatggacataggatatggttccccttccgtctttttcaaaggctatcagctcatcggtcccgtcgccgtccgtatcacagcggtaacatgaatattccgcctcattttcgttgaaatcagttatagccatttcatttgtcatttcatccgtcatgtctaacagagacaggaattcatggtttgcaatccgaaaatcctgttggttcagtccatccagatattctatacaggcatccgcatcctcctggttcattctgtatttcaaatcgctgactaattccaccggaaaaccgtaacaatcatctgccggctctaaatcccccggcagcccggggaaacatgtattatcttcaaccagcattgacaagccgctgtctgtcagtgggggcacagacaattccggctgctctttcaccggctgtccggctgctgcgtccgctccggctgctgcgtccggtccgtcagccgccccaaaacaggcagtcagcaaaagagagagaatgcttacacttatgatcagtctataccccatggatacctcctggtattacctccaacgaatcctcagcacttccccgtcatatacgtatacggaatttccctgagacaatccgcctgtaaaatatcacggtcagcagagtcgccgcaatccatccaaagggccaggccatccagatacccgtgcttccgaaacgtcctgtaaggatatttgccacgataatgcgcagaatcaaatccggcacagtggccagcacaaaataggtcatggctccggagccccggataatgccatctgtcatgagcttaatggaaatcataaaatacatgggacttacgatgcgcagaaactccatgccggactctatggcccgggtgcttcccgcccccaggaacagtcccatcatctggcggctgaacacaaaatacagcaggaagaacgggatcgtggcataaaaggacagcctgacgccggtcttaaagcccagggggatcctctctctctttcccgctcccaggttctgggccgtatagctggacagacagcctcccagtgacatgaatgcgttgatggcaaaggtattaagcttgacggccccggaatagcctgctatgacagcggagccgtaccggttcacgatttcctggacaaacatatttcccactgacagcacgctctgctgcatgatgctgggcactgcgatggctgctatctgccccagcaaaacagcgctgaacagcacggtcctccggtcggttttaagggcgcccaaacgcctggccagagtccccagagccaggatggcggaaaccccctgggcaataaaagtagcccatgccactcccgccactcccaggcccagccaggccacgaaccagtaatccagcgcgatatttcccagggacgaaccgatgagaaaatacaggggagtcctggaatcccccagggccgtgaatatgcctgtacatacattgtagagaaacaggaaggtcagcccgtagacatagattttaaggtacagctccccgtccgcgaatatgttgtccggggtatggattaaacgcatcatatccccgcagaaggcatatcccagcacggtcagaatcaggctcatggcgccgcaggcaatgaacgccgtgtagacagcggtcttcatcctgcctatgtcctttgccccaaagagcctggacaccaccacggaagcccccaggttgcttcccaccgcaaaggccatgaatatcaccgtgatgggataggaggccccaacggctgccagcgcatcctcacctgcaaaccggcccgcgatgctgctgtccgcgatattgtaaaactgctggaacatgacgcttataaacatgggcagcgcaaaccgccacagtgtctttttcggatgctccgccgtcaaatctgtaatcatgataccttttttcctcccaatggcaatttatgtaccattatacccttggtctgccataagggcaaccggaaatatagaggaaacgcaaatctgaaacgcaaagcacatatgaacggaccgcggagaaaagcactgacaaaatactgcaaatcagcaaaaaaaagcgcccggggctttcccttttacaggatttgccccaggcgcagtcttttcacatgataaatccattagtggtggaagagacggattcccgtaaatgccatcaccattccatactggttgcatgtctcgataacctggtcatcgcggacagaaccgccgggctgcgccacgtatttcacgccgctcttgctggccctgtcaatattgtccccaaaggggaagaaggcgtcggatcccagggccacgtctgtcatggtgtccagccaggcccttttttcctcagcggtgaatacaggaggctttaccttgaaggtcttttcccatcttccgtcagccagcacatccatgtaatcatctcccatatacacatcaatggcattgtccctgtctgccctcttgatgctgtccacaaaaggaaggttcattacctggggagcctggcgcagataccagttgtccgccttgctgcctgccagacgcgtacagtgcaccctggactgctgtcccgcgccgatgccgatggcctgtccgccttttacatagcatacggagttggactgtgtgtatttcagggtgatgagggaaatcatcaggtcaatcttggcagaatccggaagctccctgttctccgtgacaatatcctccaaaaggtccctgttgatctccaggttgttatgtccctgctcaaaggtgatgccgaatacctgcttgcgctccagggcctcaggctcatagtccggatcaatctggatgacattgtaattaccgtttttcttggactttaggatttccagggcttccggctcatatcccggagcgatgacgccgtcagacacctcgcgttttatgattctggccgtgtccgcgtcgcacacatcagacagcgaaataaagtccccgaaggaggacatgcggtctgctccccttgcccttgcatatgcgctggctaacggtgagagttcacccatatcatccacccagtaaatcttcctcaatgtctcgtcaagaggcaggcccactgccgccccggcaggtgaaacatgcttgaaagatgcggcggccggaagccctgtggctgccctcagctcttttaccagctgccagccgtttaacgcgtccatgaaattgatgtagcccggtctgccgctcagtactgtgatgggaagctccctgtccccttccatgaagattctggaaggcttctggtttgggttgcagccgtatttaagtgccagttctttcataatcatacctctctccttatttatttttatttacgattctcgtctcatatgtgccggcggcaatatcaataaaacgcacgaacagggacaccttgttatcctcgttaaggctgttccagaccaaatccgtaaaggcgtcaatgtccccgcttatccccaccttcttaggctctccctcaaagctgggcagaggattgccgtcatgcatgtaggtgtggataaaacgtccctcacccgctgccggcgactggtacgcataggtaaaacgcaggcaggaatccggatttccattgtcgctctttaaaatggacatggcataattataattgccgttttcaatgtgcatgatgccggagatccgcggtgtgtaattaggcgcatccggctcgaattccctgcatcgcaaggactgctcaaaggtcatctggtggtccattccgtcgtagatggtgtcggtctggtccccgttggtcacaatggtcttgtttccaagaacccgcacaggggcatagataatcaggcttgggtcctccagcttggcagggtcaaatgcctgggtgcggattccttccccatcctccgcaaacacgcggttgcggctgttggcgcttctgcccatgataaaataggcggttactgcctttgttccgtcttctgatcgcccgatgacgattccccgtccgggataagcattgcttttcagctcctgttccagtgacatctgattcatactgattcctccattcggcttaataggtttctgaaacttaaaagagccggctcccggacacgcaaaaaaatatgcgtgcccaggcggtcggctcaaaatagttcatggtactgcgtgctccctgtggttgctccactatccgccagtcacacgccctaccattaatatatatctttttttctaatattgcaacccttttttagaagttttactaatcaagagagtggaagaaaccagtctttcgcacctcctgtttcccctattcattccggatggctgccaggggactcagcttcatggcacgcatagccggcataaatccggctgccatgcccacaaagatggcaaagaccacggctgccacggaaagccagggcggtattctggacaggttgcctgtcagtccgttcatttcctccaggttaacaaaccggttgataaccaccgagataccgtaactgagcaaaattcccacaatgcctcccatgaagccgataaagccggattcaatgaggaacatgttgcggatatttcccatatcacagcccagcaccttcataacgccgatttcctttgtcctctcataaatggacatcatcatggtgttggcaatgccgatggctgccacgaacagcgaaaccgctccgatgccgccgagaacagcctgtatcatgctggactgctgtttcgtactctccatccagtccgcctggctgctgacctggaatcccatgtccgctatctgcttttgaacctccgggacatattccatatcgtccacaaatatctgtgccctgttataggtcagatagttaaggggctttccttttttgttggtgggctgtcccggtatcacggctccctttttaaacaccttgcgcagctgggctttcagtccgtcgatgtctgtatacacgttataggaataggaattccagtcatccggaccgccttccaccatgccggttgcattcatcatgtactttttcggcggtttcacaggagtctgtccgtcctctgacgaactgacggaaccatttctggtctggaaataagcgtccacatcaaaaatgacaaagaggggcttattcataaagtccacttccggcagctcgcccgtgtcccagtatccccggcctgtcttggaattataaaaattctgctggaccgtgttgcccaccaccatgcccatctctcccggctccggcagcctgccttcccccaggggaatctgctccagaaacgactggcttacgcccataagggacagatactgggcctcgtaggctccctggcgcataaccacattgatttccaggacaggggataccccggacacatggggcaggcggccaaactgttctatgacatcgtctgtgatgtaggtgggatccgaggatttgctgctcccgcccccaccaatcatcaccgcgttcccataggaggaaccggaatacacgttgatggtggtcaggctaccccaggaggaaatctgttccataaacatctggtccagtccgattcccagggacaccatgaccacaatggacgctgtgccgatgataactcccagcacagtcagaaccgttctcagcttcctgcgtcttaagttgttaatgctcatgattacgagatcaggaaatctcatcgtccacatcctcttcccttgctgccttgcgtttcttcctgattcggatgacaaccgcagctgcaataccggcggctgttgccgcaccggcaatcaccaggaacttgtatttgccccagaaggatggggctgcctccgcctccatgctgcctgcgtccatggccgctcccatatcatcccagttctgttccatctcctccataaccatgagggtcagttccttttccacgggttctgcgggaacaccgttttcatcctcgtaatcaatgcggatgcgtaccgttccctcgtccagggtgggagccacacctgtcagcatggtatccacgttgcctgtttcacccggcttgatgtttcccacataggcgtccgtggtcttgatggagtccgcctcaaaggtcacggtcacgttgtaaaggatgacctttcccgtgttgttgatgccaaacatgacattggactcagatcccacggttaagctgtccggcataacgtcaatggtgctggtgcttaaccgggcatactgttttacagggatgtccactacaatgctttcctctgcgttcttgaattcagggctgtcgtacttctccttcaccgtgatggcgtaggagcgctggtccactcctgccctggctgtaaacctggccctgacctcggtggtctgtccgggagccatattgtccaccaccagggaggaggtgcctgactccgtggtaaacacggcgctgtccgataccttctccgactccaggttaaagagaatgttgctggcagcaaccgaggtggatgcattcttcatattaagaatcagctcaaactcgtcccctgcgtagatttcctccggaaccgtgtggtagctctccacaatcaatctggccctggtcctgtcgttggcgttaaaatcccccaggtcgtcctctttatccttggacgtgatatgtacgtaaaaagttccctcctccgtgtgcagatccccctcagagcttaagcggaaggtgatggtgtatttgattggataataacctgtataggaatccttgcggattgccatgctgtagggagcggacacggtttctcccggctgcacgcgctcaaaggtgcggtcatagttgccatcgttgatttcaaaggggaacttggcatcgtcctctgagagctgcatgctgaccgtcacatcctgggccgtggtctccctcttattgcggaagttcacggtgtagtccatgacattgggataaacgccccggggtgtgggctggttctctcccaccacaaagtaattgccttcctttttatcctcctcctcgtctgctcctgatgtggatgaggtggaaatccatacattaatatagtctgtgtcagaaccgccgtcccattcaagcagtacagggatgctgtagtatccctgaagggcatcgcgccgcaccctggccgacagggacacgctctttacattgcccttcttgatggttcccacgttcttggccacaaaggtggtctccataatttcaaagggatagtagtcaacggagtaatccccgtttccccgctcctctatctgctggaactcattggtttccaggagactgatgcgcaggttctccatatcctcatccgtggccctgatacggaagggaatggacatggattttcctatggtccctttgggtgattttgtagtaaaaacataatcattttcactggcattggtgttgtagcccagtttataatcgctggccgctgcgctggaaggatacatcccggccagcattgaggctgccaggaacgccgtcaggcccctgcaccatttatttgctctcattctcattgcactccttttcctctgcattcccctcatataatgcttccctgccgcctgtctcgattcccacaatcctgccgtccatgattcggattctccggtccgcataggaggccagattgttgtcatgggtaaccatgaccagagtctggtcctgctccctgacaatcttctgcatcaggcgcagcacctccatggtggtcttggaatccaggtttcccgtgggctcatcggcaaatataatctgaggattgaccaccagggccctggctattcccacacgctgctgctgtccgccggacatctggttgggcatatgcctggcctgtcctcccacgcctaccaggtccatgtatttcctggcttccttaagcctctgcctcctggaaacaccccgaaaggaaaggggcagggctacattctccagagcattcatggtgtttaacaggttgtatgcctggaagatgaatcccaccttttcgcggcggaagctcaccagctggcgctccgtcatcttctctatatggactctgccaatctcaatctctcccttggtaggcttctccaacccggccagcatgttgagaagggtggatttgccggaaccggaggctcctacaatggcaacgaattctcccttatatatatcaaaatccagcccgtccagggcccggaccttgatatcgcctacccggtatatcttatataaattctttacccgtatgaccacgggcctgttttcttttgctgtagggaccgacgacacggccagttgttcctctgccaaatccagcctcctttccagggcgtaaaagcgctccaatccagataacagcccgtatggacagactgtactgattttgttcagtatagcacagagaacgcgatttgttcttctgtttttctttaatcttcctttaataattccttacaccctatccgttttcagtagcaaatgtaacacgaaaacaggtaattgtaaagcaaatcaggacagagcacagcaaaagaccgggcatcgctgatgttcagcgggggcccggtcttggggtttattgaattttcacagtatggctcaggagtaccgttcataggacagcagatagccgtttttcttcagccatttcatatccagcctgaagggaagtccgggaatgtccggcaggtaaaatttcccgtccctgcgctgcacggtcacttccatgcagtccagtaccggctggttgcacacctccaggaattcctccatggcctcatcccctgccgtggcaatgagcggacaggcaagaaggggcaggccgcccgaggaaaaacgtatgccgctgcggaccgccatatcccgcacctgcatccactcccatactcctgcaaaggaggatgggaccggctggaaatggcggatgcctgcgtccaggtaaggtgtgaacatatagtggttgcgcaccgactcgccggcagccacgggaacgggacagctctctgtcaattctccatagcctcgaaagtcaaatccgtgaatcggttcctcaaaccatgcgatattatatttctgtaccttatccgcaaatctgagggcctcccggaccgtaaatgaatggttgccgtcaatagccagctctgcatccggtccaatggtctctctcaccagcctgacacgctccacatcgtaatccagctttgtggcaaaatccgtacccaccttcatcttcacagtcttatgcccgcagtccataaaatgttccatttccccggccagatccgctccgcttaagtgtgtgctccctccgcttccatatacggtgacgctgtcctttaaagctcccaggaaccggtggaagggcatatctgcacgctttgccaggatatcggtgagaaggtactcaagctttcccacctcccctgccgtctctccgtcaaagccggaattacggcatgaccagtataccttgtgcatccactgtccaaaactctttttctccccggtcataataaggggcagaatggtcctttccatgatggacgagcagggacacacgcccttgatgccgtcctcggtatagagctccacatatttgcttatcttggaatgggtaaacggaccgccggttgcgtcgtaaaacggctctttctggggtaccggcgcaagattgatgatgaatgcatctgtgaatttaagtaattcgccatcgtgcttcattttcgtctattcccatccttttggaagatatttaagcgtattttttatcatgtcatccaccagaagcctgatatcctcttcccggcagttctttccctttacaagaggatcgttcataaatgcttttaccaccttttccttatccggcttaagagctgcttccataatcagctcatggttttccagatggggcatcagaagttcctttaccttttccggcacagctcccgccaccaccggatagatgtggtccttttcaaaaaccgcgttggtctccaccagcgcgcctgcaggcaggttggttatctggcaggccgtattagggatatttacattgctgacaacccttgtaaggccgcagagcgctttgattaaaaggattccctcctcgccggtaggttccagtttgacttcttcctgtccggaagccagcctgcggctcctatccagtctctccttcaggtcattctttctccactgtaccgtggtcagaccgaatttccaggatgcaactgtctccgggtcattcaggtactcatttccgggcatgaattcagccagatgcctgtcccctgctgccgcaatcaggccgtatcgcttaaacagatccatcttgacccggttggcacacttaaaggaggaattcatccagttttcgccttccacttcatatccctggtcaaaatgtgcgtcaatatagtcccggtaaacagggaacaagtcaatccccttataggaagcacttgaaaaccatgtgaaatgattgatacccagcacattgacatggatgtcatgccagtcaatatcctgttccccgcagctctcctcacagattcccttaaggaccttctgagttccaaagacctcatggcagcacccgaatgccttgatttccggaaatacatgatacagggtctttacgcacagcgacatggggttggtataattaatgacccaggccttcggcgcatattcttttatggccccggcaatctccacaaacatgggtatggtgcgcagggcacggaccattccgcccggccctgccgtatcgcctacagactggtagattcccaggcgctccggaaggtgaacatcagactccatctcgtcaaaggtgccgggcaggatggaaatgacaacgaaatcgcagcctgtcagggcgtccttaagactggcgctggtctcaaacttccagtctcctttggcgtcgtcccgctgcataagccggctgccgattacctcattgttctttgccgcgtcaccgtcaatatcatacagacgtatggtaccgctgatctggtcctccagggcaaggtctgtcataaaggtccaggcccatcccctggaaccgccgcctatatatgcaatctgaatatccttaactttattatcactatacttcatagcttcctccttaatatgtttacttgaaatatacatgctctgcattcctgtacatgatttgttccttttcttcccgggaaaatgcatcgctgcatgtgatgtactgaataaagtgctggtagctgtcctctttcagcaccgagggtatatccgttccgaaaatgagtctgtccgcccctgctatctcaattccatgcctcagatacctcaccgcattgggataggggtaggcgtcagggccgcagttatggggcagagcagccaaatcaaaccacacattgggcagggccagcttctttaatccttccacaagcttatcctcgtccctcatggacacggccagcagatggcagaccacaaacttcatgccgggatgctcttttatcacattcaaaagccggtccgtctgccagctctcactgccgcatttacctatatcaatgacaaacaccagaccatgctcatccgcataatcatattcagccttcatgatatccccgtccaggggcagcgtaaagtggttggccatgagcccggagccggtacttacctcaaacttcacaattggaaaacccagctcttcaaacagatgttttcgtatctgttccttgcccctgcaaaaagggtcgtaggaagccgcggcacaaaaccggtccggatattttttcactgcctccatggaatagagattttggaaaccaaagtaatttccctggagcagcactgctttctccactccgttttcatccattttcctgagaatgtccccggcagtcaccactccctggctgaactcatccggaagcatccggaaacgctcccctgatgcatattctgccatgccgtttccggcaaagcgcagctctcctcctgcccctgttcccgcgatacactgtaccagatggacatgtccgtctattatcttcatttcatgttccattttcatcatcctttcagaccggaggtgctgatgccctcaaccagatatttctggaaaaacaggaatataaggatggacggcagtatggacaaggttgccatggcgaacatggctccgtaatccgatgacgagcccgggtcgcaaaaaagcttaagcgcaaggctgacagggtacatgctggacttgctgacatacagcagggctgagaggaaatcatcccatctccacatgaaggagaatatgcaggccgtgaccagtgccggctttataagaggcagcatgatgcgggtaaaaatacctgcataggaacatccgtcaatcttggccgcttcatccaattccgtaggaataccgctgataaagttggaaatcaggtacacaaaaaatccctgtatggcaaagaaatatggaacagtcaacggcatataggagcccacccagcccagcttctgataccacagatactgggggatcatgagtacctgggcgggaagcatcatggagagcagcatggcagcaaacaggatgctcttgcccctgaatttgaatctggcaaatccgtaggccaccagggcggaggaggccacggttcccagggtggccaccactgagatgaagatggagtttttgaagaaggtggcaaaggaaatctttccaaagcccttccatcccgtggaataattgctgactataaatttctccggaatcaggctgcccgctgtggagaatatggtgctgttctccttaaaagagctcatgaccatccatataaggggataaatcatgatgatgccgatgacgaaaacaatgatatggtatactgcttttttaaccactcgcttctctttcatgattaaagccctccttcatatacccagaaccgtttcgttgcaaacaggaacagggttatcagaccaatcacagccagcatgacccatgcaagggccgcaccatatcctgtgttgtagaattcaaaggactgcttatacatgtaaacagtatagagcagggttgaattcatgggttttccctgggtgatgatataacactgggtaaaggccaggaagccgttaatcatctgcatgaccaggttgaaaaatatggtgggggtcagcaggggcagggtaatcttaaagaattttgccggtgcgctggcgccgtccacctccgccgcctcgtacagggactgcggaacctgttttaaggatgagaggaagataagcatggatgaaccaaactgccagactaccagcaatatgaggacccatatagctgttctggtatctcccagccacgaaaagctggtctggattcccaccattcccaaaagcttattcaccacgccgtccatggcaaacatcctcttccataagatggatactgccacggaacctccgataatggagggaagataataggctgccctgtagaaaccggacattttggaattttccagcaagagcatggccacaatcaaagcaaacagaagtttgagcggaacagacacaaatgcaaagaaaaaagttaccttcagtgttttaaaaaacgtttcatcctggaacatggaaataaaattcttaagtcctgtaaaaacaggcggtgaaagaatgtcataatcacagaacgaataatacaatgaaattcccattggaacaatcatgaacagcaggaatccaatggtaaatggcagtgtaaacaggacaccggccacactttccttgctgagctgctgctttaatgccttcatagcctctcctcctcgccttatgaaaagagcgacctacaacagccgctcttttttaatttgctaatttttcttggactccataatctttgagccttctgtaaacagctgctggccggcatcctcagccgtcatctggccgtaacatacctgttcctccagcttgttcagaagatcgtttacctcacttgaaccgtcggcagcaggcgggttgatctgggaagaattatcagatacaacttcgttgatgaacttaatcacttcctggctggtctcatccatcttaggcgcaatggaatctgccactgttgatgacagaggaatgcctctttctcccagaaggatttcattacattccactgagtttgtgatgaaattcaggacctttgccgcctcttccggatttgtgctgtcctttgtgatggcgaaaaactggcttggcttcagataatcggacttgacagggtctgctgaaggccaggtggttatggcaatctccacaccctcaggtgcggcgcttctgatggctgtgagctggttggtatagttaaacgcacaccatgacatggtttcaggattggaaccatacaccattgggtcctgctccacggatccgatggtcctctctgcaaagatggaaggatccacaacccatccgtcccttatgccatcctcatagagtttaaaataggatacataatcctctgctgttccgcccagttttccgtcctcgaacatgactacatcattggcgcgcaggaaatactcgatgaaattctcaccattgttataagcaatgttggtcttatatcctgtcttttccctgatttccttgcagagtgtaatgaactcgtccatggtcatattgtcttttaccgtgatgcctgcctcatccagggctgtcttgttgtacagcagcgcaggtgcattgatgccgttgcagattgcataaagtccgtcccctaccttaccggagttcagtacatcttcattacagtctgccacgtcgatggttccgttttcaatataaggcgtcaagtccaccagcaaatcattgtttacatactgctggatatacttgtaatccatctggacgatatccggcatggaatgaccggcagcggccgtagccagcttgttccagtaatctgcccactctgaaaactgtccgtcaaaggtaactccgggattctgttcagaatacagctctaagatagcctgtgtacgctcatttctcacctgattgccccaccaggcaaccaccatctccgaaccatccccggatgcagccttttccccggatgctccttccgcctgtgaaccggccgcctttgtatctgcggtgccggaaccgccgcatgctgtcaggcttgccgccgccagggcagctgtaagcacaagtgctaatttctttttcatgattgaaaacctccctcgttctttagttgcttttgatgaattgattatacctgctttttcttgtcaaaccaatcaataaaaccgatgtccatggttaattttccgactttttcatacagtttatgcggatgcaacttttccttgtcctgttgaaagatatggtatatattaatctaagacaggaaatttccactgaaaacaggagaaacttatgagatacctgaaacggataaaacatgattttgaaaatctctccatgaaaaacaaactgctggccgttgtattgtctaatgtggtgctgattcttctcatagcgctcatagggctgcgcatttcttccaatgcatataatgaacagctctacaaggccattgccggaaatctgtccttttcctcccagaccatttccagcaacttaaaaagcattgagaccctttcctccgtcattatctcctcctcagtgattcaggattccctaaaccgcattgacagtacggatgatcccattatatggtccgaaaacaacccgcggatcagcgcagccatcaacaattaccagcaggcctacaaaaataacggtgtatctgctattgcgctgaataaccgtcatttccaaaacctgactaatttcgtggtcatcaacaatgcggacacggacacggtacagagcgcagtggacaaggccagggagcgggaaggagccattacctggaccattgactatgatcacagtttgtatatactcagcagaagcgtcaggaaggtctacaacctggagctggaccatctgggcgacctgctggtttttgtggatttggaccggattgtaagggatgccaaccgtgcagtaactacctacggtgaatccagctatattctttttgacggggaccagcttatatacacctctgccgggattgacccggaaaccgccaacggattcatgaaacagacgggccagccctacagcatcatacaccagaacggacacagctattttgcagttaagaacaccattccctactacaactggacctacatcaacctggtcccctatgaccagattgcccaatccacagacatggcctaccgccttattctggccatgctcattgtgggctttatcgctgccctggcattttccaggcgcctgacccgctacattttaaaggactttgaccttttaatacagaagatggagtttttcagcagcacggagcttaaaatgcccgaggtagaggtggactacagtgaaaggacggatgaaatcagcaggctgcaccagcatttcgatactatggccggccgtatccagtacctggtccagaacaattatgtgaatcagattttaagccgcgacgcaaagcttaaggcgctggaatcccaaattaacccgcattttttatacaataccctggaaaccataaactggcgggccaaagcattaaaggaccagcagatttcctccatggtggaatcccttggaaccctgcttcgcgccaccctcagcaacaaaaagccgcttgtttccctggattatgagatcggcctggcgggaagctacatgaccattcagaaaatacgctttgaggaccggcttcttttccatgtggagtgccctgaagaactgggcaaagcacttatccttcccctcactatccagccccttctggaaaatgccatacgctacggtatggaggaaatgatggatacctgcgaaatcagcatacggaccagaaaggaaggcacgctgctgattgtggaggtgtcaaatgaaggctctgtatttgaggacagccttcttgaaaagcttcaggacggtaccaagaatgcccacggctttggcatcggcctggtcaatatccaccagcgcatccagatgctttttggggaatcctacggactgtcctttaagaaccaggatgagaaagccattgcaatcatcactataccatacaaaacagaggaagatgactatgcttaaattaatcattgcggacgatgaacgcattatccgcgaaaccatatccaccatcatcaattggaaggaatacgacatcgaggtggtcggcctgtgcaaaaacggaatggaaacatatgacatgataatggacgagacgccggatatcgtactgactgacatacggatgcctggtatggacgggctggaactgatccgcaggatttccggcacggacctgaatgtacagttcatcatcctctcaggctacggggaatttgagtatgccaaggaggctatgaaaaacggggttaaatactaccttctcaagccctgcaatgaactgcagatcattgactgtattgagcagtgcaagaaggactgctaccagcagaaaatcatggaacggattgtgtccgaccgcttcatggcaatcaacagcatgaaccacaacgttattttcagcatcatcaatgacagcatatgccagaaccggggctttccggacatcatccgttcctatgagtcctatatcgactttaaattcacggtctacaggctgtactatgtgtattttctgccctttgaacacctggaggagtttctggatgatttgagactgtactgcagcgaaaatatttcctctgtcatcatacacggcgtctacgtcaataacaccctgcttctgttctttaaagactttgccgcaaactaccaggacctggagcgttttatctgccaaaggcactatccgggccaggccgtgaccctggaaaccgaatccaccctgtactccaatctggagcagcttctggtggtggttctcaaaaaaatcaggcgttttggtatgatttattatatcaataattttcatctgctctacacctgcaattacaacacccacatcaatgaattggagcagctgtgccagtccatcctgaaccggcagccggattccatgcagaagctgaccgatctcataaaggatataaatgatattacctttttaaagcagattgccagcaacctgttcatgaagctcaccctgaacagtccttccctctcttccacctggctgaccgaactcctggtccggatagaaaatgaacagagcataacggacttaaaaaaccttgccattgaacgggtggaggacatcctgagagagcctgacagcgggcaggccgtcagcaccatgacacagcagatatttgactatgtaagccagaacctgcaggatgacaacctgacccttaaattcattgccaaaaactatctcttcatgaatgtggactatgtcagcaaaaaattcctgaaggaaacaggcaccaaattctccacctacctggcggacatgcggattaaaaccgccaagcagctgctggcctcaaagggtctggacaagatacaggacgtggcccaggaggtgggacttggaaacaacccccagtatttctcccagctgttcaagaaaaaaacaggtatgactcccagcgcatacattgcccaggtcctgggaagacccggcaaataaaaagcaatcacttttttggcaacagtataaactgctgccatttttttaaaaagcctgtaatttttacttgacttataacgcattctatgtaagaatatgacgaggcacaaatcagtgccatatctggctggtccggctatcgcactggtagagtgtgaactatttcccaaattcaatattttacaatataatgcgcaaaggagactcccatgagacatttattgaatcccttagacttctctgtggaagaaattgatgaccttctggcccttgcaagggacattgaacagaatcttccaggatacgcccatgtatgtgacggcaagaaactggccacccttttctatgagccaagtacacggacacgtttaagctttgaggctgccatgctgaacctgggcggcaatgtattaggtttttcatccgccaattccagttctgccgcaaaaggcgaaagcgtggccgataccatccgcatgatttcctgttatgctgacatctgcgccatgaggcatccaaaggaaggcgctgcatttgtagctgcccagaaggcccagattccagttatcaacgcaggggacggaggccatcagcatcccacccagacattgaccgaccttatgaccatccgttccatgaagggacgtctggacaacctgaccgtgggcttctgcggagacctgaaattcggccgtaccgtacattccttaatcaatgccatggtccgctaccccaatgtcaaattcatactgatatccccgcctgagctgcgcatcccggacaacatccgcgacgacgtgctcattgcaaataacgttccctttgaggaggtgggcaacctggacgacgctctgggccagttagacattctctacatgacgcgtgtgcagaaggaacgcttcttcaacgaggaagattacatccgtttgaaagactgctatattttggataaaaagaaaatgaaacttgccaaggaagacatgtatgtgctccatccgcttcccagggtaaatgaaatctccgtggaagtggatgacgacccaagggctgcctacttcaagcaggcacagtacggcgtatatgtgcgtatggcattgatcatgagattactggaggtgcagaaaccatgttaaatatcagcggattacaagaaggcattgtcctggaccacattgaggcgggaaaaagcctggacatctactatcacctgggtctggacaagctggaatgccaggtagccatcatcaaaaacgcccgcagcaataagatgggacgcaaggacatcattaaaatcgaaggcggcctggatacggttgacttaaaggtattgggctacattgaccacaacatcacagtgaacattatccgcggcgacaggattgctgaaaagcgcgccttaaagcttcccaagaaaatcaccaatgtgattcagtgcaagaacccccgctgcatcacatccattgagcaggagcttcctcatatcttctacctggcagatgagaaggcagaggtttaccgctgccagtactgcgaagagaagtacagcgaatttaaataggatgattatgggacgctgcccgtaaatacatgaaaaggcagcccggtatcaaaatcccaaaggattgataccgggctgccattattatattatccatatccaatcccgacgcatgtaccgtatccttccataccgcgccctacagatacatttccctgtctgtttccttttttcctcccgggcctatgtagacagattcatcaaaggccagaattaacaggaatatgggggtaaggaaaataagccccagcgcataccctaccccatgtccaaaggaacaggacatcttaacggatatcagaatatgcataaccgaaacgccgaaataagccagttgggccgccatggcgccgggaccggacacaaaccgcaaggacgcggcaatcaatgccatgatgagccacaggacaaacatcctgttattccagaaaagcttatactctatataggtgccgtaaaacggtatcagggctttccatcctgcttcccctgcctttctgaatatcatccagtaagccaggatgtagaggacaagcaccaccgcaattacaaacataaaaatcagcgacatccccatgagcagtatactcagttctttcaaaaaagcacccgcctttccaactatattccctacttatcggcaggcacgatttccagccagtagccgtccgggtccttgataaaataaatgcccatgcccggattctcgtagcagatgcagcccatctcctcatggtgcttgtgggtgccgtcaaaatcatccacatggaaggccaggtggaattcgcactctcccaggtcatatgcttccttcctgtcccgcagccaggttaactccagggtaaaatccgtcactccgtctcccaggtacaccagcttaaaggagccgtccgaagcgttcttctccctcaccggttccagattcagggcctctttataaaaagcaaggctcttctccaaatccagcacattaaaattgaaatggttaaatgtaatcataggtctctcccttctttttttttaaaaccggcctgcaccgcaggatgcagaccggcaattgtttcacatgtttaattgtttcacatgtttcattgtttcacacgtttgcttcgcatgtttagttcttgggaaccatcatttccatgccccccatgtaaggacgcagcacttccggtatcttcacactgccgtctgcctgaagattgttctccaggaaggcgatcagcatacggggaggagccaccacggtattgttcagggtgtgggccagatacttgcctccgtcctctccctgcacgcggattctcagacggcgtgcctgggcatctcccagattggaacagcttcccacctcaaaatacttcttctgccttggggaccatgcctccacgtccacagacttcaccttaaggtcagccagatcaccggagcagcactccagcgtgcggacaggaacatctaaggagcggaacagatccacggtgttctgccacagcttctcataccacatagggctttcctcgggcctgcagactacaatcatctcctgcttctcaaactgatgaatacggtaaacgcctctctcctcgattccgtgggcgcctttctccttgcggaagcaaggggaatagctggtcagggtcaggggaagctgctgctccggcgtgatggtgtcgataaatttaccaatcatggagtgctcgctggtaccaatcaggtacaggtcctctccttcaatcttatacatcatggcatccatctcagcaaagctcatgacgcctgtaaccacattgctgcggatcataaagggaggtacacagtaggtaaatccgcggttaatcatgaaatcccttgcataggaaatcactgcggaatgaagcctggcaatatcgcccatcaggtaatagaagccgtttcctgccactcttctggctgcgtcaaggtcgataccgttaaaccgctccatgatgtctgtgtggtaaggaatctcaaaatccggtaccacgggatcgccaaaacgctccacttccacattttcactgtcatccttgccgatgggcacggttgggtcaataatgttgggaatggtcatcatgattttggtaatcttctcagaaagctgtccttccttttcctccagctctgccagacgtgcggaattggcgctgacctcctgcttcacggcctctgcctcatccttttttccctggcccatcagcatgccaatctgcttggacagcttgttgcggctggcccttaaatcatcggcttccttctgtgtcgcccttgcctctgtgtccagtgaaatcacttcgtccaccagcggcagcttgctgtcctggaatttattcttaatgttctgctttacaatgtccgggttctctcttacgaatcttaaatctaacatggtattcctcctggatttccttgatataataccttccaattctggacaggtattcctgtactgttaaagagtatataacattttaccaggaaataaaagccctttttctgtttttcctgctgctgtattcctactgctgctttcctacttctgctttc

SEQ ID NO: 3346 - DNA, 3293 bp, Unknown
  gut microbiota DNA sequence
ccggtcctcatcatatgactccgactcctgcgtggcgctttccggatgctcctgccccagaagctcgcgctccatctgctggcgccgcctctgttcggtttcattccagtcctccactgtttccaccctgttgtcatggtttctgtccgcatgttccgtctcgtccgctctgtcatagggctgcccctggggccgtgattttttatcctgttcccgttccgggctttctttgccgtcctcttcccggggtatctcatcctgcccctcatccaggaacttggaaaacaagctgtaaatcagactcttttcgttcatgggcatctcccctttcagtaagttcagcgcatgtcattgccttgtatgtcattaccttaagttatttatcatctcttccatctgatccgcggttgtgacgatccggctgttaagctgaaacgcacgctgcgtctgcatcagattgaccatctctgtggacatgttgcagttggacatctccagggcatggctcatagccttgcttttctcctgttcatcgtccaaatcatccatggacagccattcaccggaggtttctcctgtgcggaacaggttcatgcccacatgctgcagcccttccggattctcacacacaaacagcccgatccgttctgccagcccgtctaagtccagctcccctgcatcattgtctccgccgtcctctgatgtcttgtattccagctctatgggctccccgtcctggtccaggacatagcttccgtcgctggtggtcaggtaattgccgtcatccgtggaggatatctggaatgcgccgtccctggtataagccggttcttcctcgtcctcgctggtctggatggcgaaaaacgcattgcccgatatggcaaaatccagttcccggtccgtcttgcggaaaatcccctgctggaacgtggttcccggcccgtcattgcggactccgtgtcccacctgggcctgaggccgcatgtccatctgggtgtacaataaatcattaaagctgctgcgcatggacttgtagccgttggtgcttatattggccatgttgttagaagtcacatccaggtccttctggaatgcgttcatggccgatactgctgtatagtacgatatattcatctatagttcccccctacagctttccaatctcgttggctgttttctgattcatctggtctatgatggtcagggcctttccgcaggactgaaacgccctctgcacctccatggccctggtcatctcattgttcagatttactcctgactgttctaactttccctgatacaccgtgggataaacctggctgagctccacgcccgcccccgcgccgtaggttccgttgtcatagaactccaggttgtcgtaattgtccggcaccactatctgaatctggtccagggcgccgtcctcattgtcgtagataattccatccgcgccaacgcggaatccctcctcatccacatataccggaccgccgtctcccataagctggcccactcccggaagcatgagatttccctcatcatccctggtaaaatggccgttgcgtgtcagatactggccgttttctccctgtatgacaaagaacccgtctccattgatagccaaatcataggtctttccggtatcctcaataggcccctgtccatgggttgtcatctccctggttcccaccgatatggtggacccctggcccagtccttctgtccttccgttcatttcccgcaccagctgctggtcaaaggttgtcttaaccagccgtttcggtttgtaaccgctggtcttgacattggctatattattggcagccatgtttaatgatctctgattcatcagcatgccggaagcggctgtataaaatcctgaaaacatagttttatcctctcatataatcttccaggctggctttcagcttttggattgccctggtatgtatctggcatacccgggactgtcctatgcccataacctgggcaatctccgaatacttcagctcttcatagtaatataaggtaatgaccagccgttccttttcccccagcccgtctatggccgatgtaagtgttcccatcagttccttgtaaaacaggttttcctctggtttgccctctatatcaccggactccagctccccttttgccactatggccgtcatatcctgcagcacggactcaaaggaaagaaggttggcgtggttcatatatttaatgtggttttccaccttttccacgggcagttccagataatccgccacttcgtttacatccggctccctcatctgcttatgggacaaaatggaacatgcttcttctacctttttttggaaatttctcgctctgtgaggcacccagtcctggctgcgtatatagtcaatcatggcaccccttacccgcatgaacgcaaatgtctcaaacctggcgcccctgtccgggtcataccgttccagacattcaatcagcgccagcaccccctggtctataagctcttcctgctccagaagggatccggccatggaccgcagctgcactgccgcggaacgcacaatgggaagatagtgcataatcagcctgtttctcaattcctggctgccgttttttctgtactcctccagaacccgaaccatatcctcactgtctgtctgttccatcagcatatcctgttacctctggctaagggaaatatttcccaatgcctgtatctgtatattgttgtcaatctcactgaaggataccaccgctacgttggggtaaaactggtcaatgagctttttaaagtaaatccgcaccacaggcgaggtcagtacaatgggtacattgaccagatcctttatcttattgatctcagccgtggctgacgccactatgctctggatggccgtgggctctaaggccagataggagcctgtatccatcttcttcacggacgacataatcatgttctcaatccggtcgtccaggctgatgaccttcatctgccccgcctctgagaaccgccgggatatggtgcgctttaatgcctggcgcacatactcggtaagcatatccgtatcctttacctggctgccgtaatcacctaatgtctctacaatggtctccatatcccgaatgggaatctcctcacgcaaaagattggccaggaccttctgaaggcctcccaccgatataaccgacggaatggtgtcctccacaatactgctgttggtctttttaagggcctccagcaggttgttgacctcctgcctgtttaacagctcatggaggtgttcctttaccacctc

SEQ ID NO: 3347 - DNA, 183 bp, Unknown
  gut microbiota DNA sequence
tttaagggcctccagcaggttgttgacctcctgcctgtttaacagctcatggaggtgttcctttaccacctcggacaggtgggtgattaccacggaagtggggtctatcaaggtataaccggccagctcggcctgtatcttcctgtccccgcttatccattttgccggtatatggaaagccgg

SEQ ID NO: 3348 - DNA, 5646 bp, Unknown
  gut microbiota DNA sequence
cagtttgtccattttaaggcaaaaaatagttatacaccaacttatccacattatccacaagtttataacttttcatctgtgcctcccattcagactttataattattttatttttgtacacttctgataaacttgataagtacggaagaaaaaacaaggttttctcttgacatttcagggagtctgctattaggaatgcaatagtctttaactgcatttgaaacaaatttttataaaaaattaagataaattgtttaacaattcttaggttctaattgtaattttgcaataaatatgatataatgtcactatcccaagaaaaggagttgatgtttatgcgttataccataacaggacgaaatattgaggtaactccaggtttgaaggctgccgttgaaaagaagattggcaagctggaacatttcttcacgccggacaccgaagtaatcgtagcgcttagcgcacagaaagaccgacaaaaaatcgaggtgactatcccagtcaaaggcaataccatccgcgcggaggaatccagcactgatatgtatgtatccattgatctggtagaggaaatcattgagcgccagatccgcagatatagaaagaaactcattgataagaaacaggccgccatctctttctcccaggccttcatagaggaagaggacgaagtacaggatgacgagattcagattgtcaagacaaagaaatttgccatcaagccaaccattcccgaggaagcatgcctccagatggagatgctgggacacaatttctacgtgttcctgaacgcggatacagaccaggtgaacgtggtctataagcgtaagaacggaacttacggactgattgagccggagttctaaactacggattgaaaccaaatatttttcttataataagtacaagcccgcaaatctgcgggcttgcttttatatgtagaaataattctcttaatccaaaaacgtaacagccttacagggtgtcctgtaatttgccggcgtgatgcagatacccgtggtggggttgctggcgtggataacctggccgccgccgatgtagatggccacatggttaatgtaatcgccactggcatagaacagcaaatctcccggcttggcatcactgactggtattgactttcctctggcagcctggtccctggagcttcttcccgtactgatgccgaaatgggcaaatacgctctgagtaaatccggaacagtcagctccgcttgtcaggcttgtcccgccgtacacatagggattgcccaggaactgttttgcgtatgccaccactgcgttacgggtagcagaagccacctctgtggaggttccgccaggtgatcccggccccttgctgtccactgtctcaggtgcttttgccgttgtgggcgctgccaccgtgctgtccttgccgttctcaggattggccgcgatggtggtgacggcgtctgttccctttgtctcctctttcttgggagctgtggtggcaggagcctccgtggtcttctcggcctttgtggtggctgccgttgtcttcttggccgcatctgccttcttcgcgtcctccagagcctgcagggccttctccgcatcttccttgcgcttggcctcctctgccgccttggccttctcctcttccaccgatacagccttgttaaactccacactggtcttcatatattccttgaacacatatccttccaaatctgaatccacctgcaccttcaggaaatcaccttcctcgcccgaaaccacataatgggcgccctctgacagcagtgtcagtgtctttccttccatgtcaggactttgtctcagacgcaggctgggggtgcccactatggtgccataggtggttcccacctgcttggccctggattctgcctgctgtcctgtaacaaagtaatcagcttttatgtagccggtcacggaaccggactgaatcttgtaccattttccgccctctccgtccaccgtgtccaggatggtggccgcgcaatcattgttaatcttgccggtgacaccgctgctggtattggcctctgtacggatgtttaccgtgccgtttatcttggacacggcaatgttgtcatacgccgaggactttggtttggacgcggtctcctgggcagtctttgccttaccggcgtctcctgacgcgctgccggactggccgcttgccttattgccgctgccctggccgctggcggaaccagcggctgtatttgactgggctgatttgttctgtatgttggaataggatgaagccagctgcttttccggctctgtattccctgcataataattattcagcgcaacggatatacccgccagagaagatcctgtctccaggtttgtggacgccatagcgttcacagaaagcgcgcagctgcacagaccgctgagcacgattactttcttccagttattcatctgtagcctgcctcccctaattctctaccagataccgctccacactggttatggcgtttgcaccgtccgcagcagctgtaataatctgacgaagcggcttggtcctcacatcgcctgccgcaaagataccgggtgccgatgtcacagtatcctccccggccctgatatagccgtggtccatatccaccaaaccctcaaaggccctgctctccggtgttatgcccactgcgataaacacgccctgtacatccagttctcttttctgtccattttttacattggtcagggaaagactctttaccattccatccccattgatactgtcggccactgtgtcccatattacctccacattatccagggacagcagattctcctgcaggctcttggctgcccgcagttcatttctcctgtgaatcagatacaccttgctgcacatacgcgccaggaaaatggcatcctccacagccacatcgccgcctccgatgactgccgtgaccttattgcggaaaaatgccccgtcgcaggtggcacagtaggacactccggctcctgccagctcttcctcgcccggcacgcccagcttcctgtgcacagctccggtggcaagtataagggacctggcctcataggtatttccctgacacaccacgcccttgattgcgccttttcctccatcctggatattcagaacctcgtcctccacgaaccgggctcccagacggtctgcgtgttccctgaatttaattcccaggtcgtatccgccgattccgggaagtccgggatagttgtccacctcataggtggtcaggacctggcctccgctgaccattgccttttctaccacaagagtgtccagctttgccctctgggcataaacagcagccgccagacctgccggtccggaaccgataataatcaaatcataaatatgagacatagtttcaccttttccttttattcgatctaagccgatattttcactgttttgtttcaatccacacccggtaatgaaacagagtacgactgtttgtttccggcaatgcatccatccgcctgttggggcgggggtattttagcttcttttgttaaacaatttgtaattattatatcacaaataaattatttattacaattcaatttcttacaattctatcattggtatggtaaaatatgttataacccataacagaaaggatgtgtatcttatgccgcgtaaaaccgtactggtcaccggagcctccagaggcatcggcaaggccgtggcagttaagtttgcaaagaagggctataatgtggctatcagctgtgtccacagggaggaacagctgatgcagacccggaaagaaatcgaatccttccaggtcccctgcctggcatacaaaggagatatgggggacatggcttgctgtgaggagctgttccttaagattaaaaagatgttcgggggcgtggatgtccttgtgaacaacgccggcatctcctatatcggacttctccaggatatgactccggcggactgggagcgcatgctgcgcaccaacctgacatctgttttcaattgctgcaagctggcggtcccctatatgatttctcagaagcagggaaaaattgtcaatatatcttctgtatggggcgttgtgggcgcctcctgcgagacagcctactcagccaccaaaggcggtatcaacgccctgacaaaggccctggcaaaggagctggcccccagcaatatccaggtcaatgcaattgcctgcggagccattgacacagagatgaaccagtggatggatgaggacgaccttatcgccctggtggacgagattccctccgggcgccttggccgcgctgaggaggtggctgatttggcttaccatctgggctataaggaatcctaccttaccggacagatcatcggactggacgggggatggatttagactggcggggtttggctgatgggtccaggccgggggatttagaccgggggcagactcccactatgcctcccgaacctttccgaaacttttccttatccttacgaatatattaactgtattgaccttggagccgctccatggtgtagaatttattcagaaaagcaatacactaatataaatcgcaaggaggcatgcttcttatgaaaaagaaatatttagcaatcgcagctctctccatggccctggccgcagggagcgctatgacatcatttgctgcgggattcgttcacacctctcagggaacaaagtatcagtggggttccggagattactgtaccaataactgggtaaattacaagaaccactggttcttcttcggagaggaccagattatgcgtaccggatggattcagaaggacggcacctggtattacgccgccgatacaggcgagctccagggcggcatcatgaagatcaacggcaatgtctactacttcgacagcaacagctgtaagttacagaccggagaacgctccttcaatggccagacccacaccttcaccgaaaacggaaccaccgacggcggtccatatgtttatacagagtggaacagcaacggaacactcagacgcggtaccaaattcggggtacggtaattcataaattgcatatcacacacaagaacagggatgcctgagccggaaggttcagccatccctgttctaatgatatcaaaaacatagagagccaaaaagaccttccggaaaactggttccgaaaggtcctgtatacgtttgttgggacatactggtgtaaaccagatgtctgactccagaattaacgcttggagaactgaggagcacgacgggctgcctttaagccgtactgaaattctttgattgccgttttcccttgatattccgggcttttccggctttctgcttctcagttatccggtgtgcggaccataaaaaatgaccttttttcattcagcgatagcctgatgaaacgcaccatttactaccccaaacagctcctctggtttattgtacttcacttttgcatagatgtccatagttgttttgctgttttcgtgtccggcaaggtattgaactgtctttggatcgacacccgcatagagaagattggtgatgtaagtgtgccgcaactgatggggtgtcacatcaaagtccatcgtatatttgattttgggttgattcttctgggtcatgcccagcgttggagtaaccgtatatttgataccctcc

SEQ ID NO: 3349 - DNA, 1567 bp, Unknown
  gut microbiota DNA sequence
gttggtagagcagtagactcttaatctatttgtccagggttcgagtccctgaaggcgcactaaaaggtctgactttgcagatacgaaaagctgcggggtcgggcttttctttgttatataaaacttatcccacactatcatacaggaggaatcatgaaatatttacaccgaaccgccggaatcgtaaccgcattttgcctgatgattattcttttcatcacttccgtggaggcagtggtatactggacgcccggttattttgaaaaggaatacaccaaatacaatgtgctggacagcttgccgtccatgaccatggacgatcttctccatgtgacggatgaaatgatggattatctcagaggcggcagggaggacctccatgtgaccaccaccatgggaggggaacagagggagttcttcaatgaacgtgaaatcgcccatatggaggatgtgcaggtccttttcctgaaggccctgtccatccgcaggatatgcctggtccttggagccggccttctcatcctcatggctgccaccaaagccaggatgggacgggtccttccgccttccctgtgcatggggaccggactgttctttgcgctgattacggcccttggactcatcatatccactgacttcaccaaatacttcatcatgttccaccatatcttcttcagcaacgacctgtggattctggaccctgccacggacatgctcatcaacattgtacctgaaggcttcttcatggacacggctgcccgcattgccctgctctttggctccctgtccctgattctctttggagtctgcctgctcctaactataaaaaaccgcaggaaagtaagctgaatggacacagattcaaaaataacgcccctctccagcctttacttgaagccgcaaatcctttatactgtatcttagcaaagaagtgaatggagaatattaggatgaagcgattccttatgttgtttatatgcctctgcctgtgtgcaggacttttccccataacagcagcggcagcccccgaatggccctctgatgtgtccatccaggctgacgcgggcattgtcatggactccgacaccgggacggttctttatggaaaaaacatggaccagccctattaccctgccagtatcaccaagatactgacagccctgattgtgctggaacagtgcgatctgaatgagatggttacattttcccatgacgatgtatacaatgtggaggctggaagcagcagcgccggcattgatgaaggggatgtcctgaccgtgcgggactgcctttacgctctgatgctggcctctgccaatgagagcgccaatgccctggcctgccatgtaagcggatccagggaggcattcgcccagctgatgaacgagaaggcccggagcctgggctgcacgggaagccattttaacaaccccagcggcctgaatgacgaaaaccactacactacggcccatgacatggccctgatagccagagccgccatccagaacccggaatttctcaccatcaacggcacccgaagctaccagctggctcccaccaagcggac

SEQ ID NO: 3350 - DNA, 2873 bp, Unknown
  gut microbiota DNA sequence
actggagtatatcccggaaggtgattatatactcagggagataataaccccgtacggattcctgcaatctgtagatattccctttaccattgcggacagccaggtcctgcaaaaaacagaaatgacagatgaaattccggatggaattctccgtatcataaaaagcgactcagataagccggatgaaaaattaaagggagctgagttttgccttgtgaaccagacaaccggcgccatatgcggtaccgtgaccacggaccagctgggacaggcgcagtttgaaccgcaacccattggatgcatggaccgggatgggaattttaaaccttatacctatgtgtgcagtgagacaaaggcagccccaggacacatgctgacacttgaaccatatgagttccagtttcattacaggaatgaactgacagacctcattgtctgggaatataaccccaccaatgattccaaccgggtaatcacggataagctgtccggggatacggaggaaatgctggaaggcgcgctgctgcgaatcgaacgcaggacagaatccggatgggagacagcggaggaatgggttagcggcaggcaggggcattatacaaagaacctgagtgaaggacaataccgtctgattgaggtgaaggcgccggagggatataaactgcaggaaacgcccattgagttcactatcagtgatggtatgaccgggattccccatctggtcatgcgcaattatacaaccattatagatgtggaaaagacgtcggcagaaacaggaaaactcctgggaggcgccagattgcagctcattgataagtctgatggaagggtgattcgggagtggacatccgaggcgggaagggggcagcagttttacggtctgaaaccaggcacatatatcatccacgaacttcaggctccatccggctatgagagaacagaggacagggaaatcgtggtaaaagaatggtcagggacagaaggaccggagatggaccagaaggccggaaatgaattgcataacatggttcaggtattcaggtttgagaaccagacagcatcctcatccggcggaggcgggggaaacaggccgagaccaaaggcagagtacattacatttaagaaaacagatgtttcaggaaaggtactccagggggcagaatttacattttatgaccagacgggccgtgtaatcggtacctctgtcagcgacagtacaggaacattccgcataagaaggcctgacaatggtacatacaccttccgggaaacaaaggcgccgggcggatatgcattaaatcccggcatattcagttttaccgtcaatggaagtgatgtcataaggggcgcatatgaggttgtggacaaggaactggaatttacggttacaaagctggatggagacagtggtctgcctcttatgggagccaggttcaggatcgggaagggagaaaaccgtgtctgggaccaggagccggagaatacgggcaaggggataaacggatctgcggctggaactataaccgaagccgtaaccggagcagatggtacatttacctgccgtttggcaacaccgggcctgtatgtgattcgtgagacagaagcccctttggggtatgagaggtctgatgaggtatatgagtttacgatggatgcagaggggagaatacagggcgaaacagtgatgcagggaagcgtaaccatatataattggaaggaaaaaccgccggtcaggaaaattggaagtattactgctgtgtatcaagtcggcagccggtttggaaaagggacatatcattttggatccggctccagggatacagtaaggaccggagacgacctgcccgtggcagcggccgccgcaatggcagttttatgtatggcgggcttcagtatgtgtctgtgtatgaaacagaagagggaatggagtaagggcaggaaatgggtgatatttattctggttttgatacccgtaacagtttatctggcttttgatgtgctggcggaggaaacagatagtatatctgtctcagggaaaatagtatattcatccatggaaaacatagaacctgtcccgcaaaccgcctgggtactggccagggatgatatatcgggaaaggagcggaatgtccttctgccccttgtgagttatcatttttctgataagcattgggaggacggatttcggctggatttaaaggtgagggattatgatgcaggtttttatgaagttggcggtgtgaggattgaaacacagaaggaggagattagggagagcctgatggactatgaggcagaaattttaggacaggcaggcctggattcagaagcgtatagaattgaccaatttcagtggaatggcggggtatatgaaagtgatggagtgctatgccggaatttgacagcaattggacgcaaaatggttgcggactgcactgcggtttatggaggggaggtaagccggaacgtatttttgaatgacagcaaaggggatgaagagagcggacagattgtagattcggggattgatgagaggtatgttactaaaaataatgtgcagccattctttttcctgggagtaactgtgcctgcggccgggatttgttttgtggtattgattgcagctatggttctggctatgataaagaataccagaccttatggcatggcggcggtcatgttcatgttttttgcgggcgttgtgttcagcatgcattttctggtgaagatgggaatggattatgccgatgggcgccgaatatatggtatggtgcaggacgaggcatatggaagggggaagaatgaggggcaggaaagagaagctggtgaggggagagaagctggtgaggggagagaagctggtgaggagagag

SEQ ID NO: 3351 - DNA, 68776 bp, Unknown
  gut microbiota DNA sequence
tctgacgcagagaaaaaaacggatgaggaaagtcctgatgggaaatctcctttaaatgaagaagcccttgcttccatcaatccggaataccagttctggctggctgtacctggaactaacattgattacccggtggtgaggcatgaagataatgagtattatctgaatcataacttttatcaggaacagcatataacaggctgtgtttttgccgattcctcggctgttcccctggctgtggacaatacggtgctgtacggacataacatgaaggacggaagcatgtttgcaggtttgaaacaatatggtgaggaagcttttttccgggaaaaccctgttatacagatattttacaggggaaagtgggtggaatgtcctgttttttcatgtcagatccgccatcagagcgatgccggagcctacggcactaactttatggaagaagagtggctgccttatcttgagaagatgggggcagcgtccctctatgaaacgggaatcactccgggaggggatgagaaacttataacgctttcgacctgctatggcaaagaccaatatctgattgtgcaggcgctgctgcgcggtatgtgacatccgtaataagtatttttagaggatgttagccggtgttttttcgggttttatgcaggagagggatctgttgtaacggaatctctcagaatggctgacttttcacttacaccaagaagaaccaaaaaagtcaaatacagaaagttaacgctgacccttgcgccatgtatattgcatataaagcagaaagatagtatagtaatagaagctttatgcaaatacgatgacaataggtggcattagtgaaaaagaatatcgacttactaaatggaaatatactcacatctctgactgagctggcccttccaatcatggccacgtctctggtccagactgcgtataatctgacggatatggcctggattggtatggtgggaagcgatgcggtggcagcggttggtgcggcagccatgtatacctggctgtcctccggcgttgcaaccctggccaggatgggaggccaggtgaagtctgcccatgcctatggagaaggaaaccgcagggaggcggtccagtacggaaagggagccctgcaattggctttggtgctggctgctgtgtatggaatcataacaaatctttttgcagggcctctgatagactttttccatcttaattcaaacctggtggtggaagatgcaattgtgtatctgagaatcgcatgcggccttattctctttgcatttattggacagacactgacgggtctttatacggcttccggcaacagcagaactccttttgtggccaactgtatcggcatgggagccaatattgtgttggacccgctgcttatcttcggcctggggccaattcccggcatgggagtggccggtgcagccattgcaacggtgacagcccagttcatcgtggctctggtcctggttatttctatgagaagggatcctgtactggcatcccagatgcgggtttggattcccactcctttatctaatattaaaaccatggtaaggattggatttccggcagcaattcagagtatgctgtactgcggaatctctatggtccttaccaggttcgtcactgcatggggggatacggcggttgcagtccagagagtaggcggccagattgaatccatatcctggatgacggcagatggttttgggacagctatcaatgcatttgtcgggcagaactatggcgcgggaaacctgaagcgggtaaagaaaggttacatgacagcatctgccatcatgtttatatggggcatttttaccacctgccttctcatatttggagcggcgcccatattcagcctgtttattcatgaggcagaggtcataccggccggagctgattatcttcggattattggtttttcggaaatgttcatgtgcgtggagctgatgaccgtaggcgccctgtccggcatgggaaagacgatggaggcatctgtcataaccattatcctcacagcttcgcgcattccgcttgccgtgattctgggaggaacagccatgggactgaacggcatttggtgggcactgactatttcaagtattgtaaaaggaatcattttctttgtgtattatcttcatatcatgaagaggatgaaggcataggcataagccggggtaaagttcaggggccaaagtttagggggcaaaaatcaaaaaaatatgcttgtaaaatgtcggattttgtgagagaatagaaccaagtatgatgtgataaatttaacgaatgggcactgtacttgatcaaattcatttttgaaaggagttttaacacatgatttattcacatgaagtagaagagatgtgcacagttgcacagggcgttcatcatggcgctgctccaattccggaagaagcaaaatgggtaaaatcaaaagaagtcaaagacatttccggcctgacccacggcgtaggctggtgtgctcctcagcagggtgcctgcaagctgacactgaatgtaaaggaaggaatcatccaggaagccctggttgagaccatcggatgttcaggtatgacacactccgccgctatggcagcagagattctgccgggacgtactgtgttagaagctttaaatacagacttggtatgtgacgctatcaatacagctatgagagaactgttccttcagattgtatacggaagaacacagagtgcattctctgaggatggacttcctgtaggagctggtctggaagatttaggaaagggcctccgttcccaggttggaaccatgtacggaaccctgaagaaaggtccccgctatttggagatggctgagggttatgtaaccggtattgcactggatgcagacgatcagatcattggttatcagttcgtaagccttggcaagatgactgatttcatcaagaagggcgacgatcctaacacagcatgggagaaggcacagggccagtacggccgcgttgctgacgctgttaagattatcgatccacgtaaagaatgatgaagaccgaataggaggaataagaagatggcattatttgaatcatatgagagaagaattgacaaaatcaattctgtattaaacagctatggcattgcttccattgaagaagctgagaagattacgaaagatgcaggcctggacgtatatgatcaggttaagaaaatccagccaatctgctttgagaacgcttgctgggcatacatagtaggtgctgctattgctattaagaaggactgcagaagggctgcagacgcggcagcagctatcggcgagggccttcagtcattctgtattccaggttctgttgctgaccagcgtaaggttggtttaggacacggcaacctgggcaagatgcttctggaagaagagaccgactgcttctgcttcctggcaggccatgagtcctttgctgctgctgagggcgctatcggtatcgctgagaaggcaaacaaggttcgtcagaaaccactgcgtgttatcctgaacggtttaggaaaggacgctgcacagattatctccagaatcaatggatttacctatgtagagacagagatggattactatacaggcgaggttaaggagctgtggagaaagtcttactccgagggacttcgcgcaaaggttaactgctacggcgctaacgacgtaacagaaggcgttgctatcatgtggaaggaaggcgtggatgtttccattaccggtaactccaccaacccaaccagattccagcacccggttgcaggaacctataagaaggaatgcgtagagaagggcaaaaagtatttctccgtggcatccggcggcggtacaggccgtaccctgcatcctgacaacatggcagccggtcctgcttcctacggtatgactgacacaatgggacgtatgcattcagatgctcagttcgccggttcctcttccgtgcctgcacacgtagagatgatgggtcttatcggtgccggcaataacccaatggttggtatgacggtggcgattgcggttagcatcgaagaagcggcgaaggctgggaaattctaggaaatccagtaaaattaaggatttaagatgttgttaaaagtagaaaaaagtagggaaatgtatgtaactcatacattatccctacactacttctacacccatattcctacactaaaaacaagctattttattttttctatatcttctctcagccattccaaatctcggacagtataagtagattctgttatgtcttgtatggtatgtccaaccatttctttaagtgcatactcatccataccggatttttttcccatcgtaacaaaggttgttcgtggatcatgaggtctatgattcgggtttagattcaattgactaatcactttttcaaaacgattagcgtatttgtcgtacgttacagaccaggaaccggaatgtgtctgtcctttatcattaaaaagatattcactattgatagaaattgcaaatttataattacgttcaacgaattttaggattcttggatgaataggaactatccgttgcttccctgcttctgtcttcattccagcttgcatataccttttttctaaattgacctcgtccaaccgtaaggtagcgagttcttgcgggcgccaacccatataacattgaatgagaatccaatcagcaaattttacattatcaacattttgccacaaaactttcatttcatcatcggtaaatggaaagtgttttttcttgtttttctctatttcaacaataatgtctccagaaatttcaaatgttcttgcataattcataggaacgatttcatactcaagagcgtagtcaaacatagtattaaataaagattttattctggattttgtacttggcgatggatggattttttctcctttcttttttcctctcgtttcgattcgaaatccctcttccatacatcctttaatgtgtcgagccctaacatcttttgcgcgcatatcgtatatggaagaacaatatgtccatgcggaatttacagaacgtatataagtatcagatgcatcttttaagtattcactgagccatttttcatacagttcctttatcgtaatatctggttccagatcatacgggtttttattgtattccaccagggccgtatatgcatcattgtacgttggaaaatatgactccggttttaatggtttacatattggacgtccggtggatgtctttccaactgtgaccatagctcgaaaggggttcctgagattccgatttttgatttcgcttatctgtccgaaaccgttaggaagtcgccttcgcttgttatttttgcttcgaggctttcgttgtttgatatcgggttgtagcggatagccacaatgcgggcagaaagtagctttatcgctaacctgtagatcacactcggggcattttatcaacattctcaatacctccttaaatattttataaatcgagatttttgtgcggcaaggttgatttatcatcagtaatcatatatgatagtgtaggaattgtcaactcctacacttaaactttttaaagggatggatatatggttagcaatgaggaattaacctgccggaattgcggagtaaggttaaagaggtacgataatgtattgagaattgttcggactaaaggaagaaaaacttcatgggtaaaagtaaatcggtttcgttgtccttcctgcggacagatacgcagagaattgccggattatatttcccgttataagcagtacgaagccgaagtgattcgtggcgtactagagggattcattacctgcgagacatatggatatgaagattatccatgcgagatgacgatggctcgatggaagaattcgcaagaattacaactccttttgtgaaagacaaaatcgaaaggagattcaggatgtcaaaagaggaaaaacacttacaaactaagattcgtatattcgaggatatgcttttacgatgtaagaattttggtcaggcagaagcgattcaaattgaattgacaagaatgagagcaaaactacaaaaattgtatttcaagagaatggagtcctaacaagggctctttcttttttatcgtttggagaactatttttaaagggatggagaatggttaaaaatcaaaagaagccgttggtggcggcttctcgtgatgaattactttgtgtagcattgcctgtaattcataggctttttggtgtctttattcttcagaaggaaaaccaggtactcgggtaaaagtttggattcctctttcggcttaaagcacttagaataagagacgtactgctttttgaccaatgaccatcacctccatccctttaaaaatagttcccctttcgatactttacattctaactgtggtttttcattcagtcaatgtaaatagccactgaggttgttttaacaaattgcggttcttatcctagaatagccgttgaaaggaggtaacagccaatggaagaaattatatttgcgccggggtctgttccggtagcggtcgttgccagggtgtatgggaaagatgcttcctgggttcgagccggtatcatatccggatggcttcctattggaaaggctactagaaacggaaagttgattaccaatattgaagagatgaattcgaagtatggacgcattaacttttatatttctccgaagcggctctgggaagaaaccggatatttatggaaaggagagaagcgttaatatgggaacaacgattcgcccggaattatctgagaaaaatccatattggattgaacgtcatcgctactatgaactgaagcatttctgtttacagtatccgatatggaagaaagcatacgccgccctggatgggcttagccggcggccttctgatatggaagtattttcaaagaacagggtggttggcgatccgactgctcgatgtgcagaagctcgatctcactatttagagcgtatgaagacggtcgagcaaacggcgattgcgacagatgcggaactatctaattatattttaaaaggcgtaaccgaagggtggtcctacgatatattgaaagctaggttaaatattccatgctgcaaggatgtttattacaacttgtacagacggttcttttggttactgaataaagcgagggattgaaatgaagattgtagacatagcagtcaagaaagtctatcgcttcaactgtccgaattgccagagtcgattggaggcggacagcaaagaggttgtggacatcggaggaaaggtgtgtaaattccattgccctgtgtgtcggaaagaacgatatattgcctggtccgacatgaggaagaagatcgtgtatgagggcgatggaacgcagaaataacatctcctattgtgaaaggaggttaagttcatggatactgagaacaaggttttaacttatgccacagcttttacagtcgttgcgggaggcgttttaatgctatcgttggtacctgccgcgttgggaattagacaagtacaaagagcacaagcgtttagtttactagcggatggaaaccgaacgatgtcgttatcaaaaacatacgatgcgaaagcagcggcgatgcaactaaaaaccgttgtcgatcaagtgatttaacaccgataaagattgagccagcaatggctctttctttttatcctaggttaaaacacagtaccaaggtatctgaaagacatgctatgttgatatttgaaaaaatcccgggtgggaaatttagaaaaatctttttgaaaggcgggatggaatatggagctcattctttgcatgattgttggtatcattatcggaattgttttcggacgacaggtattccgaagggatgtcgttggttcgctgcgaatcgatcaatctgatccggacagcggaccttatttgtttttggagctgtcccataagggagcggatgcgatatataagaaaagatatgtagtcttgaaagtcaacatcaaagattatatttcgcacgaataacaagtccttttatggaacagttaatgaattcacgaaaggagaactaaaatgagtgaaaacatcaaagaattactgaatgaggagatagcagcggagattcaggcgatatcttctctgaattcgggtagcgaagagaaatcaaaggctatagaggatctggcaaagctgtatcgtttgagaattgaggaaactaaaagtgagctggacgcagaggataagcgaagccggcgtacgttggaaagtgaagcgaatgtccgagagaacgagattaagaaatcacagttggacgaacagatcaaagctgacgtacaggatgagcagtataagcgttctcagcttgacgagcaagtgaaggatcgatatttcaaactggggattgcagcggcagagcttctcataccactgatgttctatggcaactggatgcggaaaggatttaagtttgaagaaacgggaacctatacctcaataacattcagaggattgttcaatcgttttagaccgacaaagaagtaattaaccggtcagaaatgaggagggcgtgatttatacatgtcctcttcgtttttgcgtgatttttacagacgctattatggaaaggagatgctacaaagagctctttgtctcttgaccgtacaccggaagaaaccgtacaataatagcggttctttcgaaaaacgaaaggagataatatttatgagccacaaaattatcaaacccgaaggtattgaattgattgagtacctgaataacggatatgcgatttgtaatcggtgtggagccgtcatgaggcaaacagaagatccgaagactggatgcggagtttatatctgtccatcgtgtggattaaaggtggacgaagaggattacgagtatgagtccgatgaagaagtagaatggacggaagaaatgctcgatatggaacaaggagatattccgccagccggatgcagagcctgcggaggaccatatccgtattgcaaaacgtcatgtaagctatttgatgactaaaaatattattgagagaaggtctatgcttcggcataggctttttctttttggagaataaatgatgcgataccattatgaaaagccgaacatctatttatcgatgtacgggaaagtatatttttgtaatcatccggtctatcattgctgcacattgtttcaaatcggagaaaagggactggcagttatccagcagcgatttgatgggaaaacgaagagtacctggtggggagaagtagacccatggattacagatgatttatatttacacccactttttaagaaatattttgatatgcgttcagggatggctacggacgggctttatcctactgtaacgattcgccagattatgtgggctttgaaaatgaagccgattaagagggaacgatgggagactgtttttgacagacgggatatttagttcgcaaaatttacatcttcctttatgaaaacaaagatttatttatgaaaggagatcactatggaaatccagaaaacgaataacatacctgatgaggacattcaagcattaagttggtttgcaaatgcttgctacaccaaaggatgtagagatactttgattggcgtaggaataggtgcagctctaactattgttggatgtatcggagcagaggtatattacacatggaaggaaaagaaagaattgaagaaatccataaatgatttttgtacgtttgttgaagaggagtcctagcaagggctctttctttttacttcgcaaaaatcacagctccttttatggaaaactgattaaaagcgaaaggggtttaagggtgatggatgaaatgaaaatcagctcaaaatttacacggatgttgctttcgaaattagcaaaaggggtattacataaaaaactgggatataacgtggatatccagttaaacgagttgaatgcttcgatttcagacgagaaagcgcacgtacatgtaagtattgatgcggatatgagcaaagaagaactcatgataattctgaagaaaatcggtttaaattaagaggattgagccagcaatggctctttctttttacttcgcaaaatttacaattcctattatggagaaacagttagctcattggtagagcgccacacttccgtggaggtaatcggttcgagtccgatactggttctctttttatttttttatcaatcaagaaagggggattttaaggaggtggtcagaaatttgagtttggacgaattggcgttgattctatgcgatatgtacgaaatggacgaatggttaccaaatccggtattcgacaagaaagagttcactagggtgagcaatacattgtgggcgattggagaatttcgaaattatgtagctgatcatattttttcccagacccaaacgtccataaaaaatttagaagcgatggctcaatcatttacagaaaaaatggatgactttgcttctatgaatcaacagaacagttctatatttaccaccgctaagatggttggagaaaatattcaagatctgttatatgccatggaataggataaaacgaaaggagaacattatgcaaaaagttaaaatcttgaaaagagtcgggcgtcaattatatcgctcatctccgacaattttaacggtagtagcttctattggagtcattgcaacaaccattacggctgttcaggcaacccctaaagcaataaaactgttgaaagaggcagagctggagaagggcgaaaatctaactaaattagaaatcgtccgagtagcggggccgacttatattccttctgtactgctgggagtttcaactattgcttgtatctttggagcgaatgcattaaatcaaaagaaacaggcttctttgatgagtgcatacgttatgctcaatgaatcctataagcaatatcggaagtcagccaagacagtttacggagaggatgcggatgataaaatccatgcggaaatggcgaaagatgccatggtgtcttcctacgactggggttatcaggtttacaacatggacatggattctgaaagtgaacggttgcttttctatgatcttgcctcaaagaagtattttagaaccacaatggcagcggtgttaaacgctcaatatcatgtaaatcggaatctttccattaaaggcgattgttcattaaatgaatacttgtcatttttaggtgtcgaaggcatagacggaggcgatgaactcggatgggatatcagctatatggtagaagaaatggattgctattggttggattttgataattacaaatcaacgttggaagatggcttggagtgcatcattatagacacgatggcggtcaacaaatttgaatgattcgcaaaaattacagaccgtattatgaaaaggaggctaatgctttatgaaaaacaaaaattttatcaaagccattgggattgcagttacggtgatcggatttggagtaagtattcttaccgattgggtaaacgaaaagaaaatggatgagaaaattgaagaaaaggtaaacgaggcacttgccaaaaaagatgatgaaaacgaagaggagtcctaacaagggctctttctttttagtttggagcaagtgctgatgaatgatgaggctattcaaaaaatcatgaattatacgaatatgcatctgtttgaaccgggagaaaattggcctaaatcagccattatggaacgttcgtatgaacggtgggcggttgacgagattctactggccattatggatcatccgatgacagaagccgatttagtgatagaagggtttatattgaaaatggaactttttctttacctgtcggaaaatccagcaaataaccacatatttcaagttgcagaaaatacggccgagacacttctcggtcttattttataaccacaaattttattttcgaaaggagaaacattatgaaggcattaagaaagcagaaaatcgaaacagcaaacattcaggtaggagatcagatggtcattccgctggcagagcttggagagtttaccgcgaccgctcacaaggttacggacgagggcgtcatgtttatatttgacgaatatgttacctgccggccgatgaataactgctctacaaaaaaaggcgggtttgaaaagtccgatctgaagaagtggatggatacagttctgtttatggcgtttccagaagagttgcgtgataagatttacggacttactattccaactgttggacagattgttggtcacgaagacgaatgggataacaagaatctggaaccagatagcgatgaacagctgcctttgatgaaagagtgcaagaatcgaattgcttgttttgaagatcagcttacgtggggatggctgagaaatgctacaaaagaggagttttcttcggctggtttcgctcatgtgatcaactatggctctgcgaactccgactccgcttcgaactcttatggggttcgtccggaattctggttggttaagcaggaatccaggggccctgtgccccgtagatctggccgttatccttggggctttgatgctggttcagaagacattctgcattattgtcagaatgatgtaatggttacaaaagaagcagcgttaaagatggaaatttggaataaagaaaatgagattgatactctgaaaaaggaaattgagaagttagaaaaatataagcagtacgataaagcaacagcggaaaccaaagtaattatggacagctttgttcgtgccggctttactgagaatcaggctcttgacatggttaaaacgatattcagtgtgatatttggaggaatgagataatgaataaatcgaacatatcaaaagttttgtcgtcagttcgaacatccatggcaaagcacagccctgaaattcttacaggaattggtattgccggtatgatcacaacgactgtcatggcggtccgggcaacgccgaaagcactgattctcattgaggaaagaaaagaggaaattggagccgaggagcttgaagtcgcggatgtggtaaaaacaacttggttatgttatattccggcagcgattacgggaaccctctccattgcatgtttaattggagccagctcagtaaacgctaaacggaatgcagcacttgcaacggcatataccttatcggaatccgctctcaaggattatcagggaaaagtcgttgagatgttcggagagaagaagcacgaaactgtgaaagatgccgttgcaaaggataaaatcgagaaaaatccagtggtaacaagagaggtaatcattacagaaaagggaaatacgctctgctatgacgcgatttctggcagatattttaaaggcgatatcgacaaaattaagaaagcggaatgtgaattaaatcgtcagatgcgcgatgagatgtatgtatccttaaatgatttctactacgaagtcggtctggataatatcaaaatcggcgatgagttgggatggaatattgataatgggtatattaatctatcatttagttctcaattggccggcgatggaactccctgcctggtgattgattacagtattgctccgagatacgatttcagtgagctgatgtgacgcgcgaaaaaaacagtggctttaatggaagaagaaccacacattttcaaaaattgaaaggagaataaacatggaaaccaatgaaatcatgaacaacgaagaggttatggagacagccacagaggaaatcgttaaagcgagttctggtaagggggttaaggttgcggccggtatcggtttagccgtacttgcaggtgttgtaatctacaggtatgttggtaagtcgatgattgccaaaatcaaagctcagaaggagcagcagattatcgatgctgagtgggatgaacccgaagaaccaatcattgagaatgaaaaagaggattccgaagaagcctaaacgaaaaaatgtgtttcaacacgagggagagtacctgtaacaaggtgctttccccttttttcttttatccggaggtgaaatttatgaacatgtattcgtatgatggcccagttatggaatttgacaattgtgttgcaaatcgctggattgcttctacacgggcagtttcagaaaagaaagcaaggtcaaaccttacttatcagtttaaaaagaaaaacaaccgacttccgggtacaaagattatattgcctggaaagatcagtttggtgagcggaaaggagacaacttaatggaggaatataagccgaattcccacaaatcaaaggaggagcagaaaaatcttgttcctgaaaaacgtgtagagaaagtgatttccgggacggtaaaatcaaagaaaaaatcagaaatgcagaagtttgcagatgtattcatttctgaagatgtcaataacgtaaaatcttatattgtgatggatgttctggtgccggcaataaaaaaggcaatttccgatatagttaccaatggtattgatatgatcctctatggagaaactgggaagtcaaaaaagaactctacagcatccaaggtatcctatcagaagtattacgacagcggaaagaaagattatacagcaccgaagagccggacgagctacgaatatgatgagcttttattcgaaactcgtggagatgcggaatcggtattagacgccatgaacgaaattattgcacagtatgaggtagttagtgttgcagatctttatgatttggcaaacgtgtccaatgacaattatgctgccaataaatacggatggactgatattgctggatgcagggcggttcgagtaagggatggttatattttaaaattgcctaaaccaacgccgttgtaaaggagggattcaagatgtatgagtcaaaagacaggatggtatctcatccggatcattatatttccgaaacgggtatggaagttattgatgtaatcgaagcctttacttctgatttaaaggggattgaggctaccgataccgcaaacatcatcaaatacgcttgccgttggaagaagaaaaacggagtccaggatttggagaaaatcctttggtacacgcagcatctgatcgaccatttaaagaaaacagaaaaagtagaagaggagaataaataatcatgaaaaaagcagagattgtaaagagcatgaatggttttcttagtaaaaccagtttccagttaaagaagcatagtccggagattctcgttgtggctggagttatcggcgtggttacaagtgcggtaatggcttgtaaagcaacgacaaaagtgggtgaaattctggacaagacaaaagaagatgtcgaaacaattcataaatgtgaagcagacgaatccgtgaaggagcggtattccagcgaggatgcccaaaaagatttggcgattgtttatgttcagatcggtatgaaatttgccaaactgtatgggccttcagtcatactcggtgcattgtcaatcaccagtattttggcatctaataacattcttcgtaagagaaatgtagctctaagtgcggcttatgcagctattgataaaggatttaaagagtatcgcagccgtgtgatcgaacgatttggcgaagaggttgaccgtgaactgaaatataatctcaaagccaaaaagtttgatgaaacggttatcgatgaagagactggaaaagagaagaaagttaagaagaatggttttgtggtaagtccggcggatatcagcggttatgccagattctttgaaaagtacacgcaggatgaggatggaaattccattcttaatcctcattgggaaagcaacaatgaatataatttgatgttcatcaaagcccaagagcgttatgcaaacgacttgttgaaagcaaagaagcgcgtatttctgaatgaagtctatgagatgctcggacttccgagaacaaaagccggacagattgttggttgggtttataatccggaaaattctaaaggagataattacattgatttcggtctgtattctgataatctaagttattcggattatgtcaatggattcgaccaggcaatccttttggattttaatgtggatgggaacatctgggatttgatgtgagagataaatttataactatccctaggagttattacgattcttggggatagtttttatttgggaggaatttatgcgcaagttaatcaaagtaatagcggttccgatcttgtgtggtatcgtgatagcatcttcgttctttgtatccgaatttcactcagaaggggaagacgttgtagcaatacctagggccagcgttgtcgaaaagacagaaccggttattacagttttgcaagaggaatccattccaattgccactgaggaaatggagggatcagaagaagttataccgaaaatgtcgagagaagatgtagagttaatcgccctagttactatggcagaagccgaaggtgaatgtgaagaaggaaaacgccttgttatcgatactatattgaatcgggtagattccgaacattttcccgatacggtatatgaagtggtttatcaaccgaatcaattttcatctatgtggaatggtcgagtggacaggtgcgaagtccgagcggatatttgtgaccttgtctatgaggaactggagtcaaggagcaattacgatgttgtattctttacggcaggagaatacagtgcgtatggcgttccgatgttccaagttgagaatcattatttttcaaggtatgagtgaagaaaggagaatcatcatgcgtaatcttttagcatttgtgtcttatacactggcggcaatgtccggtatctgctttgttggtggaattgcaattctatcaacgggaagggagcattgatatggacggtctggagaatgtgatatcggtactggactatgttctggatactaagagaaaaagacatattatgggaggcattctgttgagtgtctcctttctttttggcggtttggcaataaccgtaatgacaattaaaaacgaggaggaagaggatgagcagtaaaggaatggttttccttgcttttattgctggagcagggatgggctctgtatgcacatggcaactgctgaaacggaaatatgagttgattgctcaggaagaaattgattctgtgaaagcggcttatgccacaagagagagtatagaaaaggccggaaagagtttcgtagaaggctttcgggacggacttaaagtagcagaagacagaactccgaaggaagagggtgatgtggacttcaaaaagtacgcatctatcatccggaaagagggttatacggattattccagaagtgtcgaggaaaagaaaggagaggcgtttgtggaaaagccttacgtcatttcaccggaggaatttggtgaatttgaagagtatgaaaaaatcagcctcacttactatgcagacgaagtcctggctgatgaaaatgatgaagaggtagacgatgtggatgaaattgtcggcgaggaatccctgaaccattttggtgaatatgaggatgactccgtatttgtccgaagtgaccggttaaagtgtgattatgaaatcctgcttgaccagagaaactattccgatgttgtaaaaacaatgccacatcgaatggaggagtaatgacaaagaacgagcttaatgatgcatattttaactggatgtatcagcttgtatttgatggaagatattcaaagaaattgtcgtatcaaaagcttttaagagagctgcatcgaatcgaatttacttacagtattccgatggatggaaatcgggcggaagatggagtggatttaaggtatcggtttggttatgaaaccggatacagcagctctatggtttccacctatttggataatcggacttgcagtgtgctggaaatgatgatcgcgcttgcgattcggtgtgaagaacatattatggacgatccggacatcggaaaccgaactggacagtggttttggaatatgattgtaaaccttggtctaggctctatgaacgattccaagtttgaccagaattatgtcgaggacgttattcagaggtttctgaatcgaaagtatagccgcaatggtgacggtgggctgtttaccgtaaatcacagccgatacgatttgagatctgttgaaatctggtatcagatgtgctggtacttagacgaaaatacttagaaggagagactactatgagccacagcgaagtaatgaagtggtttgaactttattttccagattattctggagatcggattgatatgtggtttccaaatgggagaaacagcatccgtatccgccagaaaaatggtcaggagtttatattcacttatcatagccagaaagattggaaatttgagacgattaccagctttctgaatggaatgaagggaggaaaaaagtaagatgtgtgaggttatgaattatatttttggaagtctcagcaattcggagtcggcaatccgatccattcggaaatctttgaataaacaggcccgctataaccggaaattaagcacgattgctcttatcatgacggttaatctggttctcctggaactggatcgtgtggagcaaaaaaagaggattgagaaactggaatcgacaatagaggaaatgaagcgcgataaaggagagtaaaaaatgagatgatcgactttttgatgatttccacacgtagtacaaagcgtggtgtaattgaaatctatccgaagttcattattaagaaaagctccgatctgatgattcgaggtggtgacttctacgctatctggattgaggaacgaggtttatggtctacggatgaacaagatgctttgcaactcattgaccgtgaactggatagatacgcagaagaaagccgccagcgctttgactctgagattaaagttcttcacatgtgggatgcggaatccgggatgattgattcctggcataaatattgtcagaagcaaatgcgagattctttccacatgctggatgacaaattgatattctccaatacaaagaccgataaaaaagattacgccagtaaaaagctgaaatatccgcttgaagctggcgatttgtctgcttatgacaaattgatgtctactctgtactctgaaactgagcgacagaaaattgaatgggctgttggctctgttgtatgtggagaatcgaaaaaattgcaaaagtttatggtcctgtatggagctgccggaacaggtaaatccacagtcctcaatatcattcagcagctctttgaaggatattattcggtctttgacgcaaaagctcttggctcatccagcaattcatttgcgttggaggcgttcaagagtaatccgcttgttgcgatccagcatgatggtgatttatcaagaattgaggacaataccaggttaaacagcttggtgtcccatgagctgatgaccgtaaatgagaagttcaaatcgacttactccaaccgattcaaatgctttttgttcatgggcaccaacaagccagtaaagattacagatgcaaaatccggtttgattcgacggctgattgacgtatctccttcgggaaataaactgaatccgagagaatacaaagcgattatgaaacagattgaattcgaactgggagcgattgcatatcactgtcaggaaatctatctaaacaatcctggtctatatgacgactatatccccattgcaatgctgggagcatctaatgatttctataacttcattatcgattcctaccatgtattcaaacgggaaaacggtacaaccttaaaggctgcctgggaaatgtataagacctattgtgatgaagcaaaagtaggctatccgttttctcagagagtttttaaagaagaactgaagaactatttccatgactacaaagagcgattcaatatggaagacggttcaagagtgagaagctattatatcggattccggactgaaaaattcgaagaggaaacgattgtggaaaaacaggaggaaaaaccgtcattattacaatttgatgcggtcaagcccgtttttgataaagtgtgttccgattgtccagcacagtatgcaacggacaaagaaacgccttctatgaaatgggacaaggtaaaaacgaagctgtctgatttggatacttctaaaacccactatgttaaagtcccggaaaaccacatcgtaattgattttgatattccggataaggaagggaacaaatccttcgaacggaatgcggaggaagcaagcaagtggccggcgacttatgcagagctaagtaaaagcggaaagggggttcatcttcattatatttatacgggagatgtgaaaaaactgagtcgtatttatgacgaccatatcgaagtgaaagtgttcacgggtaaaagctcattacgaagaaaatttacaaagtgtaatgatttgcccatcgcaacgattagctctggtttaccgacgaaaggagaagataaaatggtaaattttgaagcgattaaaagcgagaaagggcttagaacactaatcaagagaaatctgaataaagaaattcatccgggtactaagcccagtatcgactttatctacaaaatactggaggacgcatattccagcgatttgagttacgatgtgacagacatgcggaatgcggttttggcatttgctgcgaatagtacgcatcaggccgaatactgtattaagctggttaataagatgcagtttaaatcggcagacccttccacagcggggaaaaatgaagaagcaaaattggtattttatgacatcgaggtatttccgaatctgtttcttgtgaactggaaaatcgagggtgaaggaaagcctgtggtgcgtatgattaacccgactccaacggagattgaggaactgatgcgattccggttggttgggtttaactgccggcgatatgataatcatattctgtatgcaagactcatgggttatacaaacgagcaactttataacctctcgcaaaaaatcatcagcggcagccccaattgtttctttggagaagcctacaatgtttcttatacagatgtgtatgactttgcatctgctggaaataaaaagagcctgaagaaattggaaatcgagatgggtatccaccatcaggagttgggacttccgtgggatcaaccagttccggaggaactgtggaccaaagttgctgaatactgtgataacgatgtaatcgcaaccgaagcggcattccattatctgaaggctgactggacagcacgacagattctggcggatttggctggtatgacggtgaacgatacaaccaatacacttacccagaagattatatttggaaacgagcggaaaccacaggatcagttcaattacagaaatctcgcagagccggtacactatcttgatggagaaaccaaatctttcctggccgaagcgtgtcccgaaatgatggcacaaacgcatggtgacgaaggaagccttcttccatattttcctggatataagtatgaaaatggaaaatcgacatatcggggagaagaggttggagaaggcggctatgtttacgcagaacctggtatgtatggaaatgtggcattgctggatatttcctctatgcatccgcacagcgcaatcgcagaggttctgttcggcgtgaaatttacgagagccttccgtgacattgtggaaggacgagtcagcatcaaacacgaagcttgggacgaaatcaatcatatgctggatgggaagttgacgccatatatccagaaggtcattgacggagagatgacagcaaaggatttagcgaatgctttgaagacggcaatcaactcggtatatggtctgacttctgctaacttcgagaatccgttccgtgatccgagaaacaaagataatattgtagccaaacgaggagctctgttcatgattaacctcaagcatgaggtacaggaacggggctttactgtcgctcacattaagacggattctatcaagattcccgatgcgacgccggagattatccagtttgttatggattacggaaagcgatatggttatacctttgagcacgaggctacatacgaccggatgtgcctggtgaatgacgccgtctatattgccaagtataaagacggaaaatggacagccacaggaactcagttccagattccctatgtcttcaaaaaacttttcagtggcgaagaaattgtctttaaagatatgtgtgaaaccaagtcggtaagcagcgctttatatttggacatgaacgagaaacttccgcagcttacaaccgaggaagaaagggaattaagtgctattgataaggcttggcatagcccggctggaggaaaatctcttgaagatgttgcagctaaatatggatatacatacgaagaagcaggagaaagatacagcgaactttgtaaaaaagatgaggcgactcacaattatattttcattggacgagttggtcagttctgtccaattaagcctggagccggcggcggtttgctcatgcgggaaaaagatgggaaatattatgcagctaccggatcaaagggctatcggtggttggagtccgaaatggttaaagaactctccaaagaggattctattgatcgttcctattatgacaagcttgtagacgacgcagtggaaaccatatccaaatacggtgacttcgaatggttcatatccaacgatccttatattccaaaacctaaactcgaggactttatgaacattccagaagacgctgatgaggaaataccatttaattaaagaagaggagaagtatattatggcttacaaaaatgtacccaatatcattattgaaaacgcaagaattatttttcgaaacttccgaggcgaagagtctaaatacaatcgggctggaaaccggaacttctgtgtcatcatcgaagatccggaacaggcggagaaactctccaatgatggatggaatgtaagagtgctggctccgagagacgaggatgaagagccgagacattatattcaggtggcagtcagcttcgagaatatcccgcctaaggtgtatatgattaccagaaagacaaaaacaccgttggatgatgaatccatttccactttggactatgcggagattcggaatgttgatttgacgattcgaccgtattcttgggaagtgaatggtaagaccggaattaaggcttatctgaagacgatgtatgtcaccatcgaagaggatgagtttgctgaaaagtatgcggaggaagaaggcccggaagaagttccattccactaacaagcgacaaatagggtgcctgatattgccagcaaggtaaatgtcctaaggctagaggaaacagccctttattttgcgaaaggagaaaagctatggcattttggaatcggaaaaagaagcgaaccacagcgaaaccgaagatcaatgcttctatttccaaggtcgaaaaaccaaagaaaatatcagagaagcacgactttgtagttcataaagaggaacctcaagtaagcttatcaccgaagccgaaaatgaaaaatcttcccactttcaaacccgacagatatgagaaagaatttatgaacatctttcgtcaacttgtttcagaaaaaaacagaccgtgggatatttggaaagactttattgttatgtcggcttgttctatatcaaattctgtggacaaatctcaatttgatgagcgagagaaacgatacttggatatcattcgccattacagtaagtcaaaacaggaactttttccacagttgtttgcaaatctggtcatgtctttagaaatgaatccggagcaggattttttaggaaagatgtatatgagcttaaatcttggctacgatgagttgaaacaaatatttactccttatgacatgtgtcggcttatggcaaaaatcaccattacggatgtaactgagaaagtaaggaaagatggctatattaccatcaacgatccatgttgcggagcgggagccaacttgattgctgctattcacgaagcacgaaagcaactagaaaaagaaaattataattatcaaaaccatttattagtttccggacaagacattgaagaagttccagctttgatgtgctatattcaactttctcttctaggaattgctgggtattttaaagttggaaattctttgatcaaaccaatgactatggctgatgatttgaagaattactggtttacacctatatatttttcagatgtgtggactatgagaagattatttcacagtatatgaaagtttatgaggagggataagcgtgaatgaacgattgaaagcattagaaaaagagctggatagtctgttaaatatggctcccatagaagatgactgcacgaagaatgaaaacgagatgtattcggatatggcgaacctgaaaaacagcataacagcggttcttgaggagcaacggaatggccgttgaattgtatgactatcaaatagcagcagtaaaaaaaatgagaaatggttgtattctgtgtggcggcgttggaagcggaaaatcaagaacagcattagcttattactatctccagaatggcggaaatccggattgcttgatgggggttgaggattatgttgcgatggacgatcccccaaaggacttatacatcatcacaacagccagaaagcgggacacgatggaatgggagggtgatctttcgcccttccttctttcggttcacgaggatgtcaatctatattcaaatcagattgtcgtggattcctggaataatatcaagaagtacgaggatgtaaaggatgctttctttatatttgacgagcagagagtgataggctccggagcttgggtgaaggcgtttttgaaaatcaccaaatcaaatcagtggattctattgtctgcaactccgggagatacctggcaggattatattccggtattcatcgcaaatgggttttacaaaaaccggacagaattcatccgagaacatgtggtttatagtcgattcagtaaatacccaaagattgaccgatatttgaatactgggagattgattcgactcagaaattgtattttggtgaatatggatttcaagcgtcagacggtttctcatcacgaagatatatttgttcgatacagcatagagcgatacaaagatgttggacgaacacgatgggacccgtataagaatgagccgattgcgaatgccgccggtctttgctatgtatggcggaaaatcgtgaatacggacgagtcacgacagatcgccttgatggaaattgtagagaagcatcccagagccattatattttacaactttgattatgagctggagcttttgaaggggttgtttcaaatttatgaagatgatgggatttttgaaatcgcggagtggaatggccataagcaccagccaattccagagtcaaaaagctgggtatatcttgttcaatacaatgctggagccgaaggatggaactgcatcaagacagataccattatattctactcacagaactattcttacaaaatcatgcagcaatctgcggggcgaatagacaggttgaatacgccattcaaagatttgtattactatcacttgaaatctcgtagtgggattgatttggcaattagtaaggcactgaaagataagagagattttaatgaatcgaggtttgtgaagtggtgaaaggagatcaaccatgaacgaagagtatttggaagtggattttaaaaagtattgtaaaacctgtaaacacaaggaattgggagaaaaattcgacccatgtaatgagtgtctggattatggatacaatctcaattcccagaaacctatgaagtgggaggaaaagaaaaaatgagttaccaatacgatcgatatttggcgcagcataaatctaacgttgaagcaggatttcgctggttgcagaaaaatctccctaagatcacggaagccagcggcgcggagcataatatcgtatttgcacatgaccaatccaaaacggaggctgatgaatacggcccctatgatatttacttttatggaggaaatcgctcttattcagtagttgaggattttagaaaagcttggttattacacattcatcgcaaccctcatcattggcagtattgggtactgattaacgatgatccggaagaaggcgaaatcattttagagatgccttactgttatattctggagatgatttgcgattggtggtcctttagttggtttaaaggaaacttgctggaagttttctcctggtatgaagaacacaaaaactatataaaactgcatccgaatacgagaaaattggtggaggatatcttaggacgcatcaaaaataaacttggggaggtgatgacgaatgaaatcaacagatagtgttatcgtgagttgggatttttctcatggaaaagatgttggtgttctgattgttggaaagcaggagaaaggcaaagtcgaaatcatcaacgcctatcagggagaagaggccaaagaaatttatcaaaagctggtattccccaaatcaaagaaaaccagttttagcaaggagaaaaccacatgaagcagccgaaaaaattaaccagagagcaaaaagaatgcttatctgctcattatttaaactgtaaagattggatgttggttgaggagacggaattctattaccgcattatcaacaagaatacaggaacgataaagagcgtggataaattcagaagagtaaaaaggagaaaaaatcatgaaaacaattaaaaacaactggaaagtagctttaattgtagcagttggtattattactattattttgttaggtgtgttttgtatacagagttcccagaacagagcatttaccttggaagagcaagttaatactgctgattctgacattaaagttcaggaaaaacgacgtgtagatttggtttacaaccttgctaattgtgttaagcagtacgataagcatgaagcggaaacattgacggcgattgttgaaaatagaggatctaccggtgatatcgaaaacgttactacagctatcacagcggtgtcagaagcgtatccagaattaaaatctaatgaaaattataaagagttaatgaatgaactttcaattacagaaaatttaattgcagaatatcggagtaactacaataagcaggtaaaagaatacaaccgatatatacgcaaattcccgacaagattttttctcaatattctcggatatgaggttcggaaatatacctatcttgattatagtgctcctgccgatgctccgcagaatctgtttggagagtaaaagctatgagaggacgcaagcgtagaagttttgacttcggaaatttcgagattacgaaacgggaaatactggtaagtgtatcgattgtcgctattatgcttctgattggagtccttaacgctggaaaaatttcggattatcaattggataaaaatgaaaaatacaacaaggcaataaaaatagaatcgcaggaactgtttgagtatggaatgaggacgaatgccgggaacgcttttgtatatggcgatttgaaagcagtcgatacagttacatatcctgaaattggtggagaatacatttatattgaaaaagtgaaagaacgatatacaatgcatactcgccaggttgcacatacaacaactatgaatggaaaaacccatacttactatacaacggaaacctattggacatgggattatgctggtagtgaggaacggatatgtgatgaaatatcatttttaaatcacgttttttcagttagtaaaatcgacctgccgggaaaggaatatatagacactgttaaagaatccgggcacattcgttataagtattatggagttggtttaaactttaccggaaccatatttacagaactggctgataaaacaatagccgataactcaccattttatgaaaatatgaagattgatgaaactatagaatacttagaaaccgattttgcaatgtggatattctggattatttggatggtcttaattggagtctgtgtttacagtttctattatatcgacaacaaatggcttgagtaattggagaatttgggagagggtcgagcaataatgagggcgaccacaaggcggatatagtagttgcataagggatgagtccgctataagaaaggagaaaaaaacgtatgaatcttaaatcagtgaaaattattgcggtggatttcgatggaactttatgcgaaaacagctggccagaaatcggagagccaaacgaagaactgatagagtatcttcgtaatcggaaaaaggatggagataagttaattctctggacctgccgcgtggaagacatgctccaaaaagctgttgagtggtgtaaggagagaaatctggtgtttgatgcggtcaatgagaatcttccggaaatcatcgagaactttggttctgataccagaaagatttttgcaaatgagtatatagatgaccggaatatttggccgctgaaagatgatgtgaccgatgttctttatctttgcgatggtaaaagttgtggcgatacttgtccgggtgtggaatgtaagcatacatcggatatatcccacgctaagaattttgcaaaggatgcttatgattcttattgggagaaagaagctgaatctgaaactaaagatcctggttctcatgagaaatccaatatggaatcatgggcggagagagaagtggaaattgcctgcaaacgcgaagcacctgatcgtgaacctggagaatgggactacggatgtgcttgttacgaaagtgcattaaaagcatttaatagcctttgtgaagacggtcatagcggtttcagcattggtatgacaaaacagattctgaatcggttgatcgaatgtaagccactcacttcgattgaggatacagaagacgtgtgggacaataccacagactttggtggacatcgcggggaagtcgcaaactatcagtgtaagagaatgagttctcttttcaaatatgtatatgtggacggctctgttaaatatcgtgatgttaatcgcttctatggcgtgaacctagataatccaaatgcttcctatcatagcggactgattgaccgagtaatggaagaaaaattcccaattaccatgccatattttccagagagtaagccattttatgtgtattgtgaagagttccttactgacagaaaaaacggagactatgatacggttggaattctttatatcatcaagccggatggagaacgcgtggagatcaatcggtatttcaaagagggagaaaaggacttcgttgaaatcgacgttgctgaatatgaaatacgccagaagatgcatgaggaacggctggagaaaatgaagaaagactgtaacggctgcttcggagcagcgaacaatgattgtctgcgttgcgaggaggaacttcagtatgaatcggaataggtttctccagggattaaaaagcaacatccagctttccgaaaaagagaggcggcggattattcggagaagtcttcagaaacattcctggaaaacaaaatgtaccgtagcgatggaggaattcgcagagcttcagcagcagattagtaaacaggttcgaggttatggcgatagaattggactcttggaagagatggcagatgcttatatttgtctgaacttcctggagtccatttttgatattaagccagaggatttacagaaagccattgatgtgaagctggaacgggaaaggagaaatttgtgatgatcgatttacatgtagaggggtattgtcaagaatgcgcgggttttcaaccatgtattgagagattgtatgcggatggcaaaattatcgcacaaaccgtttactgtgagaatcgagaaagatgcgctaatatctatgaatttgcgcacgaaaaagtaggaaaggagattggtaaggatgattaaaaacgaattcccagagtggatttatagtccggtcaacgatcctatgtggaacaatttatttgaacgaattgaagatgcacttggttttaaactcttcatttggcagaagacttatattatgggattaggatatagatgttcaggacagacgactgccgatgttcttagaaatttagtaggagaacgtacatccgagtcgatatatttggaacgacctaaaaatcgcatggaagatttttatcagaaggaacttatcgagataaaaagaaagctggacgataaaggtataatttcaagagacatagagaggaaaaaacgatgacgattgagcgtttattaaaagaactcggagaacgccattttgaagttctttggagatatgaagtcttaacaaattctatcgttattcagatggataaaagatactgccatcaatggtataggttagctcgtaaagttacattagatgattttcatcattttataaccgatcagtttgaagatactatggttcgatttttaaaggaaatggctcaagaactggagtatcaaattaaagtcgcaccggaacccatgaaaggagaagacaatgattaaaattgaaaacgttgaagttatgggttgggaacatgctattcgagggatacggaacccgatgaacagttgggagaaatccgatagtggaatctgcaaaggtggggatgatggtatcggatgtgagaactgtgccaattatgattcctgcgagcatacatacgatcattcctggcagctcggtaaagcagatcacgatttgatgatgcgacttgcggatacgaggtatcggcgaatgattacggtgaatctggacatcacggctccgctgtattggtggaaagatttttatacctacgaggttggaactgttgcgaactcttgtagcacgatgcataagattactgcgaaggaatttgagtggtcagattttagcacagaacatcttttgaattttggaatgtggggtgaacagtttactgatgctgacgcaatatatgctccggctaaaacaatgggatgtgtaatttctgctctcaatggagctagggatagatatcttgattttaaatcaagaggttccgaatggacagagcttgcgaaacgggcatggtggcagatgactcagcttcttccctcttcttataaccaaaaatggacagtcatgctgaattacgaagtgctggccggtatttatcccatgctaagaaatcatgagctggatgagtgggtaaaattctgcaagtggattgaggcgcttccatattcagacattatcattggtagggtgtggagataaaacatgattcaatactatgagtctatattttacaacaccttggaagaactattagcaacttggaaacccaaccatccggatgttttgcggttgaaagcaaaatatggagaaggcattcaatttagtaccatcgcacatcgaagtggtgtgaagcctcaatttgaactgagttgctacaaactaaaaaaattaaaaggagcgtaataatggcatctattcattatgtgattttatttagcattgtatatctttatgtatatgctctgatttgtagaatctgtaaatgcattgaacattgtgctaccgccagagcttattctaaattaagagaaaacggagttatgactaaaatgagcgatgttgaggcgggcattattaaaatcggaaaagagaaggaggatgcaagaaaaaatgtggagtcataagttagtaaaaaataaaatccacgccgttctgtttattcttctaggagcgttgtcagtcccggttgaatgggatgcaacgttctttttatttaccctgattatgggtggatgcttattcttttcgaaagagaattggatttatgaaggagaggaagacgatgggacgagccgagagaagacgtgctcaaaagttaaagcaaaaagagaaaaccactacatacaatctcacaaaggcacaactcgatgtcatggttcgggaaaaaatcggagacgaacttatcagagtaaagcaggaggctaccgatgatgcggtaaatactgcgatggttctgcttctgactttgccattggaagtgctgatggaccattattggacaaaatcctatgcgaagagaattccgaagttcaccgaacgagttctggaatactacgaacgctggcaaaatggtgagttggatatggaaaaactgaaagaggatttgtgggaatatggtggtgtgaaattagttgaaagtgagggtgaagcaacatgaaatgtgtaatgggagttattgcgtgtattgttgggctcgtgggtctgatcggactgattgtgttaaaggcgaccagctcttctgcaacttatatggacgattcgttccggtggggaggacgagatgggcgttaaaaatgattatcgtaaaaatgcagaagggtattccgatccgactgcctgtgaagcactgagaaacattgagcaggaagaagaacggttccataagctgctggatacgatttttacgctttgtgaactgtccgactttcacattgaagagcggatcgtcattaaggataaacgaaccggacgaatttggaggtgattatttatgggtgattggcagaagactatagatgctcttgtagaagcttgggaaaaatttacgacatctataaaagagatggtggatgccctgaacaaggcgtttggagtttcgtcacctgagaaagagaagaaaaagagtctcagctctccggctcgatatgggatgtctttgcggaaatctcgaagaaaatccttcgttaagcagtattcctaccggccaattgttcagaagcacttaccttatcagagaaggaactattgaaaatcgtccgtacaaagcttgaaagtgggtgaaaatcacgcccacttttaggttttgaaaaatgggctttgaccacttttatgtgggctttttgagaaacgcagggaattttggggaaggattcggacgattttggtcaaatttgtggccatttgcccactttctgcccacttttaaaaccccaatttggtcagtaaaaacccagtatttatgcgggtttgcgggctcaaagcccactttcccactttttttcttaaactattatgatagaaagtttaaaagtatatagtaatagcacaaaaaaagtgggtttttggccacgagcaaaaaaaatggaggaaatcatgagcaagattagttgggagagcttgtatgaaaattttaagtcaatctatccaaggttgtcgcggtcatccgtatattttcgtccgttcggttatatgagtatagtagtgtattttgagaatggaatgaagatggtctatgatgatctcagaaaacaggcatatatcacagcttaaagaaaatgtcaagagataatgaaaaatttcttttcttctggaaaaatttgtgatatactgtaagagccacacaatctaatatcgaatccgtttaagggaattcactttggtaaaaggtgtattctctctttactcataccttaaacggaacgagattgtgtggcaacaatgggagaacacttttttaggtgcgtctcttgttggggccgcaccttttttattgcgccaaaatctatctgactagaggacggtgacattgtggatagaccatatacagaaatacaagttctaaaaaaattagatattcctgactttcgtcatctgacaaaggataaagtcatagcatttgctacaatgattccgggaatggaacctgaagtggcaaagaaggctttagagcagtttcctaacttcgtatcgacatctcttgaaattatgaaagagtatcgaggtattctacaacagttgatgaatgatgacagggatggtgcggaaatatgttacgatatgtataatcgtgtgatgaattctcttgagtgtattcttgaaaatgacaatttgacctttaaagaaaagacttacatactcgaacaaatgagagaggttgccgatgaaatatcgaaaaaggattccgaaaagtcggctaaccgcataaagttaatagggattgtgagtggagtggtggcgggtgttattacagttttaggtaccgccattggggtcaatttaacttctaagcaaaacaatattcccggcgatgacgaagaagaaaaccattaaaaggagattgaaaatgaaaaagattgttatgtttatgatcgcagcatttatgacgtttttgcttattgcttgctctgattctcagacacatgatggcgaagcaaagacaccttctgcatcgggagctcaaaaaggaagggattatcagtcagttgttgaagattttgaagaacgtggatttacaaacatatcgttagttgcgcttgatgatttaataacaggttggctgacgaaagatggagaagttgaaaatgtttctgttgatggtgatgaaaattattccgctgataaatggtattcaaatgatgtagaggttattattacttaccatacattttcggaagagagtgatttggaagaagatgaggagtcgaaggagtcaataagcgaaaaagccgaagacaaagcagtagaatcgatactcacaattgaaacttgtgctgatctcgaaaaacttttatcgactgaaggagaaataaacgatttttattccacttttgcagaacaatataaaggctcaacgatagtattcgatggttgtattacctacattacaaaccatggcgattacgatactcgatatgatattttgatgagcggcggtaattatgtagatgatgaaatagtcaatcctggaccaatctttaagtttgaagatgtgaatacttatggaatgggaatcgaggatttatatcttcctgattatataagtgtcggatcaaatgtacatgtgaccgctgaagttgagtattttagtgagaatgaaggtgttttttatctaaatcctgtgaaagttgagtcccgataaaataaagaaattatttagcctgtacctattggaattgggggtacgggctatttttatgttttcatttgtttctttttgcgcgcgaaaaatacatcgactgttatgaagagagagggttaaaatggccattctctcttttattttggagaaaggaggcttacttatgctggaaagcgaatttcagaataaactgatccaagaactgaaaaaaatgttcaaaggctgcattgtaacaaaactggattccagccacattcagggaattcctgatttgctgatcctttataacaataagtgggccactttagaatgtaagaaaagtgttcgcgccaagaaacaaccaaatcaagaatattatgttggacgaatgaacgagatgtcgttctcaagatttatttgtcctgaaaataaggaggaagtgttacatgatcttcaacaagcattctgctcttgaagggcaacacgcctttcttggcgcaagtaaatatcactggattaactatgacgaatccaaagttgcagaatcgtattcaaaattccttgcaactcaaaaaggaacagagcttcacgattttgcggcaaaatgtatcacacttggacagaaacttccgaagtcccagaaaacattgaatatgtatgtgaatgatgccataggattcaagatggttcctgagcagcctcttttctattcggagaattgttttggaacaacagatgcgattgcatttcgaaatcgtatgcttcgcattcatgatttaaaaaccggcgtcattcccgcgcacatggagcagcttgaaatatatgctgctcttttttgtttggaatacaaaatcaagccagccgacattgaaatggaacttcggatttatcagaacaaccagattctttatgagaatccaacggctgaaaccattgttcccatcatggacaagatcatcacattcgacaaagtaatcaacaaaatcaaagaacaggagggctaatttatgaatccgattgcagaagaaattttgatgcattatggaatgccccgccgttccggtcgttatccgtggggatctggtgataatccgtatcagcatagtggagattttctgagtcgagtggatgaactgaaaagtctgggtatgagtgataccgaaattgcaaaagccatgggtttaaccaccactcaataccgtacgcagaaatcgttagcaaaagatgaacgtcgtgcgttggatgtggcgagagcaaaatctcttcgagaagatggtttgagcttaaatgaaattgcgaaagaaatgggcttcgcaaacgactcttctgttcgttcgcttttgaatgaaaattctgaggttcgtatgaaccaagctaagacaactgctgaaattatcaaaaagcaaattgacgaaaaaggcatgattgatgttggtgccggtgtggaacgtgaactcggaatttccaaggagaaactgaatgaagcactctatatgctggagatggagggttatcctgtttacggcggacgagtggatcaggtaacaaatcctgggaagaaaacaacgcttcgtgtgatttgtcctcctggaacagagcataaagagatttacgattttgagaatatcaattctctgaaagattatgtctctcatgatgatggggaatcttttgatcccaaatttgtttatcccaaaagcatggactcaaagcggttgcagattcggtattcggaagatggcggcgaattgaaggatggtgttgtggaaattcgaagaggtgttgatgacctgtctcttggagaatcccattatgctcaggttcgcatcttagtcgacaagacacactacatcaaagggatggcggtttattcggatgaccttcctgatggtgtggatgttatgttcaacaccaataagaaaaaagggacacctaaaatggatgttctgaaaccaatcaaagatgacccggataacccgttcggttctttaattaaagagggagttaatgacccggataaccccactactgaaagaggaggtcagagttactactatgataaaaatgggaagaaacagctttcccttatcaacaagcgagcagaagaaggggattggggcgaatgggcagacaagctcccatctcagtttctgtcgaaacagagtagaactttgataaagaagcagttgaatttagcggccgcagacaagcagtctgaatttgatgagatttgttctcttacgaatccaacagtgaaaaaggttcttttgaaatcttttgctgatgactgcgatgcagccgctgttcatttacaggcagccgctcttcccagacagaagtatcaagttattcttccattgacatctatcaaagacaatgaggtctatgctccgaactacaagaatggagaaacagtagctcttgtgcggtatccacatggtggaacttttgagattccaatcttaactgttaataataagcagccagaaggaagaagagttcttgggaatacaccagcagacgctattggcattaacaaaaaggttgctgaccgtctttccggagctgacttcgatggcgatactgtcatggtgattccttgtaattcttctaatagtagggtgaagatcacttccactccacaattaaaggggttggaaggattcgatcctaagatgtcttatgggaccgttaagaaaggtgacgattattgtaacagcagcggtcagaagattaagattatgaaaaacacccagacagaaatgggtaagatttcaaatctaattaccgacatgactttgaaaggtgctactcaagatgagcttgcgagagctgtacgtcacagtatggtcgtcatcgatgcggagaagcataagctagactacaagaagagtgagcaggacaatggtattacggctttgaagaagaagtaccaggctcacgatgacgatgatggttatggcggagcttctacgctgatttctcgtgccaagtctgagacttctgtgttgaaaagaaaaggaagcccgatcattgacaaggaaaccggagaacaaagctggaagagcgtcagggaggagtacatagataagaacggaaagacccaggtgcggactcaaaagagtgccaagatggcagaaaccagagacgctcgcactctctcttctgggacaccacaggaagaggcgtatgcggactatgcaaatactatgaagtccctggctaatcaggcccgtagggagatggttaatagcggaaagatagcctattctgcatcagcaaaacagacttaccagacagaggttgattctcttatgggtaaacttaatgtggctttaaagaacgcccctcgcgagcgtcaagcacagaccatggcaaactctattgtggccgctaagaagaaagacaaccccgatatgacaaaggcggaaatcaagaaggctaatcaacaggcccttactgcggcccgtactgctgttggtgccaagagaacccctgtcgagattacagatcgtgagtgggaagcgattcaagccggcgctatcagcgagaacaagcttactcagatcctcaacaatacaaacattgatacagtcagacagagagctacccctcgtgcaacaacaacccttagctctgccaaagtaaatcgtattgcggcgctgaatgcttctggctatagcactgctgagatagcagcagctttgggtgtttccagttctactgtgtcgaagtatctgaatggaagggagtgaacaaagtaaatggcgaagaagtgtatgcttacaaccattgacaatccttttgatccatttgaacagttcacttcatggttactgtttgatgaggaaaaaggttatcattcatgttcgtatcttggtagaattgccagaacatcggaccaactctctgatgaagagaatgacttggaagttgaacgagcaattgacgagattgtaaaatacgatttccgaaatatttacaaaaaagttacgcgagatgcggtggctgtctaggtatcagatggtataagggggggggcagcaaaaatcgcaccccctccgtcatcgcggcggtctttaaaaattccccgggggtatttttcggagaatgtttttaccttccggcagtatttaacagagctcataaggttggctaagtaataagctgtggttctttttactcttttttctcctttcggtaaaaaagtttcagtcagccttgtgggttcttttaaatactgccggaaaacttttatgaaactattgaagaacagacgggaaggaggcagtaaatggctagaaaagtaaagagttctaaatcgatgggttcttccaaaaagattcgtcctgctttgactccggaagcaagggaacttcagatgatttctctggctgttgacctggctgaaagacaattgctggaagggactgcttcttctcaggtcattactcactatttaaaactgggctcttccagagagaagcttgagagggagagactggaggaagagaacaatctgttgcgggcaaaagtaagagctattgactccacagatgagattaaagatctctataaggacgccatcaatgcgtttcgtatatacagtggacagggtaacgatgatgattaggacatattcggaattatcaaaattgaagacttttaaagaacgatacgagtatcttcgtttgggcggagtcatcggggcagacacgtttgggtttgaccgatatctgaatcagattttctatcggtctatggagtggaagtcagttcgtgattttgtgattgtgagagataacggatgtgacctcggaatagaaggtcgtgagatatgtgggaagatattgattcaccatatgaatccgatttccgtggaggatattttaaagagaagcgattttcttttaaatccagaatttctcatctcaacaattcttacaacacataatgccattcactatggagatgaaagtcttcttgtcacagaacctattgttcgaagcagaaacgatacatgtccctggaaacattgatggagaggaggttatagcgattatggaaagcatactgacatcaattaaaaagatgctgggtattacagaagagtatgagcactttgattcagatcttatcatacatatcaattcagtatttatgatcttgacgcaacttggtgttggtccaccatctggattctctgttcaggataaaagtgctacatggaaagaattcatttctgacgagacaaagttgcaattggtaaagtcgtatatgcagatgaaggtaaagctcctgttcgatccgcctttgagttccgctgtaatggcgtctatggaaaagatgattgctgaggcggagtggagactgaatgttgcagcggaaactgacgaagaaaagtccgaagaacacgagtcctacgatggcgagtatagggtaacaccgaaagcattccaatctcaaatgctggatactgagaataaagttctggatcgaaatattgtggtaacagaagttccgtattacgagactgggaacgcagcaaacggagtgacatcatatatcgcaaaggagggagattcaaaatgagtaatgaagcattactacagcatcacgggattcttgggatgaaatggggcgtccgaagaactccagaacaacttgcaagagcaagtggaaagaagacgagttccgatgatgaggtgaagaagatgtctgattcggaactccgctcaaagatcaaccgtcttcaaatggaaaagcagtataaacagcttaccagttcagaaatttctgtcggtagaaagtttgtacaggatgtgctgaccaatgccgcaaagcagaccgccaccaattatgtatcgaagtacatgacgaagggaattgacgcggtcatcaagaaagcaacaagcaagtaggtgattcaattatggcattatcaaacactgccgttcccaaatactacggcatgtttcgggatgccgtaatcaggggagagataccggtttgtaaagaaatctctatggagatgaaccgaattgacgacctaatagccaatcctggtatttactatgatgaccaggccgtcgaaggatggattgcctattgcgaatcagaactaacattgacggacggttctgatttgaatttgctggactcgtttaaattgtggggtgagcagctttatggatggtactacttcgtcgaacgaagtgtgtgggagccaagttctgacggacatggcggccgatatgtgaataaaagaatcaagcagcgtctgacgaagaaacaatatcttatcgttgggcgaggagctgctaaatctttgtatgacacctgtgttcattcctacgggctgaatatcgacacatccacgactcatcaagtcacgacagctcctaccatgaaacaggcggatgaagtaatgtcaccttttcgcactgcgattacaaggtcgagaggtccattgttccggtttctgacagagggctctttgcagaatacgactggttctaaagcaaagagaatgaaattggcctccaccaaaaagggtattgagaattttctcacaggttcgcttttggaagtgcggccaatgtccatcgcaaagcttcagggattacgacctaagatttctacagtggatgagtggctgtccggtgataccagggaagatgtggtgggcgctttagagcaaggagcatcgaaattggatgactatatcattgttgccacgagttcagagggaacagtgagaaatggagcaggcgatacaatcaaaatggagttgatggacattcttaaaggagaatatgtcaatccacatgtttccatttggtggtataagcttgattccattgatgaagttggaaatccagacatgtggttgaaggcgaatcccaatatcggtaaaacggtaagctatgagacctatcagctcgatgtggaaagagcagagaagtctccggcggccagaaacgatatcttggctaagagatttggattgccgatggagggctacacctattacttcacatatgaagaaactcttcctcataagaagagaagctattggcagatgccctgctctttgggaattgatttgtcgcagggggatgacttctgtgcttttacgttccttttcccgttatcgaatggttcctttggagttaaaaccaggaactacatttcttcatcgactctgatgaaacttccggcagcaatgagaattaaatacgaccaattcatggatgaaggaagcctgattgtcctagagggaaccgttttggatatgatggaagtctatgaagatttggataaccatatcgcagaatttggctatgacgttcgttgcttggggtatgacccgtacaacgcaaaggagttcattgagcgatggtcttctgaaaatggcccgtttggaatcgaaaaggtaatacagggtgctaagacagaatccgttcctttgggagagttaaagaaactttctgaggagcggatgcttttgtttgatgaagaacttatgacctttgcaatggggaactgtatcgttatggaagatacgaatggaaatcgtaaattgctgaaaaagcgatatgacgcaaagattgatgctgtggcagctatgatggatgcgtttgttgctttcaagctgaacagagatgcttttgaataggaggtgacgatttcaaaatggaagtttcaattggttccaggattaaacatgcctggaacgcttttttaaatagagacccaacaggtttctatcgggacataggggttggatattcgtacaggcccgaccgtccaagactcacaagaggaaatgaaagatctatcgttacctctgtatataatcgaatcgcattggattgcgcttcaattaacattcaacatgtccgtctggacgactccgaaagatttcttgaaaaaatttcttcggggctaaatgattgtctgaatttatcagccaacattgaccagactggacgagctttccttcaggatgttgttttgtcaatgcttgatgagggatgtgtggcgattatcccggtggatacggatgatgaccctgacactacaggctcctataaaatcgagacaatgcgaaccgggaagattctggaatggtttccgaatcatatcaaagcaagagtttataatgagcggactggattaaaggaagacattgtagttccaaaagatacggttgctattattgaaaatccgctttatgcggtgatgaatgagccaaactcaacgatgcagcgtttgataagaaaactgaatttattggacgttgttgatgagcagagcagttcaggaaaactcgatttaattatccagcttccctatgtgataaaaacagaagcaaggcgtcaacaggctgagaagaggcgtgtcgagattgagcgtcagttggccggttctaaatatggtattgcgtataccgatggtacggagcgaatcacacagttgaatcgttctgtggaaaataatctgatgaagcagattgaatatctaacgagtatgctatacagccagttaggtatcactcagagcatattggatggttccgcagacgagaagaccatgctgaattactacaaccgtactattgagccgatcatttcagcaatcgttgacgaaatgaaacgtaagttccttactaaaacagccaggtctcaaaagcaatcgattctgttcttccgtgaccccttcaaacttgtaccagtagctgatctgtcagaaattgctgacaaattcacaagaaatgagattatgacatcaaacgaaattcgccagattattggtatgaaaccgtctgatgatccaaaagctgatgcgctgaagaacagcaatatcagtgaggccaaatctgatccttcaaacggtagttctgatgtcgaatccaatgaaagtgatgccggagccgattatgacagtatcgtaaacgagctgcttgacggtcttgaaaaggagattgatgaaattataggaagctatgtttcggatgatgaggaggagacataatggatattaacgagcctcttcaacactatgcatctccttattacgacccggtgaaagctcatgaatattatatgagaaccagagaactcaaagggcgtcgttccacaacgaagcttaacgatgagggaaagaaagtctgggcttatacaaaaaatgagatttctggtgagaagaaagaaaaggtaaaagaagaacaggaaaaacggaaacaaaaaattgctgagctgagagcaaaggccaaggcgacccgagagcagatctcggctaaattaaaggaactgaatactcagcttaccgaggaatcttcgtcaagaaggagtagggttgactcccgtaaaaaatctgatttggaggatattggagaagaagcagaagaccagaaagagcgtatcgatgaaaagaagaatactgagatcgaacgcttaatggcaatagaaattccatccgggttatccaaagaggaaagggcaaagcgagtagcggagcgaaatgagaaaatcgcaaagcttcgtgatgatgccagcgaggataaatctaaggtgagtgagcaggcgaaagctgaaaaggaagaggtgagaacttccgcaagtcttaagaagaagcgaattaccgaggacaccaaagaagaaagggctgataattctgcgaatgctaaatcggaaagagaaaaagttagtacagagttaaaggctgccgttaccgccgcaagggaagcttataaaggggcaaaagaaaatcttgatgccacttatgaagatctttatcagcaagaatttgacaagatagcttccgaatataaagcggtaaagaagaggaaacggaggaagtagcaatggctttcgcacaatactgatagaaggagtgattttcaaaatggagaaatacgattttagtggttgggccactagaaacgatcttctttgcaccgatggccgtaccatcaaaagggatgcgtttaagaaccagaatggacaaactgttccactaatttggggacataatcattccgatcccaatcgtgtactcggtcatggggtactggaaaatcgtgatgagggcgtttatgcctactgtagtttcaatgacagtgaatccggacaggcagcgaagaagctagttaagcacggagatgttcgttcactttctatttgtgccggtcagcttaaacaggccggagcgaatgtgatgcatggcgttatctatgaactgagccttgttctggctggagctaatccgggagctttcattgattctgttatggctcacggtgagacttcagaagaccgtaccattattggatatgacgagaacattatgatttatcattccgccgaggaggatgacaaatccgaggaaaagaagacggaggagaaatccaaatctaaggaagataagacttctgaagaaaaaactgaggaagatgacgagacaattgagcaggtatttaataccctcaacgaaaagcagaaaaatgtggtttatgcaatgatcggacaggctattggggaaaccgataagcctgaagataaaaatgatgacgattctaaaggaggaaataccgagatgaagcataatgtgtttgacaacgataagaaaaacgaaaccggtggctttctgacgcattccgcacaggaagacatcatcaaggtggcgaagaccagccaggttggtactttccagacagcgcttcagctttatgcggagcagaacggtcttcagcatgatgctgtcagcggcggatttgttcagaccggcgacggaaatgtgacgagtctgttcccggaatatcaggaagtgcgtccgggggctcctgaactcattaccaatgaccagggctggattactaatgtgatgaagaaagtacataagagcccgatttccagaatcagaaccagccagaccgatattcgcggtattgatacacttcgcgccaggggctacaagaaaggaaaagagaagaagcaggccggaaatttcaagttggtacgcagaaccaccgatccgcagaccgtttatgtgaagaatgctctgcatcgcgatgacattgtcgatatcacggatttcgattatgtaaagtatctgtatgacatcgaccgcctgatgctcaatgaagagctggctattgcgatgatgctgggggacggtcgtgatgatggtgatgagggtaagatcgatccggataagatcagacctatctggaccgatgatgacctgtataccattcatgcagatttggatgttgccgccgcaaaaaaggaacttcagggtactaataccggcgtgaactttggcgagaactatatttacgctgaagcaatgatcaatgcggttttgtatgcaagagaggattataagggtactggcactcccgatatgtacatcactcctcacatgctcaatgtaatgctcctggctcgtgatatgaacggccgccgcatttatagctctaaatcggagctggcttctgctctgaatgtcggggaaatccatacggctgagcagtttgaaggcaagacccgtaagacggacgacagcaagaccaagaagctgcttgctatcatcacgaacctgaacgactactctcttggcgctacgaagggcggcgaagttacccacttcacacagttcgatatcgactttaaccaggagaagtcccttctggagacaagatgctccggcgctctgaccagagtgtactctgcaattgcgattgaagaggacgtaacggtaaacccctaatcgacttctccgttagtcccgaagatggagaagtcaatctactcgggaaaacagtaaaatcgttacaggagaatattgttatcggagagtccgagattaccggtacattgaagcatgttactggatacacgggattcagcagtaatacctctgagcaggaaggaaactatcttgctttgaaagtggacgctgattcggaagatgcggttgtgaccatcgaactcgtaggcggcacgaaaggaccggttacgctcgatgacgacatgaacatcgtactccttattaagaataaggatactcagagcattaaggtgacggtagacgatgggaaagattccgctacgaagacatatggacttaccagattgattttggagacagagtaaaggagaaaattcaaaatggcaaagttttttgggaaaatcggttatgcagtatcaaaggatgttcgtccgggggtttgggatggggaaattactgagcgagagtatttcggcgatttgattcggaataccagtcggtatcagacttccgataaactcaatgacgatatcaacatttccaatgagatcagcattgtggccgatccttttgcttatcagaattttcacgcaatgcggtatgtcgagttcatgggagagaagtggaagatttccagcgttgaagtacagtatccgcgtctgattctgacggtaggaggtgtatataatgactgatcgacgactcgcattccacaatctactgtgcgagattttatcttgcccgatagaaggcgaacagtgccgatgttattttcagcctccggaatctattaagatgaattaccccgccattgtatatagccttgatgatatagacaagacatatgcaaacgacggggtatatttatctaatcgaagatatgccgttaccgttattgataaagatccggatacatccttggtgcggaaagtaacgaatttaccgatgagccggtttgaccggcatttcaaaaaagataacctgaatcactacatttttaatgtgtatttctaagattggaggaataattcaatgagtaagcttatttgggataaagttggggaacgcctctacgaaactggtgttgatcatggtgttctctacccgattcagacgggtggacagtataacaaaggcgttgcttggaacggtctgagcgcggtgacagagagtccttccggggcagagccttccccgatctatgcggataacatcaagtatttgaacctgatgtccgcagaggatttcggcggaacgattgaggcttatacttctccggatgaatttgcggagtgtgacggttccgtcgaagtcgctcctggtgtctttgcaggacagcagagcaggaagcagtttggactttcttatcgcaccattcttggcaatgatgtagattccaatgactatggttataagctgcatcttgtttataattgccttgcctctgtttctgagaaaggctataccactgtgaatgacagcccggaggcaatcgctctgtcctgggaattcagcacgactccggcggagattgcgaagataatcgatggtaagaagctgaaacccaccgcaatccttacactggattctactaagattgatgcgaagaagctggcagctctggaagaaatcctgtatggtaaagacccgactactccagagggtaacgatggcgttgatcccagactgccgtttcctgatgaagtgattgaacttctggctgctgaagacctcccttaatgagcctttctgttaagcctgaagacggagaggctgttttatttggaaaagcagtgaatgaattgcagagtgatgtggttgttgctgatgatgaagtgacaggcactctgaagtatgtcaatggttatgttgatttcagtagtaatacttctgagcaggaaggaaattacctggctctcaagattgaggctgagccggctgaagcagagacggttgttgagctcgtaggcggtactaagggaccggttgcgctagatgacgacatgaacatcgtactccttatcaagaataaggatactcagagcattaaggtgactaccacacacaacgaggaaagcatcacgaagacttatggtctttctgggcttaccttggaaacagaataacgtataggaagcctcgtattcaatgtgcggggtttctttttatttgaaaggagaaaaattatgctgaagaaaaccattccctatatcgatctgaacggtgtcgaaagaaaagaggatttctatttccatctgtcaaagccggaaattgtcaagatgcagacaagcgtgaagggcggctatgatgtacagctcaaaagtattggtgccggcgctgatggcggccagattatggaattctttgaagatctcattaagaaagcttacggtgtcaagagtgaagatggccgtcgctttatgaagtctgaggagatttccagatcctttatggaatctcctgcttatgagattctctttgaggaactggttacgaatgacaagacagcagcagactttgtgaatgcggtgatgaacatcggcaattctgccacagctcctgcaattgcagcaaacactcagaattaaaggagaggtgagagatgctccgaatcacaataccatccacggaattctgggatgaggtgaagcaagagtttgtttacacaaaggctcagaccttgcaattggagcattctcttgtttctctttcaaaatgggaatcgagatggaataagccgtttctgacgaagcaggaaaaaactttggaagaaaccatcgattatgtaaaatgtatgactcttacacagaacgtgaacccggaagtttataactatctgacaaacagcaatatcaatgaggtcaatcggtatattgctcttcctatgactgccacccggtttttcgaggaaaaaaaaacgcagggaagcagagagcagattacggcagaactcgtttattactggatgatagctttaaacattccatttgaatgtcagaaatggcatctcaataaactgtttactttgataagagtatgcgatgtgaagagcaggccgccgaagaaacatagccgcagagaaattatgaaacggaatgcggcactaaatgcggcccgtaaaaagaaatggaatacgaaagggtgattactatgagtaacagcagcttggttaattgtacggtaaaaagtccaaaccatagtggagccagaacgcattcaatcgaccggatcactccgcattgtgtggtcggtcagctttcagcggaatctattgggggctgctttgacagtagtaacgtacaggcttcttgcaactatggaattggtagtgacggacgtgtggttctttgcgtggatgaagcaaacagaagctggtgttcttccagcaatgcgaatgatcagcgtgctgtgacaattgaatgtgccagtgatatgactcatccgtatgccatgactgatgcagtatatgaaaagctggttgctctgtgtgttgacatctgccggagaaatggtaagacaaaactcctttggtttggcgacaaggacaaatctctgaactacagtcccaaatcaaacgagatgatccttacggttcatcggtggtttgccaacaaatcttgtcctggggattggctgtattccaggctggggaatcttgcgaatcgggtaactgctcagcttggcggaagtacgactgacagcgtccagaaaacctacaaaactggactttacaaagtcaacatcggtgatttgaatattcgcaaaggccctgggacgaattacggaaccaatgggatgattactgaccgaggtacttacacgattactgaaattcagaacggttactggggcaggttgaaatccggtgcaggatggatcagcgttcatgaagcttactgtacctataaaggcgcagtttcttctgattctggtggatcagtagagaagccttctggaaattttctggttcaggtggacatttccgatctgtatatccgtaaaggtcccggaacgaattacggaaccaatggtttctgtccgaaaggagtctacaccatcgttgaggttaaaaccggtgctggttctaatgctggatggggtaagttgaaatccggagcaggatggatctcactggattacgcaactcgaatttaaagaggacgcacgatgataagtttcagacaaaagggtgacttctccaagttgacacgctttctggagagagcaaaagaagcggttcacatcggagacctggacaagtttggtaaagagggagtagccgcccttgcgtctgcaacaccagtggattctggggagacggcgaattcctggtattacgaaattgagaatcggaaaggttcagttacaatttcatttcataattcaaatgttcaaaatggagttccaatcgctgttattttgcagtatggacacggaactcgaaacggcggctgggtacaggggcgagattacatcaatcctgctatccagcctatttttgacaaaattgcaaataacgcatggaaggaggttactaagctatgagtaagacgattgatgaaagagtcgttgaaatgcgattcgataacaaacagtttgagcagaatgttcagaccagtatatcttcaattgaaaagctcgaaaaaagcttaaaattgaaaggtgcctccaaaggattggatgacgttaatgccgcagcaaaaaattgcaatatgactccgctttccaatgcggtcgaaaccgtaaagatgcggttttcggcgttggaagtcatggcagttacggctctggcgaacatcacaaattcagcgttaaatgctggtaaaaatattgtttctgcactgacaatcgatccaattaagactggatttcaggagtatgaaacacagatcaatgcagttcagaccattcttgctaatacacagagcaaggggacaaccattgaccaggtaaatgctgctcttgatgagttgaacaaatacgctgatcagacgatttacaattttacggaaatgacccgtaacattggcactttcacggctgccggtgttgacttggataaatcagtaacatcaatcaaaggtattgccaacttagcagcagcttcgggttctaatgcttatcaggccagtaccgctatgtatcagctttcgcaggcgattgcagcgggcaaggttagtttgcaagactggaattccgttgtaaatgcgggaatgggcggtcagctatttcaagacgccttaactcgaaccgcagaacatttcggaaccaacatggatgcgatgattgaacagtatggttcattccgagcttctctgaccgaaggtggatggctgacaacagaggtgttgaccgaaactctgacacagttgtctggagcttactcagaagcagatcttatcgctcagggatataccgaagaacaagctaaagagattacaaaactggctcagacagcattggatgcagctaccaaggtaaagacattcacgcagttatgggacaccctgaaagaatcggttcagtctggttggactcagagttgggaaatcatcattggtgatttcgaagaggcaaaagaacttttaactgaggttagcaacgcccttggcaacatggtaaatgcttctgccgaagcgagaaataagatgttgcaggattggaaagatcttggcggacgaactgcgttgattgaagcggtaaggaatgctttcgagggtgttttaagcattataaagccagttaaagaagcgtttagagaagtctttccgccgatgaccggagaacagctttacaatctcactgtaggattacaggaacttaccgaaaaattcaaaatgggcgaagaaacagcgaataacctgaagagaacattcaaaggggtattcgctttatttgatattggacttcaaggtgtcaaagcgcttgttggtggatttgcagatctgattggttatgtggctccggccggagatggaattctcgggtttacggccagcattggagatttcattgttggtattgatgaagctattaaatcgtctgatgcctttaacaaagctatcgaaggaatcgggaatttcctgaaaccaattgcggatggaataaagacttttgtaaaaacagttgccgatgcgttcagcgagtttgcgaatgttgataccagtggtctcgataattttgcggataaggtacagactcggtttgaaccgtttgtaaaattaggagagttggtaaagaaggcatttgaaggaattattgggattgtcgagaaggcagcgcctgttttattgaagctgggttccattgtcgcaaatgcgtttggaaaccttggggaagcaattctcacagcatttgataccgcaagttttgacccaattttggatttaatcaataccggattgttttctgcaattctaatcggggtgaaaaagtttattgactctctatcggaaatcaccgaaaacggcggcggaattcttggttcattcaaagatattttggatggagttaaggggagtcttgaagcatggcagtcaagtctgaaagctggcactcttctgaagattgccggcgctatggcaatcctgaccgcagcgattgtggcgttatccctggttgattccgaaaagctgaatgcgtccttgggagctttgagtgttctgttcgtcgaactgcttggttcaatggccatctttgaaaagataatgaacggagcggcaatcaaaggaatgggccagttgaccattgcgatgattgggatgtctaccgctgttcttattcttgcaggcgcagttcagaaattatccggtttggattgggatgagcttctgaaaggattggttggcgttgccgggttatccgctattctggtagcatctgcaacagcgctttccaaaacatcgaaggggctgataaaaggttcagccggtttggtagtatttgcggcagcgattcgagttcttgtaggagcagttgaagatttaggagctttggatgtgggctctttggctaaaggtctaatcggagtcggcgttctttgcacagaactggcgttgttcctgaaggctacagatttggatggaatgggtgttctgaaaggaaccggattggttcttcttgcagcgtccatcaatattctggcggatgcggttaaggcatttggaaatctggacacttcaaacctgattcaaggactatctgcggttgccgtggttcttaccgaactggcggtattcaccaaagttacggctaacgcgaagcatgtagtttccaccgctacagcgatgacgattcttggagcagccatgctcgtgtttggagaagcagtgaaaaagatggggaacctgacttggggagagattggacgaggtcttaccacgatggccggttctctggcggccgtgacagttgcgatgaatctacttccaaaaggaatggtgtcgaaagcgactggaatggtagaggtcggtgcagcattactcattatcggcgaagcagtccgaaatatgggcggaatgtcctgggatgaaatcgccagaggactggtaacccttgcaggttccatgaccattcttgttgtggcactcaacgcaatgaaaactgcacttccgggtgcggcagcggttcttaccgtgtccgctgcattggcgatatttaccccggttctcaagtcattggggaatatgtcttgggagagcatcgccagagggttggtggcactggcaggttctttcacggttctcggtgtcgcaggagtggcattagggccattgaccccagctattttaggactttcggccgccattgctgtgttgggagtaggatgtctggccgcaggtgctggcattctcgcattttccactggactttctgctttggcagtatctggagcggcgggagcagcatctctagtagtggcagtatccagtattctcagtttgattccgttgctgttcgaatctatcggggaaggaatcctttctcttgctggagtaatcgcaaatggcgggccagctattgccgaggcatttacagtattggttcttgccgcagtcgatgctttggttacggctgtaccagcagttgtggacgggctatttgtcctgatcgacagtgtcctttcggctctggtcgaacacacaccgaccatcgtggagcagttattcgatattctgattgggattattcaggctatcacaacgaaactaccggaattgattaaagctggcgtagagttactgatggctttctttgacggggtaatcgacgccttgagtggtattgatgtgaatgtactcatcaaaggaatcgctggaattggtttgctctcagcaattatgcttgctctcagtgctgttgcttccttggtacctggggctatggttggtgttctcggaatgggtgcagtcattgcggagttggcattggttctggcggctgtcggcgctctggctcagattcctgggttggaatggcttatcggtgagggcggaaatcttcttcagggaattggtactgcgattggtaaatttgtcggtggcattgttggcggcttcatgtctggagtctccagtcagttccctcaaattggcgcagacctttctgcatttatgacgaatgtgcagccatttatcgaaggtgctacacagcttaatccttccatgctggacggtgtgaaagcattggcggaaaccatccttatcctgacagcagccgatattctgaacggattgacttcctggcttacagggggatcttccctgagcgattttgctacccaactcgttccctttggtgaagcgatgcgggatttctccattgccattgccggtatggacggggaattggtggcaaatgcggctactgccggaaggacgcttgcggagatggcggcaactcttccgaattctggaggggttatcggattcttcacaggcgaaaatgatatgagcgcattcggagctcagcttattccgtttggcgaggcgatgatgggatttgcaaatgccgtaagaggactggatgctgacaccgtaacgaatgctgctaccgcaggaaaggccatggctgaaatggcaaccacaattccgaattccggaggcgtggtaggtttctttgccggtgaaaatgacatggatgcgtttggtgagcagcttgtaccgttcggcgaggcaatgatgctgttctcacaggctgtaaaaggtctggatgcaaatgtgatcgtggaatccgctacggcgggaaaggcgttaatcgaattggcaaatactgttcccaacagtggcggtgtcgtgggcttctttacaggagagaacgacatggacacgttcggggagaagttggtgccatttggcagagcgatgaaatcctactctgacgcaattgcaggtattgatgtggaggccgttacaaattccgcaacggctggcaaagcagtagttgagttggcgaatacgttaccgaatacgggtggattggtaagctggtttacaggagacaatgatattgccgcctttggcacaagtttggtttcctttggtaagagcttcgcacaatattccgactatatgaaagatgtggatgcgaacatcgttaccactacaaccaatgctgctacatccattgttgagcttcagaaaagtcttccaaaagaaggcggatggttctccgatgatatgacacttgccagttttggtagtgatatggcatcgttcggttcccatttcagtaattattacaacagcatcagcggtattgatacgacgttgctgtccggagtgattacccagacaaaccggcttgtaagcatggcaaatgggatggtcggtctggacacaagcggtatgacttctttcagctctgcattgacaactcttggagaaactggcgtaaccggatttatcaatgcgttcaataatgcagaatcgaaagtaacggctgcggcttcgagtatgctgtcgtctttcatcaatggtgcaaatgcgaagaaatccgaactgacaacaacattcaccacgctggttcaggctgtattgacagctatcaacggaaagcagggcgagttccaaaccagtggttccacacttatggttaaatttatcgccggagtacgatctcaggatagtccttccagaacaacctttaccaatatcgttagcggttgtttgactgcgatacgaaataagtacggagaattcacatcaaccggaacccagacaatggtgaagctgattgccggtatcagatcgcaggacagtagtgcgaggatggcgttcacaaccattatcagtgcttgccttacggtgattaaaaataagtatgcagaatttacctcgacaggtagagagtgcatggttaaatttatcgccggtgtgagaagcaaggatagtgaactccggaccgcttttacaacgatgctgagtggttccataaccgccatcaaagattattatagccagttcaaatctgccggctcatacttggtcgatggtttctgcgatggtatcagtgaaaatacctggaaagcagaagcaaaagcaagagctatggcagccgcagcggctgaagcagcggaagacgaactggacgagcattctccttccaaacgcttttatggaattggtaactttgcaggagtcggcttcataaatgcgttgatcgataatgtctccaaggctggaaaggctggacgggaaattgccagatcttctattgacgggctgaacgacatcatttccagaattgcagattatgtggacgcagatatggatgttcagcctaccattcgaccggttcttgacctgtccgctgtggaagcagggactggaaggctgaatgctttgtttagcagaaatcaggcattatctgtcagcactgggatgaatgaccgagtttccgagatagaagttcaaaatggagaaagttctcctacaggaaatacctatcaattcacgcaaaacaattattcgcctaaggctctgtcgagaattgatatttatcggcagacaaagaatcaattttcggcgatgaaagggctggtgggtaacacatgattagagcagtaactgtaactaattatttgggcgaatcaaaaagatttgaattagcgttcccggatgaatccgggttcgctgttcaatctatcagtggattgggaccgagcaaggcagatattaacacgacagaaatctctacgaatgacggctcgctgtataactcggcaagagtaaattccagaaatattgttatgtctctgaaactgatgtttaatcctcagatcgaagacacaagacatgactcttacaaatattttccgataaagaagaaagtaacgcttctcatagagacagataatcgtatttgtgagacttacggttatgtggaatcaaatgaaccagatattttcagcagcgatgagacgacgcagatttccatcgtgtgtcctgatccttatttttattctgctggtccggatggaactaataccactatcttctatggagtggaacctctgtttgagttcgctttttcgaatgaatctttaaccgagtccttgattgaatttggcgagattaagaatgaaactgagcagacggtgtattactccggtgatgccgagatcggggttgtgattaccatccatgccatcggaaatgtgagaaacatcacgatttacaataccgggacgagagaagtaatgcgtattgatactgataaattgaagcagctaaccggttctggaatggttgccggcgatgaaatcattatctccaccattaaaggggataaatcaattacgcttcttcgaaacggtatctacaccaatattttaaactgccttgataaagattctgactggtttcagctatccaaaggcgataatattttcgcttatgtggtggaagaaggaacgaccaatgtgcagtttaagattgaaaacagaacagcgtttgagggggtatagttatggaattgattgttctggacacttctctgaaaatgctttctgtgcttgatacctttgagtctctgatatggacggagcggtattctgcctatggagatttcgaggtatatacaagcattaacgattctgttcttgaaatcctgaaagacgactactatctctggctgaaagaatccgaccagaccatgattgtcgaggacagaaagattgagtctgatgccgaaaacggaaaccactttacggtcactggaaggtcattggaatccattctggagcgccgcattatttggaagcaaacgattctgagcggaaactttcaaaatggaatcaaaaagctgctggatgagaatatcatcaatccttccgatgcttcccgaaaggtagaaggactgatattcgaggcatccacggacccggcgattaccggactgacggtagatgcacagtttaccggagacaatctgtatgatgccattaaaaagctgtgcgattccaagaatgtcggtttccgaatcaagctgtccgatgataacaagttcgtctttaagctctatgcaggcgcagatcgttcttacgaccagtttacgaatccatatgtcatcttttctccaaaatttgagaatgtaatcaataccaattatctggaatcaaagaagactttgaaaacagttactttggttgccggagagggggaaggagccgatcggaggactacaaccgtggcttgtgcatctggtgccggaacaggtttgaatcgaagggagctttatacggatgctagggatgtttcttcgaccgtggataatgaaaccttgacggacactgagtataatgcacagctttctcaaagaggtttagagaatctggctgagaacatcgcaaccaaatcctttgagggaaaggttgaatcaacgaggatgtaccgatatggagaggatttcttcttaggcgatatggtacagattgtgaatgaatacggaattgaggggaaagctcgggtaacggaattcattcgctctcagagcaaagaaggactcgactcgtatccgacattcgttaccgtagaatagcaggaaaggggtgaagaaaaatgagtgtcacttatgggttctataactcaaagaataaagatcggagatacgatgccattcaaatgtcaagcatttttgacgggatcatacgtgacggcattttgcagcatgttgggactgctatgatggtgaaagagtcttctggcatgatggtgaatgtcggaattggccgagcttggtttaatcatacatggacgttgaatgacgccttgcttcctttgactgtaccacagtcggaagtgattctaaatcggattgatgcggttgttttggaagtagatgctcgtgaatccgttcgtgcaaatgcgattaaaatcatcaaaggtacgccagctactaatccagcgaaaccaacaatgattagcacgaccgaccgttggcagtatccattagcctatattcgggtaaattctggagttacatccatccgtcaggcaaatatcaacaatgctgttggtacatcggagtgtccgttcgtaacagctccactggagaaaatgtccattgacgccttggttgctcagtggaaagaccagtgggatgcattttatgaaaaagagacatctgatatggaagcgacaaatgctttctggaaagaccagtggtcaaaatggttcaacgcccagacggaagaaatccagaaatcttatctggcatgggaaaaacaatggaacgactggtatgctgctcaaacggcagatatgcaggaaacaagtgcttactggaaacagttatgggcgacctggtttaacgagtacacaaacaataatacatctgaaatggctgcatggagagaaaatgctcaggcattgtttgatgagtggttccagcagttgaaggatactctttcggaggatgtagaagcaaatctggcaaaccagatattagagttacaaaaaaggacatcaattcttgaagaaattgtagaggggattcggacggaattcaccgtatacaacaatctttatgacaatggatacgagaattacgataatcttctcgattcatcagaaggaactatcattgatagtaacgtggacccgattgtggcgcgtgcatattccagctccttaattctggatagcaacggacagccaattgatggccgcgttattttttgtattaggtaaaaggaggacatatcgagatgaaaattacggattatcagaaggtccagacactagatgaaagcaacatcgttttgattgatggtaacaatggaaccaaaacaattatggtgactgattttattaaatccttgattgggcttaccagttctcaggatttcatttccggcgtcaatctgtcggaacttacgcaaatcaatacgttgtctgcggatgataagttattgattggcaccgcagcagggaacaaagcgattggtgcggacgatgcactctttgcaattctggacgcttttgttccgaaggagcagcgccgcatgatttacagaggaaaaaatctggggagcgttattacagacgaccagaaggcaaatatcaagaacggaaccttcaaaggatttttccttggagattactggtctatcggcagctatacatggagaatcgtagattttgattactggtataattgcggcgatacggctttcaccacgccccatctggttatcatgccggataaacctctttacaacacacagatgaatgagacgaacatcacaaccggcggctatgttggttctaaaatgtacaccaagaatctggcgcaggcgaaaacgttggcggcgagtgcctttggtgacttgattctcacccaccgtgaatatctgacaaacgccgtttcgaatggatatccttcggctggtgcttggtttgattctacgctggaacttccgaatgaaattatgatgtacggaagccttgtctttactccggcaggagatggtacggtcgttgtgaaccgttatacgatcggaaagacgcagcttgctttgtttacggtggttccgaatatgatctcaaatcgtgcaacgttctggctcagagatatcgtttcttcggctcatttcgctggtgtgggcggctatggcaatgcgtactgccacggcgcttcgaactctattggagttcgtccggtcttcgctattggttagtctaaatccaggggccctgtgcccctacgaaaaccgtacacaggtgacaacaatctgtgctataaaaaagaaaaatctaaatgaaaggtgtgaatcaaaatggaggataagatttataagattactctgtccgatgaaactgttcttgataatttgaggttgaacggtaataactttatatcttcatcggaaatcaatgagtccgtttttgacggaaattgttcgatcgtaacaatcaacgatggagaaaaggatgaagttcacatgaacatggaacttgtccagattaccaaggtcgatgacaagtattggtttgtcttgcgggaggttccagaaacagagttggcctttgttaaaatgcagtcagatatcgaatatgttgccatgatgtctgaaatcgaactataaaaggaggaaacagttatggaacatagcaagaattacgacaaggtaaaacgctactacaatttgggtatgtggaatgaagtacgggttcggaatgcagtgaaaaagaactggattacggaagaagaattcaaagagatcacagacaaggattatgcatgagtgtccttgtgagtgaccggactgaatccaaatttgaagcgattacatattccattgaattgcatgatatgttgattgaccttatgcagcgtagtttcggagtgaaagatttggatcagcttgttcgggtaagatatgctcacggaaaggatgcaacagaagatttttcaaggtatagatatttaatgctgaattataaaaatcgaattgaccagttggcttctatgctgactagcaatgtccgagcggctaattctatctatccgactacgctgcacgaatatgagcaaagaagagattatcagaatacagccatagtaaactgcgagcagcttttgaaagagttgcaacgaatcgttgagatattcgaagtggacgttaatctctacagtcgctatgttaaagctatcgaccgagaaatcggattgataaagaagtggcgtcaacgagataaccgaatcaagtcacagttaaaagggtaatgtctaattatgcgtcgtttcttcggctaatttcgctaatgtgaacaacaatggcaatacgaactacaacaacgcttcgaactctaatggagttcgtccggattctctgcttaaccaacagagaaggagacattgtcctttccgaatggataaatagcaaagccggacgcaatttactacggtaagtattgctatcacggtgaatgatttatgaactatgaggagattatctgtgacgccaacaatttgtatagagcttacaaggtttctgtcaaaaccagcaagtggaaggaaacaacgcagaaattcatgatgaattttcttcggtatatcttttccattcaagacgacctgatgaatcggactcttcaaaatggaccgacacaggaattcacgctgtttgagagaggccgagtaagacctattacaagtattcaaattcgggatcgcattattcggcatgttttgtgcgatgaagtcttgcttcccgaagtgaagaagcatattatctatgacaattgtgcttcgattaaaggaagaggtatctctcatcagcgggacaggttcgaagttcatctccgtaaatactatcggttgtatggaaatgaaggatggatattgttcggagacttttccaagttttacgataatatcattcatgaaattgccaaacgggaattgttaaagctgttcgatgatgacgaattcattgactggttgctaacccagatttttgacggatttaaaatcgatgtttcttacatgacggacgaggaatatgccacatgtatgtctgacactttcaacaagttagattataggaacattccagagtcaaagctgacaggcgaaaagtggatggagaagtcggttaatattggagaccagctatcacaagtcatcgggatttattatccgtatcggattgataattacgtcaaatatgtaagaagccagaagttttatggaagatacatggatgactggtatatcatgaatccgagtaaagaagaactctttgatctgctagatcatattcatcaaattgcagaagaatatggaatccatatcaataagaagaaaactcgaattgtgaagatttccagcacgtacaaatttctgcaaataaaatacagtttaacagattccggaaaggtaattaagcgaatcaatccgaagcgggttactacgatgcgcagaaagctcaagaaactcgccgtcaaagtgaaaaacgaggagataacgtatgaaaatgtagagaatatgtttcggggctggatgggaagcttttacaaacttttgtcgaaggaacaaagaaaaaatttgataggtctctatgaagatttatttgaaaagtcgattacaatcatcagcaaaaggatgatcataaccgataaaatcaaatagttatggaggatactaaaatggaaccatggtttcaaatggtggtgacgattatgtgtgcagtcgtcgcctcttctggtttttgggcgtatatccagaagaaaagtgagaaaaaagatgtgaggacgcagatgctgattggtcttgctcacgatagaattatctatctgggaatgtcctacatcgagcggggatggatcacgcaggacgaatatgaaaatctgcacgattatctctacaagccctatgaagagatgggcggaaatggctcagctaaaaaagtcatgcaggagatcaataagttgcccattcacaaatcaacctatattcaagaaaatcagtaggaggaattaaaatgatggaacagattatgaactatgtgcagcctgagttaatcgttgtggcgattgtcctttacttctgcggtatggggctgaagcagactcaggcaatcaaggacaagtatattccgttgatcctcggtgtcggcggcatcgtcctttgcggaatctgggttttggccacttctccattagggagtggtcaggagattgcaatggctatatttatcgcaattgttcagggaattttaatggccggtctcagtacctatgtaaatcagatcattaagcaggcaaataaagatgagtagcaagcggacagagcgtgaaaccgttcttttttttttatttccaaaagagaggatgagagaatatggctattaacaaagtaatctatggtggagagacactgatcgacctgaccggcgataccgtaaccgctgataagattctttccggctttaccgcccatgacaaaggaggggagccgatcacaggtacttgtgaatatgacgtagattcttctgatgcaacagccgctgttgctgaaattcttcagggaaagaccgcgtatgtacgaggtcagaaactgacgggaaccatgaagaataacggagctgtgacaggtacaatttcttcaaaggatgaagagtacaccattccgcagggacatcacgatggttctggtaaagttgggatttcggcagcagaaaaagagaaaatcattccggataatattcgagagggtattactctgcttggtgtagaaggttctatgtcaggtacggaagatgccaaaccacaggcaaagacagttacaccttctacaaaggagcagacagtgcttccgaattctgaggaaggatataactacttatcgcaggttacagtcaaagcaatcccatataacgaaagcgagaatcccgctggaggtactacggtaactatcgggtaggagggaggcttaaatggctacaaataaagtcgtttacagcggcagaaccctcatagatttgactggggatactgtgacagaagaaactctgctaagaggttatacggctcacagagcagacgggacgcagattgtgggaacagcatttgccgattatccggagcgatattcgtttcttgaccctcttcaggattcaaatggagaaaagatccttgataattcgaataatgtactacagggtgaaacggtgtataaaaaggtgtagaaatgtcgtttacttcttgaatattcctatacttttgataaaagaatggctaaaaatcaaggtttcctgtttccattgaggaagcctctaaagctgggaaattctaatataacgcttacggaataagactttttgaagatataggaaatacttggtggttgggataacctaggctagctgttgctatttatcccggtctagccatttgcagataaagtggccaacgatacctgccaagactgagataaggaaagctattatgtagtccatgtgagcacctccttcctgctggaaagagtcaacagcgtattgacatttttaattatatggcgtaatataatcacagcagagaaaagcgaatgtgttccaatgatgcacagacgaaccctcagggagttgcagcttcctgggggttctgtttttgaagaggagtaacttaggctggttgttggttatttatctctgtccagctgtttgcagatacagcggctaacgatacctgccgttagaaatgaggaaattatgtgtgaatacggtgaggaccacagagaaatatataaaatagattttaaggaaaagttgaaagaagaaattatcaagtgcctaaaaaaagctggaaatgagttatatttagtggatagcagtctgattagtgataagacatacttagatgtccatgcccatgaacgcagtatttgttttagatttggtacatacttaaataaatatatagaatcaaacagctttctaaaaaaatatgatttagatgcggaatataatcgggatattgatatgattaagcggctgccaggctggcctaatggctgttatccggatttgattttacataaacggggaaataacgaaaataatattttgattattgaatgtaaaggttggtggtcaagtgaagaggctattcagaatgatagagaaaagataatgcaatttttacactcagaaagatatcaatatttgtttggtctccaaatcatattttgcagggaaggtatggagttaaaatggatttaacaggttctacggaaaatgatttacaaaacagagaacagcaataaaaatgaatgagagggataatccgtctatgaaatattatttagcgcccatggaaggccttaccggctatatataccgcaatgcataccatgcctgctatcatgccatggacaagtacttcaccccattcctgtctccaaaggccaacagcaaactaagcttcagggagttaaacgacatcctgccggaacacaaccagggtatgtacgttgtcccgcagatactcacaaatcaggcaggggattttatacagacagcaaaggaattacaggagtacggatattctgagataaacctgaatctgggctgtccatcaggcaccgtggtatccaaacacaagggggccggtttcctggggcggccggacagcctggaccggtttctggacgaggtgtgcgggaagatggatgagatgggcatggaggtgtctgtgaaaaccaggctggggctgatatcgccggatgaattcacgggacttttagaaatttataaccggtatccgctgaaggaattaatccttcatcccagagtccgcacggattattataagaataccccaaatatgccggcatttcgcggcgggtttgacggcagccggtcaccggtgtgctataatggggatatatttactatatctgactatgagacattatgcggagattatccggaattggatagagtaatgctgggccgcgggatcatatccaatcccggactgctggacaggattgcggcagggaggaattccggtggtccgggaactgacaaagaaaccttaaagcgattccaccagatgatatacgagggctaccgccaaatcatgtccggagacagaaacgtcctgtttaaaatgaaggaattgtgggcctgtatgattcaaatcttttctgacaatggaaaatatattaagagaataaagaaatcccagagactggaagagtacgagacagcggcagctgctgtattccgggacctggatatcctggagggtgccggattccgcacgtattaatggcggtatccggtactttctgcttttaatttgttctgccgtatttcctgaatgtttatcccggatgtttttgtgaaaactgcggggatgatattttcctgccattgtgctatacttttagataatccgctttttcaatgacaccacatccgattttggtcccggagtttccggagggctgggatgtaaagtcgtcggcatgactgtgaatgacgatggacctgccgataatgtcatctgtggagaagcgcttgtcatagaaggaaagccaggcataaccttcgtttccaagaaggggaagcaggtcacctgcgtggtccggatgaggttcgccggacggattgtagtggtcccctgttttggtgaagtcatcagagcaatcaccgttctggtggatgtgcatggcataaaagtctgtggagccgggttcctgtttgttgggtagattgaagatttcggcttccaccagcacaccactgtaaggagtctggtagaattttaccaggccgcttaagttaggcgcggcatccccgcctctgacccaggcaatggcggcaggggcccgaaagcgcagcaaatcagcaaagatgtcagcaggagtgacggattggttggccataatggtctcctgtaaaaatgatttctttatagcatatgcgcataaaaaaataagtttacctgaatcggtaaacttatctttcatttggaggggaccggcagaaggggagctgccggtcataggtatgaaaaagtgttttcctgtatagtaaaaggtctatcgccttacaagtattactatacagggaaaatgtggccaaagtttgagcacacgctaaagaatcaataaagaaactaaagggaaaataaataatttataaaagcaggagacagattatggtaagacgattc

SEQ ID NO: 3352 - DNA, 212 bp, Unknown
  gut microbiota DNA sequence
aaagattttaagctatgtggaaatcggaaagcaggaaggcgcccgcctgatctgcggcggcgagcgtatcacagatggcgaactggcaaagggctgcttcatgcgtcccactctgctggccgacgtgaccaatgatatgcgggttgcccaggaggaaatcttcggaccggttgcctgtatccttaaattcagggatgaggacgaggtcatcc

SEQ ID NO: 3353 - DNA, 2233 bp, Unknown
  gut microbiota DNA sequence
ccggcggcccgtgatgagccggcccaaaaagaaccccctttacaggtgaacagtgcttgtgctataatttacagcaattagttcttttataaactcacgaatcgcagcttctatagggatatgccattattatacttggagtgaatggagatgcagttggataattctagttttactctgccaaataaaagaaacgcggtattagaacggctcattgaatgtcatggagaaacatgtgtatatcctgcaagaaagatatttctgacaccaggccaaacacttcaaggggtatattatatcatcacaggcagaacacgccattacatgattggaacagacggaaccgagaagatactgtatacgctttctgacgggtggttttacggcgaaacaccgctgtcgcttcgggagtcaaccggattattttctcaggcagaagtggaaacccgtgtccgtattattccctatcaggattatgagatactgcttgatactaataaggttttccgtgaagccattcttgagagttattcaaaaaaaatgttaattatgcgccatgaaattgagagcctggcttttaattcctgtaaagatcgcttaaaacgcttattctgttccacagctgatacgtcctgtctgttagaaaacaagtggtataatctgaaggtacattacacacagcaggagttgagcgcaattatcggcagctccagaatcacaatcagcaaaaccataaaggaattatgcaacgaggattttattcgtattttgaaccggaatacacagattaatgctgctgcatataataaggtgatgcagtagtaaatctgtcgaacttttataaatattttgtatagtaaatgtaaaaatatatcaaattatacatcaaaagactcatgtactttttcatgagtcttttttgtgtgaactgtttttaaatcaatgtacaaaaagatgcattttatatgttttttcattgtaacttaggaagcagtaacattactaaatgtatgctagaattatttccataattatttgacagaaaggtgggtagaattaataatttcaaaaatcagttgacaataggaggaaatggtatgaaagaaggcaataaaagatcatggttcccgaacgtatatacaatcttgtttttgttagcaattgtatcggccattttaacatggattgtccccgcgggaagctatgagcgtgtgacagaagaaaatgtaacaaaggttgtagccggcacttatcatgtgattggtcagaatcctcaggggccatgggaaatctttcaggccctggtaacaggttttaaaaatcagtccagccttatttatatgattttgtttgtaggcgcagctgtttacatgattacagaaacaaaagcaattgacacaatttttatgaaactggcaaaggccgtaaagggcagagaagaaatagctattttttgtgttatgtttttcatgtccatgggcggtgccacaggtgtgttcggaaacgcaacccttgttttgattcccattggaattttcctgtcacaggccatgggatttgataagaccctgggatttttcatgattttcttcggacagttcgctggtttcaatgtgggctgggcaaatgcgggcgtattgggcgtggcgcaggcaatcgcagaggtaccgctgttttccggttttagtgccagggtaattttccatatcgtaaactttacattgagttatgcgtttgttatcttctatcttcaccagatcaaaaaagacccctgcaaaagcctgaattatgagcagggcctgaaaacaaatgatatcatgggctatcaggacggcgagttaggcgatgcccctgtaacaaaggttcaggtgctgtctatgctgtgtatggtggcaggtctggctgcggttgtaatcggcgcattgaagtttaaatggggcgcggacaaaatttctgcaacatttctggtggtttgcctcctgatcggatgtgtaagctgtaaggatataaacgtgggtttcaaccgtttcattaaaggctgcgcaagtacggtaggcgctgctttcatcgtaggctttgcaaattgcctgactgtcctcatgagcaacggcatgattctggatacaatcgtatattggctggcaaagccaatcagccacatgggtgctgtcttaggcgccggcttcatgttccttgccaatgctcttattaactttttcatttcttctggttc

SEQ ID NO: 3354 - DNA, 12598 bp, Unknown
  gut microbiota DNA sequence
aaacatatttcaaaaaaactgacagcacctttactctgcatggcgctgtgcggtgtattgactgcctgcgggcacaaggaaccatcccatgcgctgtccccggaacaggcagaatcccaaagcactgaggccgaaccggaaatcaggattgacacccaagagggctcccagtctgagcagtcatcggagcatcccataggcagcaccgctgcaccggctgattcagcccagggggaggccggatatctgctgattaaagaccagacgtttgatgtgaccctggagccattgggcagcgtcacatttgcgtcctataaaccggacagccttcaaaatcctcttgcagatgttatgtttgagataaagaaggagaaaaaaacagtttgccttctggacggcgtgtatgagggcaacacacgaagtaacgagacgtttaacaaggtggaggcagtatcctttcccgactataacagcgatggtttcaatgatatcatcatcatatgcagctactcaccggcctccgggccaaagacaggcacaggatatcctgaggtgagaatctacagcggaaaggctgacggcagctttaccctggagagaagtctgtcggaaaacgccaactcggcccttgccgaaaagaccgtacagtctgtcctgggatttctgggcgcgggcaaaggcaggcccagtgtatctgcctccggctggcagcaggcctataccggccttctccaatcccaggacagcggtcagtggcaggggtataatttaatttacatcaatgacgacgacatccccgaattggtggaaatcggcatcgacgaggcaacgggctgcaagatagtcagttttgcagacggggctgcctatgaaacgcagctgtccagactctatttctcttatattgaacgcggaaatcttctgtgcaactctgagggaaatatggattactactacgatattgtgtacagtatggaatcgggccggctgcttcccattgcttccggatattatggggctgaggataactcccatgtgcagtttgatgaggaggggaaccccatctatcaatatgaatgggaaggtgtcatgatgacgcaggaggaatacaatcaggcattccgggctgtctatgacacatcctcagagaagccggggtatgaatgggataaatggctttccctggaagaggtgatacaggccattgacggcatccaataaacgccggatggaaggacagcgtattctggtgaaatgatgctgtatttatgcccatgtctttgatataatataataaatctgcttataccgacagtgaatcacgcctaacaaggaggagacaagaacatgcttttagtggctaaaagggacggggaaaccgtggaattccaattggataagataacgctggctatcaagaaggcctttaaagcaacaggtaaatcatatacggctgatattatcgagctattgtcgctccgggtcacatctgatttccagatgaagataaaagacagccggattagcgtggaggatatacaggacagcgtggagaaagtcctggaggaatccggctacactgatgtggccaaggcctacatactataccggaaacagcgggagaaaatcaggaatttggataagaccatcctggactacaaggatgtggtggataactatgtaaaggtggaggactggcgcgtcaaggaaaattcaaccatcacatattctgtgggcggtctgattctgaacaattccggcgcagtgactgccaattactggcttacagaagtctatgaccgggagatttccgatgcccatgtaaacggggacatccatatccacgatttatccatgctgacaagctacagctgcggatggtccctcagaaaacttctgttagatggcctgggcggcatcaccgggaagattaccgcatctccggccaagcacctggccaccctctgcaaccagatggtaaactttctgggaattatgcagaatgagtgggctgcctcccagtcattttcctcctttgatacctacctggctccctttgtgaaggcagacaacctgtcctatgataaggttaagaaatgcatggaggcgtttgtctttggggtcaacactcccagccgctggggtacccaggccccattttcccacattttcatggacctgaaggttccaggggacatggctgacgaaaaggccattgtgggcggcaggagaatggaatttacttacggagactgccagaaggaaatggacatggtaaacagggcgtttctggaaaccatgctggaaggcgatgccaatggcctgggattccagtatcctattccggcttatgggataggagcagattatgactggtctgacaacgaacaaaaccggctattgttttccctggcatcccattacggaaccccatatttcatcaattatatgggaaatggcatgaaaccggaagatgtaaggacttcttatgatggaatccggccggatttccatgtgctgcggaaaaaggctggcggctttttcggttatggggaacatacaggttccgttggcgtggtcacggtcaatcttccccggattgcgtaccagtcaaaggacgagaaagagttttatgcccggctggaccagatgatggacctggctgcccgttccctgagcattaagcggaatgtgatctccaccctgttaaagaatggtctttatccctatacggcctgttacctcactgattttgacaaccacttttcatccatcggcgtcatcggcatgaatgaagcagggctcaatgcgcagtggctgaaagccggcctggaatcagaggagacaaagaagttcgctgtctctgtcctgaaccatatgcgtgaaaagctgattggataccagatggagtacggtaatctctacggcctggaagcaacgcccgcagagtcagctaccttccgtttcgccaggctggaccgtgagcgtttttccgggatccggacagccggacacgaaggggacaccccctattatacaaacagcaccaaactgccggcggattatgacggcacattgcagggtgcactcataaaccaggattccctgcagcctctttataccacaggcactgtattccatgtgtatatggagcgggaactggaggactggaaaaaggctcgggatctgctcagcagtatgattacagaacaccatattccctgtttcacactgtctcctgtttataccatctgccagacctgcggctatctgcccggcagacaggagaggtgtccgaaatgcaatggcgctgcggatgtttacagcaggattgcgggctattacagacctgtccatgattggaatgacggcaaggcgcaggagtttaggaacaggattatgttccgcataggagaatgataatggatgtttatgtggcaagtgcgttcagcaaagataacagaggcggaaacaaggcgggtgtggtattgcagcaggcccgcctgaatgaagcagaaaaaacagaaatcgcccttctgatgggatattcagagaccgcctttgtcgctgattcagagctggctgattttaaattagaatactttacctctgtgggcgaagttcctctgtgcggtcacgccacaatcgggacttttactgtgctgcggcatttagggcggcttgaaaaacaggagtataccattgagacaaaatccggtatattgagaatacgtgtggataaaagcggtctgatattcatggagcagaatatcccgaagttctatgaaagactggataaaggggatgtgaaggcatgctttgattctgacggtatcccggatgccttacctgtgcaaatcgtgtccacaggattaaaagatattatacttccggtaacggaccctgagattcttggccggatgacgcctgatttttccgccatcaccagactaagccgtgagaaagaatgcatcggcatccatgcgttttccctggcaaaggagatgggtctgactgccatatgcagaaattttgccccgctttacggcatagatgaggaatccgcaaccggcacctccaactgtgccctggcctgctatttatacaggtacgtgtcaaaacaggaccagtatatctttgaacaggggcataatctaaacagcatttccagaatatacgttaatctggataccgaagataatacgattacgggtgtatgggtgggaggatacggatatgtgtcctgtttgtcacaaatctgctgtcagccatgaacctgaccatactcacatccagggtatatctgaaaattgtcagctgacaactcattatctattgtcccatatctcaagccaggcttcgtaataatcgcagcggtacccgtcacaggcagttaacagataacggcctgtcagttgtcctgagccatatcccatggactgggcggcttccaggaaagctcctgcgttattgcagtccggggattgggcatttaccttgagaagccccttcagatacagcctggattcggcgtcctggtcccgcaggatgacactgtttcccaaatcataatccgggcaggccaggaagataccatactgtatctcctggccttgttgtggtttaatcagaatggaggactggtatggatcttgtacataggtctccagggattccctgtcctcaggagaaaacagtttcatggcagggagaaggtccctcaggacctgaaacgaagtccgctccaggtccataatacgctggaccatggagcgccgtgtttgaagcttttcaagcgtcatctgcatctgcctgatttggtcctccagccgtcttgcatttgtctccagggtgtggtccacatcctctacgcacatgccaggaatggactttatctccttgatggacagagacaggctgcggtaaaaaatcacatcacatatatccagcatggtttgggaagtgggacagcggtaatggttgtcctttgacctttcaaagcgaatcaatccctcgtcatcccagtaacgcagggccgaagccggcaaatggaacagttctgacacttcctttatacggctgatgtgtttcaaggtattcctccttattaaaagtccctatcaatttccattctatacaggggaccttattaaaaacagcttgactttcaagcagctttaaggtttatactattctcattgtatcaaataatgggaggtttgtcatgttaagacgttttataggagcagtacttccgtccatgcttgcatttgccttttcaggactttacacgattgtggatggcttttttattgggagaaacataggagacattggacttgccgccgtgaatattgcctatccgctggctgccctggtccaggctgtgggaacgggtatcggcatgggaggcgctgtctggatatccctttaccgtggaaaaggagaccgggagagggaggaagagtgcctgggaaatactcttaccaccctgtttttgggagggcttttgcttatggctgtcctgtttgcattatgcggcccggtcctcagactgtcaggggcagagggcagcgtgtacggagaagccatggtatatatccgtattctgattggaggttccctgcttcagctctttgcaaccggctttgcaccactgattcgaaattatgaaggggcagtgacagccatgggatccatgattggaggatttttgaccaacatcctgctggacttcctgtttgtagctgtataccacaagggtgtggcgggcgccgcggccgccaccgtcatagggcagggggttacagtggtcccttgtattttattcatgggatccagaataaaaggaatccggaaagaacactttttattaaagaaaaagcagatgctcaggattgccggtacaggcgtatcgccattcggccttacaatctccccctttattgtaatcatgctgattaaccggagcgcacatgtatatggaggtgaggctgcggtggccgcctatgcagtgatatcctatgtggtagccatcgtacagctgcttttacagggaatcggagatggaagccagcctctcatgagcttttaccttggaatcggaaaaccaaagcaggccagaaccgtgcggaacatggcatatttgtttgccgccgttactgctctggccaatatgggaattctctgccttttgaggagtgctgtttccggctttttcggcgcatcctccgctgcattcccgattgtggctgaaagtatgccggtttttactgccggtttcctctttattgccttttgcaggaccaccacatcctacttttatgcaacaaaacagaacttgttttcctaccttttggtctatggtgaaccagtacttttattcttccttctgacccttggactgcctcctgtcatgaagctagagggcgtatggctgtctgttcccattacccaatcactattggcagttctggggatggctcttctgcggatggaggggagaagccttcctggctatcaatacagcccgaaaaatgattaacatggtcactccaatcagcagaaggcccatgacacggtcaatagacaatgccatgacaatttcctggtctattacctgctctgtttcttttatcatttcattcgccatatggcgcacctgcctgtatataatttaactgaatacaattttaatatgttgttggaccatgaagtatatggtacaatctgtttatgaatgacagaaaagacaggaaggcaacggacagattatgataaacagagaagacatgctggagcttacaagacggatgaccctttcccgcacctcctttaccagaattgcaggatgttatgttgacaggtatggggattttgatgggagttttaatattaattttcttaaattatcggcatcagaacggacaaagaaactgaagctggctaaggaaatcccctttgcagccacgaatgtgaacctgaaaaagtacgaatatcctcaaggtgcgcggaaaccaggaagtatgtggcagcttctcatggccatgaatgaatgcggcctgaaaaatgatgccttgatggatacattttatgatgttattatggagcattaccgtgcagagagggagtatgccatcctggttttccatgaccgttatgatatcccggcaaaaggttctgacaaggaacgccagtgggaatcagaggaggtatttgaatatatgatttgcgcggtctgccccctgcgcggggagtatgagccggataaacccgtatgcggctttttattccctgcctttacggacagaagcggggatctgaatcacattgacgtatttcaggcggatgctgacaagcctcacaatgaaatactgaagcttttggaaattatttgacagagtttgggcttccggattctggagggtgtgcataaaacctccagaatccagaagccctttgccggcagatgtaaggaatatgggaccctatgattggtatatatgattggactggattgaaaagatattattgtattccctgattatacctataatcgcagaggaacatcatttccctgtgggacttaattctttacatctgccaatagtgcatgcccctgtcatttgttttatatcgtccaggttccgggcaccgttatccagagcttccagaatctgtgcctttgtgacacccgcgcaataacatatcacttcacgattatccattatcattctcctttatcattttctgataatttcactatatcacaaacactccaatatatctatagaagcactgcgcgcggcttcctttttctggcttatccaggtgagatgtgataaaatagagacagatagcttttgactgaacccctcactgaaacttgcagtcagcgccaggcaccacaaagcttttggcgggaaaggctggtcataaatgaaaaaaataaaatgccccatttgccagaaagaattggaacaggacagcatacaatgcccttactgtaaatatagattcaaaatcgtgcccaagcgcgttaacagtccggaagataataaaatgcggttagacggttacctggtatccgatatccgggactgtctggttcataccgaagaagatacactggaacggttcagaaaagcccagaacaagccggagtttaacccttccgccggatttggaggaaacctttggtttgccaaaagaggcatgtttgacatttccctgtggctcattgtcctcaatatgacagcagtccctctgatggctgccgcttatggatggatgcacaagggaagccgttctctgccttatgataccggctatgtatttctgttcctccttattatgctggcgttggaattctatcctttgggaaaaatagcggaccggatgttctggaaacacaccagggaagttctcgattttcatgggtgtaacaacagggcagaggaagagaacccggagttaaaaaagatgctggcagaggacggcggactgtcaacggccaacagtctgatcattcttggactggatctgctgctcatgtttttctgtaaacaggtaaccacagcaatttttctgtatttcagctacaccagataaagggggagacaatgaagccattgaaaaagagcacaggaatcctggcggcagtcatccttattgtcatgatatcaggacttttgctggccaatcagatgattgatcaccttgaaaataatataaccacggattatacaaaggtataccatgatgacctgaatcggctgctgggagaggggtggatggtgctggcgaaagagagcggctatacggtcacgccctttgattccactaacatttatacatgggaaatcggttataaggataaggacggacaggagcgctccatactgctcagtaactttaaggacaggagtatggaacacccattcggatactgcatagaaaagaatttccagaccatgacaggagaggtatatgccagggatgtaatcagccctgttattcccgctgtctgttggcagcctgagtactggattagatttctcaattattatgtcagcggagaccatataacagacaggccgtataaggaccctgctgcagacataagtcccagggcagaggtagcgcttaagacatcgcccctgttggatgaatctgacagcagcatggattgggaaaatccagaatcagatttttgtttgtatgatattgattatgccggtatcttcaaaaggaagccggacctctggtatctaagcgtttctctggatttttatttggaggatatggagcaagctgagtatgccgggaaagcagatgccctggaggaaaccgcgaagcaggttctggcccgtctcaacgaatatacggggcatacagtgaacgcagaaatcatttaccctacaggttcagaccagaagggcactgcatatcatcactggtatgtcataaacggcgacattgtggaccagtccgtatccgatatacagcttcccatatttggtgtcgttgacccgatgtataatcacatgaaaaaattctatcatccggagcaggaatattaaaacagtttggatgaaagagatggtttcaacatgtctgaaaattgcgcgaaaatgaaatctatatttaaactcaggtatagttaggcccggatagaacggcctttccaactattcgcgaaagtctagtttaacgaatagttcgaagaggtgaggttccttgttctttctatatatcaatatatcaattcttgataactcccattgtttaaaattgaataaaggatgtgatgttttatgtctgttgccactccttctgaggtcagaccttctgacaataaagtctctggcttacagtacttacttaatgattatgagtgggaatttgatacagtcagaatctctgatacgtccattgataatgcaaacatttgccatactgctgaaaatacggccaatatcgttccgttgcttttgtgtgcctttttcctgctgactcttatccttggttgtctgctttgtgttatattcaaccgcttctgtagaaattgatatcatgcgttataatggtgaggagcttctctccttccctcttatctatctgaggctcataaacccaaatacggatatattttacaaagcccacatgagaaaaaaacgccttctgtcctgttttagcttagaatttctgctgaacagccgatatataatttataataacgaaggggggattgcaagttgtgcagaagaattttcttatctgtcctgttttttacggcggtgttactgctgaaggtggatttttttgattcttatgctctgccccttaaaggagacatagaggtacagacagcggatggaagcaatacagttgaggcaccaggaataattgtgattcaggatacaatttctggggagggcgggctggaaacagagggggtccaggatatcaaggatgaccggataaacaaagcagcgcaggaaaaacaggcagatacggacgttcccttacaggccagttcccagggaaccgccggggaagaatcctgcggcatgtttgaaatcactggttattgtagctgtgaattgtgtaccggggaaaaccattttaccaaatcagggaccgctcccaggccagattatacggttgctgctgatccagatgtgtttccattgggcagcaggattcggattggagagattatttatttagtggaggatactggggcttccatcaaaggaaatgttgtggacatctattatgaaacccacgaagaggcggttgccaatggtagatacgaggcagaggtgtttttaataagaggtatgtgataatccgaatacagggtttatgatatcatcattctgacgcccccattgtttccaatgggggcgttttgcagcaggcaggacctaatctgcacttctcggcagccagttgtttcatattaccgcataggagtcattgcctgctatgagtcctttaccgttaatctcttactgaaccgtgataaggcggaattgactaatcagtttctttagcagctgagcctgccctgacagttcctcactggccgcagcgctttcttccgcagtggcgctgttcgtctgtacgacactggaaacctggtcaattccctgagtgacctgtccgatggcatctgcctgttctgtggaatcattggatatctgtccaatggtggctaccacatcctttacacctgaaaccacgtccgaaaggttcttagcagtatcatcagctattcttgtaccattaagaacagcgcgcagggagttttcaataagggctgacgtactgtttgatgcatctgctgatttgcttgcaagactcctcacctcatcagctaccacggcaaagcccttccctgcctccccggctctggcagcctccacggcagcgtttaatgccaatatattggtctggaaggcaatatcttcaatggtcttaataatctttcctatttctttggaagaactgctgatttcatccatggcgtgtatcatgtcctgcatctggcggttgctttccgttatccggcggcccatttccacagccttctcattggcgctcagagcattctctgcgttccgcttaatacgggatgcaatttcgtttacagtagccgccacttcttcaatggagctggcctgttccgtagagccttgtgacaaagactgtgccccgatggatacctgctccgaaccggaggatacctgctcggccgcctcgttgatttctcccatagtattgctaagggaatggattatcgtaaacaatgactcttcaattgttataaacgcccctttgtacttttcattaggggaaatattaaaattaccatgggatatttcgctcagtcctctggatatatctgtgatgtagcgccgcatcatcccggcagcctcggaaaatgagcgtgtcatctctcccacctcatcattggaatcgttggagatggatatatctaaatctccctgggcaagcttgaacgcggcatcccttacgttcagaatcggcctggatataagccgcgcaacccagaaggacattgccacggatatactcactgaaattataataacaaagacaatcatatatataataagcctgctgttatccgtaagggacctggatatttcatttcccatctgtttgttaaggtccgccagcttttgggctgcgttcatagcattattaagaatcggtcttgcctggttcctgaatatgtccaacgcctcatcattatggtttttaagtcccatttccaccacctgggatcggatttccatatacctgggcagttcctggtcaataacagcaatcagcgattgttcttccggcgtctggcaatttatcttcagagcatccagggactgctgcattttctggtcaatctgttccagctcgctgcgggaattctgtatctccttctcctcagtaagaagcacaatatccctcacaacagcagagcctttattgaggtatgtatcaaatgagccgatatctccttggctaaacccattttccacaagagctttgctgtagttctgatctgacc

SEQ ID NO: 3355 - DNA, 2655 bp, Unknown
  gut microbiota DNA sequence
tcttttttgatagggaaatagttgcagaccagtatctggaacagatgacgtcggcagcatcccagggggacagagatgccatgcgttctctgtatatgccaggagcggtaccggaagaacatatggaaaggcaaatacaggaaaatgtggatatatggggcaaaagtcagttagattcttttaaaaagaaggggttaaatatccggaccagtactaaaaacggtgtaaaaactaaatctgtggagtgcagctacggaataaaaacagaggatgggcagcggtttacggcaatccttaatagaatggaatcgtcagatggaaaccagggaatcatcagttttatcattagggacaatgtatccttagctccgcagggaacgctgcgctccatcagtcattggaatgtatttcaatggggattgttcctgttgtcacttatcatgattttctctaccattgcgactgctgtcatatgttacagacagaatccgagatataaatggggatggattatattgatattaatagcctatctgtctatgggtttttccgttattcgtacaccaaacacgtgggaatttaaggtcaactggtcggcagccacagtccggctcagccggtatgttacatatgagaatggcagcagggagttccggctgttccttccggccggtatggcagtgtactggattatgaaaaaacggttggaccgggaatctgttcataagaagtatggagaccgggaagctgccacaaagaagcatggaaactgggaatctggccaggagaagcgtggtaaccgggaatttgttcataagaagcatgaaaaccaggaacccggtccggagaatcgcgcagaccaggaacccggcccgaagaagcgtgcagaccaggaacccggcccggagaagcgtgcagaccgggaaacccgccaggaacagcgtccggatacagacagagaatcctggcgtataccttaactgtctaaagaaaaatcttacctctcagaatcgttttttaggagaatttggcgaacgattctagggactctcaacttcccaaatcaaaatccgttgctataatagattttaccgggaaacgcctgactgcaggggcgcttcccaaaccaggcagcggctgcagccagcagcccgggccaaaaaataatattatatagaaacgggatggattccgggaagaaaggggagcttttactatgatgagctttttacaaacaggaaaggcactgtacgtgctggcagcaatctgcctggctggagtatttaccaggctgatggcaggaagcttctacaaacgattaattaaagaaagcaccaatatggcattgactaagaacaaatatctgcgcggattgaaacagaatgcagaagatacatatcgtatgaatcagggaatgaataacacacgtgtatatctggagcgccagatgtacagcctgcggacctttggaatgtccgtaaagggactggacaacctgtcggggcagctgacacttctctgcttcctggcaggcggcggagcagcatttctctcttattggtttagaagtgataactactatatagtattgtacggcaccacaggcatcctggccggcatgtttaccatgctggtggattacggagtcaacctggaatccaggagacagcagctccttacctgcctccaggactatctggaaaatgtgatgtggccgcgaatgaaccgggaaggcacagcggagcatgtgcctgccgttacagccgaggaggaccgcagggagccggctaatctgcgttccataggaagagaccgccgttcaaatagtaataacagaagggggctggagcagactgctgccagcagggaaaagcaggaagagaagtcaaaggataactggcttcaggatttaaatccagaacaaaaaagaatgttgggggaattgctgaaagaatttatttcctaaatatgctgacttccaggaatttgttaccagggtcagaaagaaatggtattataagggaaattatgatataatttaagagataagcggctttaccgcagcactgacagaatcatggacgcatggtccatggacataagaaaaggagagcgcgagttatgggaaaggaagttatgtttgattattccaaggcagcaggattcgtttctgcggaagagatggccaattttaagaccacagtcatgagtgcaaaggagaccttgctggagaagactggcgccggtaatgattttctgggatggatcgatttgccggtagattatgataaggctgaatttgcaaggattaagaaggcagcggaaaagattcagaatgattctgacgtcctgctggtggtaggtattggcggctcctatctgggagcaagagcagccattgaatttctgtcgcacagcttttataatgtgctgcccaagagcgttcgtaagacacctgagatttattttgttggaaacagcatcagcagtaaatatatccatgacttaaagcaggtactggatggcaaggatttttccgtcaacatcatttccaagtcaggcactaccacagaacctgcaattgcattccgtgtatttaaggaaatgctcattgaaaaatatggcaaggaagaagccaacaagcgcatctacgca

SEQ ID NO: 3356 - DNA, 956 bp, Unknown
  gut microbiota DNA sequence
cggcaaggatttctccgtcaacatcatttccaagtcaggcactaccacagaacctgcaatcgcattccgtgtatttaaggaaatgctcattgaaaaatatggcaaggaagaagccaacaagcgcatctacgcaaccacagacaaggctaaaggcgcccttaagaacctggcagacgaagagggatatgaggaattcgttgtgccggatgacgtgggcggtcgtttctccgtattgacggctgtaggccttcttccgattgcagtaagtggagcggatattgataagttaatggagggtgctgcttcaggaaggcagaaagccttagatgcaccatatgaatccaacgcagcccttcagtacgcggctgtgcgcaacatcctgcaccgcaagggcaaggcggttgaaatcgtagccaattatgagccaagccttcactatgtgtccgagtggtggaagcagctctatggcgagagcgagggtaaggaccagagaggcattttcccggcggcagtggatctgaccacagatcttcactccatgggccagttcatccaggacggatcacgtatcatgtttgagacagttctcaatgttgaggaatctcctgctgagattcttctgaataaagaagacgtggataccgacggcatgaattatctggcgggaaagagtgttgattttgtaaataaaagcgccatgaatggaaccatactggcccataccgatggcaatgtacctaacctgatggttaagattccggagcagaacgagttctatctgggagaactgttctacttcttcgagttcgcctgcggtgtcagcggatatatcctgggcgtgaatccatttaaccagccaggtgtggagagctataagaagaacatgttcgcactgttaggtaagcctggatatgaggctcagagagaggaactgcttaagaggctgtaatgacagg

SEQ ID NO: 3357 - DNA, 44859 bp, Unknown
  gut microbiota DNA sequence
cctgccatgcgttttgcatggcaggcccttttccattctgtgaaccattctttatatttatgatcacgcttctgtttttgcttctggtctttgcttctggtctttgcttctggttttttgcttctggtctttgctcccggttttcatccctagctggccagcgccgtaatcccaaagtatgccagcacaatcacacccagaataattctgtaatatccaaagaacttaaaatcatgctttcggacatagctcataaggaactgaatggaataaatagaaaccacaaaggcaatcagcattcccagtatggtatagaaaatctgcggtcccgtaaacacatttcctgccaggaaatacttcacgattttcagcagactggctccaaacataaccgggattcccaggaaaaatgaaaactctgccgcggcagccctggaacagcccaggaccatggcgcccagtatggtggaaccggaacgggaggttcccggaatcaaagccagaagctgtaccatgccaatgaggaacgctgtcttggctgagatctgtcccaccttgttaaacctgggattggtacacacgctgctgttctcaagtacaataaaaagtacgccgtatacaatcagggccgctgccaccacataggcgttaaacaaatgggcctccatccagtcatccagcaaaagtcccagaatggctgccggaacacaggcaatgataattttaatccagagggcccaggtggcatccttctgccggctggacttgctggggctaaagggattcagcttgtgaaaaaacatgacaaccacagccaggatggcccctaactgaatcaccaccagaaacacgtccttaaacgcgtccggctggttcaggcgtatgatttcatccaccagaatcatatgaccggtgctgctgataggaagccactccgtgaacccttccacaattcccaatacaatgatttttaacacttcaactaaactcataaattctccttaccgcagacagactccattccctgacgccttccggcatccggcccctgcattcatcctgccgcagaagcccctgcctgctgtacattttatgtattcttatctatccctatacctgttttatatattctcaatctgccagtcaacaggagtaaggccgtgctctgtcaaaaatgcattggtcttgctgaagggcctgctgccgaaaaatcccctggatgcggacaagggacttgggtggggcgcttccaggattaaatgcctgggattgttcagcattgccttcttggtctgggccggacgtccccataaaataaacaccatgggtctgtcctgctggttaagaatgcctatggctgcatccgtaaacttctcccatccaatgtcccggtgggaattggcctggtgggctctcactgtgagcactgtatttaacagcatgaccccctggtcagcccactttttcagataaccgttattcggtatataacaccccaaatcatcgtgaagctcctggtaaatgttcaccagtgagggaggaatatccacatccggctttactgaaaaacacaggccatgggcctgaccataattgtggtaaggatcctgccccagaatcactacctttacatccgccagcggtgtaaatgcaaatgcgttaaagatatcatccggttcaggaaacacccttttagtctcatattcatgctttactgtcttatacagttctttataatagggcttcttaaactcgctgcttaagggccccagccagtcatttgtaatagcggccatatcctgcttctccttttcaacaatataaattcacattttcatattttagcataggaaacggcaggaaacaacggatatcgacaaaataattaagagagccgggattgcgcccgccctacatccttacggcaatccctctctcccacaggtacttcttaagatcccgtatctccagttccttataatgaaacagagaggcggccagggcagcgtccgctccgccctttgtcagcgcatcatagaaatgttccttatttccggcgcctcccgaggcaataacaggtacggatacatgggatgctataagtgaagtcagttcgttgtcatatccgttcctggttccgtcgcagtccatgctggtgagcagtatctctcccgctcccagacggtctgcctccatggcccactccagggcatcggtccccacatccacacgtccgccgtgcttgtaaatgttccagccctttccatcagccctgcgcctggcgtctatggctaccaccacacattggcggccgaacttatccgccgcgtcactgataagacggggattgtcaatggctgaagaattaatggatatcttatccgcgccttccctgagaagcatgcggaagtcttccactgtacgtatgccgccgcccacagtaaacggaataaaaacagtctccgccaccttgcgcaccatgtccaccacagtacggcggttgtccgaggatgccgtgatatccagaaataccagttcgtctgcccctgccctgtcataagccgcggctatctccaccgggtcccctgcgtcccgcaggttcacaaaatttacgccttttaccacccgtccattgttcacgtccaggcatggtatgattcttttggtaaacatatcgcctctcctatctcctgttttaattggtatggcgctgcctccggtatccccgctcagacagcgcaggacttttacagtccgatgaaattcttaagaatggcaaggcccacctctccgcttttctccgggtggaactggcatgcaaacacattttcccgttcaacggaagcgtggattacggtgccgtactccgtggaagctgccacaatggactcatcctctgccttcaaataataggaatggacaaagtaaacataggatccgtcctcaatcccgcggaaaagctttgcttccggccttttcttcagtgaattccagcccatatgcggaatcttaagtccgggatgctccggtatcttaagtatctttcccggaaggatgcccaggccggcagccccctggcactcctcactgcccgcaaatagaagctgcagtcccaggcagatacccagaaacggagttccctggtccactgtctcatgaatcacatccaccagaccatactgctccagctttcccatggcatcgccaaaggagcccacccccggcagaatgaccttgtccgctttgagtatcgttttcctgtccctggttatgacaggcgtttcccccagtgaaagcagggctttttccacactgcgcaggtttcctgcgtcgtaatcaataatggcaatcatacattcaacctcgttcctatgatttaatattttagcattgtaacgtgataaaggcaacttgtttttataatcacttaaatatctgccagtccgcggataaaggcaactgaatctgcctggattcccgcggcccgctctcccgtttccttgggtatctggaaaaaggtttcatgtatcctgtaaaatactgatttctggttgaaaaaacctatcttctcaaatggccaccgcataacagtaggtgtcttaaaaccctctcccagttccaggataaccagcctgcggttcagggttcctgtctgccatttcttgtatgcctcccaccttggcaggtagccttcctctatgtaagtctctgcctcaaccgtattgcctgtcaggggtgccctgcaatgagggcagatatcatccggcacctccccctcttcccatatatccttggtacaggctttggaacactgcctccaatggatatttccgcagggagccaccacccgcccgctgtcaaaatccgtgtcatagacagctccgtctgtcacagtggtaaccacataatagtccttgtccctgaccaggctccacaggaccgcgtaagcttcccgcagctccttctgtaccggatcccccagactgcgcaggcgcacatctctaccgtcatcccttaatctccactcccctccgatgcctataagtaccttttccgcgccggaaagcgcctctaacaaatccttcttctgctggtccatatccaatcttcactcctgtcattcataaggctgtccggggacccgtgtacctctgatattccgctcctgtccccggcgccgtcttatgctatcatatcataaaatagggcgggcttcaacgctgcctaatcccgcgggggacgggcagaaggatgggcagacagctcttcccggttgcatttttgccggacctgctataaaatatagaaagcaaatacagaaaaaggagcctgtcaaaagccaggccggaatgggattccggcctggcggcgcaggtgaagaggtgaagcatcatcatgaaatcagcacaagacctgagacgattactggaatccattgaccggaaagggtatccggcctataaagatacgcggggttcatatgattttacggattatgtactttccatcgaccatgtacagggagatccctttgcgtccccttccaaattaagtgtatttattccgctccagagggccgcctaccccagcggatattttgacgccccccacaagcagactgccctggaggattatctggtcaggcagttctgccaggagatcgccaaatacaattttaaggcaaagggttccggcaaaagcggcctgatagccaccagccatccagggcctgagattctcagccggacagcctgcgaatgcagtattaagggcataacggcccgctttgaggcaggttttccggccaacggcaggaccattaattccggtgaactgattaagatcctgtttgacttcctgcccaggtgcgtcaaaactgtattttactataaaaacaggccggcccaggaggtaaaggccgtgtcagacctggcggaagaccagtatttcatccgttgtgagctggaacgcctgggacttgtctcctttgtggcagacggctccatccttcccagggaaagcggcatttccagccgtcccatgaagggcagcgtccccttccagtctccggattccctcaggatggaattaaaccttccccatggcggcagaattaccggcatgggtctttgcagaggcattaccctgattgtgggaggcggatatcacggcaaatccactctgttaaaggcactggagtccggcgtctacaaccatgtggccggggatggacgggaatatgtcatcactgattccactgccatgaagctgcgggcagaggacggccgaagcgtccagaatgtggacatctccctgtttatcaacgatctgcccaacaaaaaagacacccactgcttctccactgaggatgccagcggcagcacctcccaggcagccgctgtcatcgaagggattgaggccggaagccgtgtctttctgattgacgaggacacctccgccaccaacttcatggtcagggatgatctgatgcagaaaatcatcagccgggaccaggagcccattaccccattcattgagagagccagagatttgtatgaaaaatcaggcatttcaactgtcatggtggcgggaagttcaggcgcatatttctatattgcagataccatcctccagatggactgctatgaaccactggacatcacggataagaccaaggccttctgttccggctacggcgttgagcccatcacctccgcccccggctttcttcttccgtccggcgggcgcagactgttaagcaataagggcggttcccagactgcaccgggaaattatgcctcatcaaacagggggaattacaggggcagaggcccccgcgacggcggccgcgatgagcgtatcaaggtcaaggtatacggaaaggattcccttcaaatcggcaagtcccctgtggacctccggttcgtggagcagctcattgactctgaacagaccaactccctggcacagatgctgcgctactgtgtggaacaccagctgctggagcggtacacgctaaaggatacggttgccatgctgcttaaggagatacaaaaaggcggactggcagccgtgggagacagctcctatgcggcctgcggcttttccatgcccagaatacaggagattttcgcctgccttaaccgataccgcaattagtttctgccaccaaccgtaatggctttataaaaacagcgcttccgctgcctgcaatggcagcggggcgctgtttccttttactttaccgctgtttattctctttttctgcttcctctaatattccttcccgtccagaatctcctgataatccttcaggttcttctccagcagtgcgggtgtgtccaggttatagggacattttcccttgcactggttgcagtggagacactgttcaatcttcttcattttctcctgtgcgtccgatgtcagccaggctgcggaaggggctctgcgtatcataagggacatcctggcacagttgttgatttcaatgcccacgggacatggcatacagtatccgcagcctctgcaaaattctcccagaagctcttccctgtccttatcaatcactgcccgtatctcgtctgtcatttcaggaggatttcctacgtaagacaggaattcatccagctcccgctctctctgaacgccccagatcggaagcacattgtcaaactgggccaaatacgcgtaggctgcccgtgaattattgataagaccgccggataatgccttcatggcaatgaatcccatgcccgcctccctgcaccgtttaaccagctccagatccttatccgtggccagataacagaatggaaactgcagtgtatcataaaggcctgaatcaattgcctccatggccactgacagcctgtggttggtgattcctatgtggcgtaccttgccctgctccttagcctccagcatggcttcatacagtccagtgccatctcccggccttggacagaaggaaggattatggaattgatagagatccacatggtctgtcctcaggtttttcagggaaatttccaaatcctccctgaatttctccgcagtctttgcggctgtcttggttgcgacaaacaccttgtcacgtattccctcaagggcggctcccagcttttcctcactgtccgtataattcctggctgtgtcaaagaacgtgattccgccttcatatgccttttttatcaggtatacggcatcctccttcggtattctctggacgggaagggccccgaacccatttttgttcaccgttatacctgttttccccaaagtaacttccaccatcttatgtacctccttcaagcctgctgttttttattattctaccataaaactgctgccatctacaacagaaggactcaaacaaacataaaattgtacgctgttttgaccccacgtcccgtatatccggcgggttggatatcctgctggtaaacacactgtttccacattcccggatttgtgatagaatggataaaacaaagcggcaaacaagaatgtctttggcagatacgccgggaacagctgattgaacgcagcagggaggttaagcgatgaaacatattgggattctttgcgccggcgatacggagctggccccttttttagaacatatgaaagggcagcaaattacagaaaaggcaatgcttaaattccatacgggaaccataaatcatgtgaatgtgtccgccgtatacagcggcgtctgcaaagtaaacgccgccattgcggcccagcttttgatcgatatgttccatgtggacttaatcatcaacgcaggaaccgcaggcgggatgaaggaaggggtgcagctttttgatactgtaatctcggaacgggtgatttaccatgatgtggccgatgatattctgacggactttcacccatggctgaaatcaaattattttttagcagatcaggagttgtgcgccatagccagagcctatagccggacgtcaaaacatcctgttctgtttggaaccatggttaccggggagcaatttattgaagatgaaaaaagagaggaaatcaatcggaaatttgaccccctctccacagacatggaaacggccggcgttgcccatgtctgctatgtaaaccgcattccatttctggcagtgcggaccattacggataccgttacgcatcagggcatcgaaacctttgaccagaactgcgaagcggcctctgaaatatccgcggagattgttttaggcattcttgggcaattagattaggaggtataagggcttatgctgatacaaaatgggcatcaacaattacaggactttacgaataagaactataaacaaaccataactgaagtgacaaagggcgtatggtttgttttgggattgggacacagcaacgccatttttattgaagcgggttccagcgttattttgattgacacattggatacacgggagcgaggggaaaagctgctggacctgatccggcaaaatacaaaaaaagaagtcggtacaatcatctacacccacggccatcctgaccaccggggcggcgcaggagcttttatggatagcaggccggaggtcatcgcctttgcgccggcggctccagccttaaaaaaaaccgggcttttacaggatattcaaaatctgcggggggcacggcaatttggctatccccttaccgaccaagaagcaatttcacagggcatcggtccccgtgaagggattacccacggagaacaccgtgcctttgttttgcccaccactctttatgaacaagacaaggtaagccgtgaaatcgacggcgtacagttggaaatggttcgtctccccggagaatcggaagaagaaataatgatttggctgccgcagaaaaaggtgttgtgctgcggggataatttctacggctgttttcccaacctctatgcgatccgcggagggcaataccgtgatcttgcggcatggattcacagtattgacgtactgatgtcctatccggctgagtgtctcctgccgggacacacggcggcgattctgggacatgaaaccatcagcagcaccttggggaatttcagaaatgcatttgaatatattctgacgcaaacgttggagggaatgaacgcgggaaagactgcggatcagttggcggctgatatacaattaccccccgaatatgcaggtcttccctatctggcagagcattatggctgtgtggaatggacggtacggtccatttactcggcttacctgggatggttcgacgggaaccccacgcatttgcaccccctgtcccccgaagaacattcacaaaagatgattgcgttaatcggcggcgtgcagactgttttggacgcggccaaaacagccctttcccaccaagaataccaatggtgtctggaactatgcgatttacttttatccaatgggaattcagcaaaagaggaagtattgcacctaaaggcttcctcgctggaaaaactggcggagtacgaaaccagcgccaacggacggcactattatatggtatgtgccaaagaaatgaacccggaataaattctaacttttttctgatatgtaatcaaagcgggcaagcacagtaggggcttgcccgttttgtctgcccattcagcaggacatgggctttctatacaccctgtctgatgctgaaaccagacctgcgcctgcggcagcggtattttcacggcaacgccggcagagcgcataatacgcttacttcgcccaaaaccgtgtgccaaagggtgccccttggaaaacccattccgcctgctggctgcccaatccgaatgtttcccaaattaccgcttatacaggttttcatgtatcatgcgctgagcgtcacgtcccctcctgccagcatttcttttaaatcatctatggtcatgtcccgttcctttaacatctcgttgaccaccttaaattcctccagctggatatgttccatcagtgccttttccttttctctcatggtttccagacagctttcatactgtgctatggatgcttgtacatccgccagctctccctgcattttttcaaccggtgactttcttactccccgtgccataaacgtgcgctccttttctttttgataatatctggtctgaatctgcttccgggtatctgttcggaggacaggtccatttattaccagtatatgtaagcaaatttcaaaatatacataagctgtataaaatcctctccgggtttaggttcgctgtcccgggtcaggtaagctctccttgcagccggtaaatcaacggaatcatccaaagcccggcagctccggtaagccggacaaaagggcagccgcagagggcagataaaaagaggcccataaagagaggcccataaagagaggcccataaagagaagcccatgcaaacatctgtttccgcctactcgtcttttggaaaatttcatggtataatacttccgtgacttccatgtgccgccatattgccggaaaggaaaacaataatgaatgagacagataaagggcctgatgtatgccaaaaccaagacgaaggtttgaacgaaacccagggcgtgccggacggttcccgtgagctttcagacagttcccatgagcttccaaatatctcccctgagccgccggatacctccaacaagcttccggatggaatggagattgatatgtcacactataaagaggggtctgccgctgccaaatgcgtactgggagtgattcttctcctgtgcttcatcttcatgtccaggtcctgtaactacagacattcaacactcaccttttatatgggtccggagccggaggttaacctgggaagccagtattacgaggaaggaagatatcaggaggctgctgattattaccaggaaaaggtggacgaagttttttcaaacggcaagcggtatgaaccggccaacggtccgctctattttaacctgggtatggcatactataaactggaaaactatgaccaggcccttctctatctgaaggagtgcgcggatgtggacaagaggacttccaatacagaagaactggcatgggattataacaccatggccgacgtctgtaaggacgccggccatatggacgaggccctgaactattatgaaaaaggtctgaaggctataaaaaaggcctgcggaaaggactctgagtatacagccatttttctatccgatttaggagacgcgtacaagaaaaccgaggactatgaaaaggccctggagaattatcagcaggccctgaagatccaggaatccaatggaagcgaccagacctggtcctacatccgtatagcaaggatttataatgctttaaaggattatgatgccgcaaaacatttttatggcaaggcttccgggtcggaaacagccgactcctacacaaaaggggtggctttctacaatatgggacagatgtaccatgagcgcggggagtattctcctgccctgtccgcccttgacaaggcgctggagtttgttaacaaggatggcgacaatgcctatgctgaatccaatgtccagaataccctggcttccgtatacgctgaatcagaggacagtctggacaaggctatcttgcattctgtcacggcatgccgtctgctggaaacatccggattccccacgcacaactgccgcgaggacctggaacaattcaaagaacagctgaaaggctactaccagacagataccagggatatgacagatgaaggatttgaattatggtatcaggatcaaatggattccgattaaaaccaggaggtaactatgtttaaagattacgaacatcacgcacagtattacgagaccgatcaaatgggctgtgtgcaccattccaactacatccgctggatggaggaggcaagggtaaacttaatggaacagatgggctgcgggtataaagccatggaagcatccggcatcatgagcccggttctggaggtgcactgccagtacaggtccatggtacgttttgatgaccatgtaaagatacatgtatgggtaaaagaatataatgccatccgcatgacccttggttatgagatgcgcgatgcagccaccggtgaactcaaaaccaccggcgagagcaggcattgtttcctggatacaggcggcagacctgtatccttaaaacgttcctaccctcagtgggacaccgcattctgcagcgcggtccaggcgcaggattcccggtaatgacggcatctgtaggcgatgctgttatccaaagggattatcctcacatgtatatatgtaattattaagacaggaaggctgactagtttatgacaaaattaaagaatatccgaatattgataatatccattttgtgtgcaatatctcttttgctgggaggatgcacggattcctccccctctttttcaccggataagggttcatccataaccgcgccatccggttatggactggctgtgcattttattgatgtgggccagggcgacagtatactggccgaatcagacggacactacatgcttattgatgcaggtgaaaatgaccaggccggcaccgtaatctcttatctaaaagcacagggcgtaacaaagctggactatgtaattggcacccatccccactccgaccatatcgggggcctggacaaggtcattgatacctttcccgttgacaaggtcattctgccacctgtggagcacaccacaaaaacctttgaggacgtacttgactccattgcctccaggggacttaaaatcacaaaacccacccccggggattcctatgatttgggagacgcctccttcaccatactctcccctgtaaaagactatggcagcgacctgaacaactggtccgtgggcgtacgccttacttacggcgataacagctttgtcatgtgcggtgacgcagagaatcaggctgaagaagatattatcaaaaacggcgcagtgctaaaagcagatgttctgaaggcaggtcatcacggcagcagcacctccaccagtgacgcatttctgaaaaaggtatccccctcctgggtggtaatccagtgcggaaagggcaactcttacggccatccacataaggaaaccatggaaaagcttaagaaagcaggctgccaggtactgcgcacagacgaggagggaaccattaccgcattcagtgacggcaagacaattacatggagtaccggcactgccgcggttcccggcaccagcgccggcagcggcggcaatcagacagccgctatcccagatactgacaacggggccgctgctgaaaatgaggccggcaatccctccacacgctccagctatgtcataaataccaacacaggcaaattccaccgccccgactgcgcctctgccacccagatgaaacctgagaaccgcaaagacgtgacagcatccagggatgaactggtacaggaggggtatgaaccctgtaagcagtgcaggccttaaaccaaacccacagaaaggatttttatatgaaatatatcatcgaccggctggaagagggtctggccatatgtgaaactgaattaaggaaacgcatctctgttcccgtcagccatcttccaaaggaagttaaggaaggcgacgtgctgagagaagaggaaggcaggtttttcctggattccgaagaaacagataaaagacggcgtgaaatgaagaagaagcttatggatctgtttgaataaaatcaaaaaatgacaaatgactgcgggcccgtattgtctatgccaatggggcccgccttttctgttatgctcctgttaagttacccgttatactcctgccatacttcctgtcgttcttgccatacttcctgctgtccttcctgtcatacttcctgccgtacttcctgtcatacttccatccattcatccataccctacctgttatccggcgatatcattttcccgtcctggtcaaactggtattcctttccatcaaccacacaggttcccacagccatcttcccgtctgttcccaggtaatagagagaaccattttccccgtaccatccggtcctcatgtttccgtcaccgtcaaacgagtaccatacgccgtcaatctgcttccagcatccaatcacacgggttccgtcctcgcagatatagttccagtatgccccattctgatgccagcccgaagtaccggaagcttctcctgccccggaagctgcccggaccactgcctgttcctgtgtctgagtctgcgcctgggccggtgcctgggcctgggtctgggccggtgcttgagcctgggtctgggtttttgtctgggcccgggtctgggtctgggtactttccccgcctcctgcatagggacacactccattgggatgcaggtgtgccggatgacctccgcagtggtagtgatagcttcccagcccgctggcattcttgttatcccggtgtcctccgctggcatcggttctgcctgaatgagcctgggcctccattccccacggggcctgtcccgtcattgccgcgcctcctgccagaagcactccgctcatgaccgctgccacccatacctttactgtacgtttcatctcattacctcccgatttcatttttaactctattttaccatgtttttatctgtgtgtaactccgtatttcagcatctttccaggggattttctcattttcaggccatttccggcataaaaaattggtggaagcacttgcacgtttttcccaatgatgataccataagaaacatatgtaatgaattcaactagtttggaggtttttaaaatggaactaatcatacctaaagattacgatccccgcctctccatacgggagacccaggacgcaatcaaatacatacgcgataccttccagaaggaaatgggcagggagatgcaccttgaacgtatctccgctcccttattcgtggaaaagagcagcggacttaatgataacttaaacggcaccgagcgtcctgtttcctttgatatgctggggctacccggcgaaaccctggaggtggtgcattctctggcaaaatggaaacgtatggcattaaagaaatacggctttaagccaggcgagggactttacaccaacatgaacgccatccgcagggatgaggagctggataaccttcactcctgttatgtggaccagtgggactgggaacgtgtcattacaaaggagcagcgcaccctggacaccctgaaggatacggtgcgggagatcttcaaaattatcaagcacatgcagcatgaggtgtggtataaatacccggaggctgtcaaacatcttcccaaagatatttacttcatcaccagccaggagcttgaggacctgtatcctgataacactcctaaggaaagggaaaacttgattaccagggagcacggctgtgtgttcctgatgcagattggcgacaaactggccggcggcaagccccatgacggacgtgcgcctgactatgacgactggaagctgaacggcgatattcttttctggtttgagcatttgcagtgcgccctggaaatctccagcatgggtatccgcgtggatgaggctgccctggaataccagctgaagaaggcgggatgtgaggaccgccgcagccttccctatcataaaatgcttttaaacggcgagcttccctacaccattggcggcggtatcggacagtcacgtctgtgcatgctgcttttggaccgcgcccatatcggtgaagtacaggccagtatctggccccaaaaaatgcgcgatatctgcggggagaacaagatttatctgctgtagccattggccgggagcgtattatggaatcgaatatctcaatcttttttatcatcgaaataatcggtaccgtggcctttgcgtcctccggtgccctggtagccatcaagcagcgtctggatctgctgggagtggtggtccttggcgtcaccactgccgttggcggcggtatgctcagggacatcctactgggcatcgtcccgcccagcctgttcatgaacccggtttacgtgtacaccgcctttctcacggccatggtgctcttcatcctggtgtggctgaaccaacagatactggaaagccggtatatctcggcctatgagaagatgatgaacctgtttgatgccatcggactgggcgcattcacagtcaccggcatcaataccgcggggacagccggttacggggaatatcatttcctttccatctttctgggcgtcctcacaggcgtgggcggcggtatcctgagagatatgctggcaggccagtccccgtatatcctgcgcaagcatgtgtatgcctctgcctctattgccggggccgtgtgctatgtatgccttaacggctggctctccagggatgcctccatgatattgagcgcaatcctggtggtgctcatccgccttctggcgaccaagtacgactggaaccttcccaccgcataccatactaagaacaaataaataaaacaagtccgggccgtaatcattgtacaaaccaatgtaacgatgattacggcccggactttctttccatgcgcttgtattgctcttataaaacatgcatgaaactcacctctgctgctgtaaatacttagtaatgcttctttggaatatcttcatgctgctgtccacgttcctgttttccatgagtatctttgatatttcaccgtccgccagactcatgacctgctcatactgctggtatttaggctctataaccccattttcaattacattataaagcaggctgctgttgataacctgctcgccctcgtccatgtcctcctgtataatggcagctgcctgggcggatccggtaacgcttttgagcacagacactccctgggaataccggaatatgtccatctgcatctcttcatttcccgtcagctgtttcagaaactcccacgccagcttttcatgctttgtattgctgttgattcccatgagaagggaatccactctggaacggttttccccctccttgcccgcgggaaatgtgatgcagtcccactggaacttggtatatttcttaatccggtaaggatatgttttataggtcctgtactccgcaaaggtcaggggcatgaaagccacgttccccttgttgaaatcctcctgggtcacgctctgtccctggttcaggtcattgaggcgcttcatgtatttaatggcatccaggacatgggagtctgtaaagggaagctgctgctgatccccgtcataaaaccttcccccgctggtgtaaaccgcatttctccagctgtaattataggttccgaactggtccagcagtccgtctccgtttacatcctttgttatcttacggcagatttcatacatatcgtcccaggtccagtcctcccccggcacctcaatctgctctttcgccagaagggacttgttgacaaataaaaggacgggaaccgtttcataaggaagggcgcactggtgtccgtcgtactttcccgcatccagggcagtagtgaaaaaatcattccggttaaacccggcgtcgtgttcaatgagctcgtccaggtttttcatgactcccagggatgaatacaggttgaaatccgtgtccggcaccataaacacgtccggcatctttccctctaaaagctttctggcgcaccactccgagtaatcctccttgctgattccgctgtagtaatgtatcctcaccccgggatgctcctcctcgaactttgctatggccttgtctatcatgacaaagctgctggcactggccacatcccagttgcttcccgtgaacatgccgaattccaggacaatctccttctcatggtacttatatatacatccaaggaagcctgcaaggaggaacacggctgctcccaaccccagtgtccatttccatcccttcatcccaatctcatccttccttctgccaacatcttgacctctcccgatccccgtacactggtccggtcaaatctcatgtgcccagccgctttctcacgttggtctggacagcccagatggccagctgggtgcggtccctcaaatccagcttgttcagtatagtgctgagataattgcgcactgttccctcagacagcttaagagcctcagctatctccctgttgctggcccccacttccacctgggctatgatcttccactctgtctttgtaagctcatccacatttttatcacccacaagtatgctgtaatctgcctgggccatctgcgaaaacagcctcagcaccttggttgcaatatccgggttaatcatagcccatccattatacaccgtggtgatggcattggccagttcatccatggacacgccttttaagagatatccgctggcaccatatttcaaagcattgtaaacgtactcgtcatcgtcaaacgtggtgagaataataatttttatctgaggataattttccttgatgattttcgtgcactgcacaccgtccagcttgggcatccgtatgtccatcagtatgacatcgggtttattcttcctcacgctgcggatgacctcctgtccgttggaagccacatccgtaaccattatgtccggcctgctgttgagcacaatctgcaggctctggcgaatcaattcctgatcgtcggcaatcaatactttaatcataagtctccccccatcggattggtattcttgcattaacagtaaatccgtcgctgccgtcaaatgtaacaacgccgctcagcatcttaatcctctccttcatatgctttgttccgaatccgctttttatctccttgcatccgattccgttgtcccttatttgcagaaggatatccgtatcctccttctttatggtaatccatatctggctggcatggccatggcgcagcgcattggtgattccctcctggataaccctgtaaatggcattttcctcgtcctcgtcaaatttcaggttctttacctggcagtcaaaatacacccttgcgccggacacagcgttcatgtccgataccatcttgctgatggcatattccaggctgaagcgctccagggcgtccgggcgcagctggctgactgagcgccgtatttccttaatgccgtcccttgtgaccttggaaataagctccagctggtcctttgtctgctggggcgacgtgcctatggtggccaggcaggcgtctattcccgcagcaattccggtcagggtatgccccagggtatcgtggatttccctggccaggcggtttctctcccgtgtctcagccatcttttccgccatcacggaatactcctgaagctgctcattcacatcctgaagctgctcgttcagggcgtgtatctcgtccagatttccctgctgctggttgatgatgttcacacagtacaccacgaacatgattacattcagggataccaggatattatagctgctgagcagatactgctgggtggttgcattgtaaaatgagatataatcctgtatggaatacaggcggtatgaaatggaaagcagttcgtaatcagccagtataaaactgccgattgccactgccgccagaaaatacctggatttcccgttcttggcatagagaatcacattggaaaacaccagcagcagaattccgttgtaattaaaattcaaaagtatgatgatggcaaaacatatggcaaaatcagccacaaggctgaaaagaatcaccttgctgttgtccggaaacagccggtcccgcacaaacatactgcctgccagaagagccagaaggagggcgcagagccagatgttccagtaaggataccagacaatggcctggatgccgcttaaaaactccctggccacatagctgcgccgtatattttcaattgtggcatatataaatatgctgagtcccatgacagataccacattcagcgccagaatgcccagctgcaggatgcgtacccgcctgttatccatgttcgtatccatcttctcactgccacccgtctatctcaaactcgtggaggttatccctcgtaatcatggtgctgggcatgcttatgtatttctccaccggctccccgtccaggtatcggtatgcggtctcagccgccttccttcctatggaccttgggctctgggcgctggttcctgtcacatagcccacatccaggattgccttgaaatccggagagccgtcgattccgtaaatcaggacgccctcctccctcctggcctgctgcagggctgccagagcccccagtgccgtggggtcattgcctcccaaaatcacgtcaaagctgatgtcacggcgcagcaggtcggccatcacatgggaggacacctcaatctcgcctgccgcagcttccctgtataccacctggtaattgtgattgtccgctatggtgtccagaaagccctgttcccggttggtaatggaggtctgtatggggttgtcaaggatgacgattttagcctcgtcctttcgtttcatcatatccagggcgcagagctggcccgcctggtaattgtctgtttcaataatggaaattacggagtcccggtccttcaccaccgtatccacattgatgatgccgactcccgcctctctgcacgcatccagggccggctgtaccttttcccagtccacgggatttaaaaacagcatctggatgccctcgtctatcatttcctgaatctgttcattctgcttttcctggtcctgaaggggatcccgggtaagcaggatatcgccgttggcttccaccacctcttcaatcccctcattgagtacatcaaaatacggattattcctggtcatataggtggccccgaacagcctggcctcatgctggcgcccgcttgcatccccatggccgcagccccccagcaggagcatggcgcccgctgtcaggattaacagacctgtccctatcttcatctggttcccgcctccctattcttggcttaacttcccggctgccggtcatatccccggctgtccggtcatgcccccggctgcccggtccttccccattatacctcaaagatgcaaatctgtaatatttcataggaactttttataaaactttggtttcgacaaaaagcgccccactgccgtgaaacgcttttgccgtaaaccaggctctattccgcctttttgtttctcagataatccacaaaaacagccaggagaattacagttccctttaccacgtactgccagaaggaatttacattcagcagattcagtccgttgttcagcacgccgataatcaggccgcctatgatggtgcctccgattttaccggagccgcctgccatggaggtgccgcccaccacaacagccgcaatggcgtccatctcggctccgtctcctgccgtcggctggccggaatacatacgggaggccagaaccacgcccgcaagtcccgccatgattcctgaataggtatgtaccaggaatttaaccttggctgtgctgatgcctgagaatctggctgcctgggagttgccgcccaccgcatagatatggcgccccagctttgtcttattcatgataatggccgtgataaccagcaccactgccagaagtataaccggagtggggactccgcccacgtacccggctcccaaaaactgccattcctttgtaaccacacgcacaggtgaaccgcctgtatatacataggccagtccctttgccacattcatggtggccagggtcacgataaagggcggtatggttgtctttgatatgacaacgccgttaaacatacccaccacggtgcccaccagcacgccgcccagtacgcctactgcgattggaaggccgtaacgggacacgcagccggctgcaaagcagcctgaaagggcgatgatggagccaacggacaaatcaatgccccccaggataatgaccatggtcatgccgcaggccaggaacaggttggacgatatctgtctcagcacattgaatatatttttctgggtcagaaaggagccgctggtctttggaaacacggataagaaaatacacaaaataagcagggccccgatgatgccgatattatccttgaaatattgttttacatttttctgcaatctggttgtcatttgactttcccccttttcttactttgccgccagcttcatgatttgttcctgggtgacgcattcctcatggctgaagcacccggttatccggccgtcgcacatgacatagacccggtcgctcatgttgagaatttcaggcagttctgacgatatcatgataatggacacgcctttcttcaccagctcattcataattccgtatatctcagacttggcgcccacgtccacgcccctggttggctcgtccagaatcagtatcttgggggcggtggccagccatcttccaatcattaccttctgctggttgccgccggacaggtttccgataagctgttcctgggacggggtcttggtatccatcatctcgatatactgccgggtaatctcctcctccttgtccgcatccacccatatgccctttataaagctcttcagcacctcaatggtggagttgaaccggacgctctgaaccttatacagtccctcctgcttccggtcctcaggaaccagggcaatgccgaacttcatggcatcaataggagatttgatggccgccttttttccatccacgctgatttcacccgtgcagccgggcgtcagtccgaagatacacttcatggtctcgcttcttccggcgcctaccagccccgcaaaaccaatgatttccccctcacgcagttcaaagctggcccctttgaccatctttccgtctgcaatgttttcacattttaaaaccacccgtccgggctccatgtaatccctggtgtaatacttggtcagctcccggcccaccatcatggcaatgagatggtcccttgtggtatccttcacccgctcggtgcccacataggttccgtccctcagcacagtaacccggtcgcagatctgctccagctcgtccatcttatgggatatatatatgattcccacgcccttctttgtgagctctctcatggtgctgaacaaaaattccacttccttgtccgatatggatgaagtgggctcgtccatcacaagaatcctggagtgataggaaatggccttgacgatttccaccatctgctgctgggcaatggtcaggtccttgaccagcgtcccagcgtcaatgctcatgtggtatgtatccagcagctgctgggcttccttttccatggtctcatggctgacccatagcccctttgacggctctctgccaagaaagatattttccgccacagtcatgtgaggtaccagtaccaattcctgatggataatggaaattccgttgttgtgagatgcatttaccccgtcaatggttaccttttttccgtcaataaaaatctcgccctcttctgcgatgtagatgccgcccagaaccttaatcagcgtggatttacctgccccgttttcaccgagcaatgcgtggacctcgccggccctcagttccaggtccaccccctgaagcgccttgactcccggaaatgatttgtggatgttcttcatttgaagcagaactgtttcactcataatctcacctgcctgttcttctattcatatggttcctgacagagtttcctgccgtgcttttgcgttttgagcctgtcagataaaaagtgcctggcccccgcaggggcccagcacttttcagactaatctcttactgccatccatctgtgccatacttatctacattttctgatgtaataaggaaggtttctaccggatatcttgattctaccttatcgccgtttaagtatgtatacatgatattcactgcggactgtgcaatcttaacaggagactgtgcgccgcttccttctatcagggattccccggaagccatctctgccttgatgtcaggagagccgtccacgccgtaaatcatgcagtctgtaagaccggctgcgttggctgctgccagtgctcccagtgcagtggggtcattgcctccgaaaatggcaaccacatcgccgtgagcctgcagaagatcctctgcaatacccatggaaacttccagattgcccttggcatcctgctgtgcaacgatgttaaagccttttccttcaattgcatctaaaaatccgtttgtcctgtccgtaacagagttcatggtaggagaatccagtacaatgatatccccgccgtccgggcatttctttacaaggtcctcgccgcagaccttgcctgcgttatagttatcagaaccggtgtaggaaatcaggtaggacaagtccgctacctctgtatcaaatcccacgatgggaattcctgcttccttaagctgatccagtgccggaaggattccctctgcctctgccggattcatgaacatggcgtcaatgttctgggaaatcaaatcctctacctgggtaatctgaagagtgacatcattggcgggatccactgcaatcagctcgtcgccgttggcctcaaccatttccctcattctcttctcaatggtgacaaagaacgggttggttccatccatacaggtataaccgaatttgtaatgcttgtccgggtccttcttcttcacatcagcagatgccatatcggctgctgccggagctgccgcttctgtggcttccttgctctcctctgccttctcaggctcagcggccgcctccttggcttcctctgtggtctgggcctgggttggcgcctcggtggctgctgccgttgtctgggagtccccgctgctgcaccctgccagggcagaacctgccattgctgcgcacatcattaccgccaacagcttcttagtactttttttcataagttacctccttttgcaaaatgttttgttgtttttgctgtaatcaaatcttatcacgcttttctttttaacacatgtgcacaatgtaatcattttcatatgacatttgtcatatttttcatcatcacttttgccctttcccgttcagccgccgcaaattttcatcgttttgcacaactgcccgccgcgggatactcattgcacagcagacggaagggcggctcatcctcctctataaccggaaaacggcctgccggcagatagaaccggttgtcccggttatcgtcattacacatggatacctcgcccaacagaaccggccctgtgcccggctccaaatggaagtcgtgatacagataaggctggatggtaatgctctctccgggacacagccgtatctgcgttcccgcgggaactgtgtactcccgcccgtcactgtgtatccgcacatctgtgtcagccagctcctcctccctgccggcattatatatgcctatgagcacatttcctcctcccctgttgatgatatcctccatcttattccagtggaaatgcatggccgcagactgtccttccttcatgtacagcagcttttccgcatagggtttcgtgtacttatccatggacacattgccgtttctcagggtgatgagggagaatcccaccttgtcaaaatcccccatcccaaaatccgtgatatcccatcccagcatgttgtccctgacctcatcgtattcatggcccttttcgttccattcttccggtgtaaaataacagaacgggggcagtttaaaggagcatctgtcaatcatcttttccatgtccctcaatgccctgttgatttctgaacgtttcatggcttttcctcctttgccaacttactccagatgggagaacaccctgattgtgtggagcacatcctccttcatggcctggaccgcccactgggttacatcgtggaaaaatacatattcttcggctgccctgcatttttcctttacatacatgccgcccgccttggcaaggtacgtgtagtaattaattttcctgaccccgttggcaatacatttcttaaaatcctcgtcgctgaccccggatccgccgtgcatcacgatgggaatgccgatgctttcccgtatcctgcgtatcctgtcaaaatccagctttggcgtggtcagatacagcccgtgcacggtgccgaatgagcaggccagggcgtctatcccggtaagcccggtgaaagcccgtgcctgttccgggtccgtatagcagctctccacagcctccccttcttcgccttctcccacgcttgagaattcctgccttcccatggctcctatctcagcctccacggaagcgccccagtctccggccatttccaccgcaatccttgtgtttgccgcattttcctcaaagggcagaacggagccgtcatacatcactgaggtgaagcccatttccagggcttccctgaggatttccagcttatcgccgtggtccagatggacgcatacaggcacagaggatttctctgccatcatcaccatcaccggcccgatgaccttaagagggataatggactcatggaccggcgcaaactgcaggataaccggctgtcccagctcctcagccgcccctaatacggcctgaatcccctccagagatgtgatgttgaaggcgccgactgctattttttttgcatctgccaggtctaaaactgctttcattgaaactaacatgttatatattctcctttcttccggcctgggccgggacatacaatgaaatatattccttagtaatgcttcttctgcctcttacggaggaagccgcgttttccctatgcggcattccttttgtttggccgcaaagatggttttttttatgtcacggatggatgatgttctgcttctcccatccagcttccatcttctgcctcagctcctcaaaggacagcaggccgctcagggcatcgtaggccgtgacgcaggacgcacccgtggcagctgccagacggatgcattcaaggggcccgcagccgtccagcatggcctttatgaaggcggctatgctggtatcccctgcccctgttcctgacaggatgcagtccggcacatagctgtcctcaaaatggctgatatcattccatcctgtaaattccggcaggaatttcctccataccggctcaggcgcggtcttcagatacatgccggctgccccgcatttcaggagaacgcatctggtccccatggacagcgctctggcagccaaaggcttaacatcctcctccagggataatatgcctgtgacatcctcgccacctgccttctcctgccatttgcagtacagaggacggtccagcatgtatcccagctcctcaatgcttggcacgaagaaatccacatagggcagcacccgctccagtatccttgcccagtccatgcctgctgcttcggaatccgggtccaccgccaccaggtccagggacgtggtaagccccatggattttaccttcttaaaaagccgtaccagctcctccccctcatccagataaaaccttcgcataatgggaggataaccaaaatgaaaatgtgatgcctcccctactttttcaaagtccacgtccccgcagccaaaggtatcattgcagcccggatcgtgaagaaaaaaacggtccagtcccttgggcgccagtacaatggtataggacgtattctcaccaggaacctggctgatgcaggtctcacagccatgtgcgcttatcatgtccttcagtgcattgccaaaataatcatcccctattttggccatcagaaccacgtctgcacccagacgtttaagacccaggcctgtgttggaaacagctcctcctgtacacatcatggcttttcccaccttaagcagctttcccggctgaaacagttcagagagcttctgcttcccgctgttttggaaaaccggcgtaatgtccagggaaatatgcccggccaccgctacctttttatttccttcttccatcttacttcccccttccgcacccaatcatagcagttttcatgaataaatccaatgctttgtgtgcaattattacataggtaatattttatatgacatttgtcatgtgcatattgcacaacgcaaaatgcactatacaaaaaacaaaagtaataaatcgccgaaaacgcaaaaaagccctgaggggccgtgaatatcacggcgcccccagggctttaaggttatttatttaacccatacatgcagattctaatggcactacggattcaagtggtacttgcgaattctatatttcgattacactgcttacgcgattgccgccgctgtctgtcccctgtcccctgaccactctatggcgtcataggcctgggcaatattcagcatatgatcaccgattcgctcgtagtcggtcagcatttccgaatacaggatggaggactccacattgcagtttccctcccgcatgcggtcaatctgattctgccggaacttgcgggtgatatcgtcaatcctctgttcaatctcagccacctctgacagcggggactgcgtatccccggcagccgccgccttcaaaagctccatgccttcccggcaggtttcctccatgacagcaaattccttcttggcgtaattggaaaactgaagtccttttgcctctatggtttcggcatactccgccaggttcatggcatggtcaccgatccgctcaatatttcccagaatggtatacatccggttcagggtgtcaatatccttgggcgtctggtccagcacaagtatcttggaaatcttctgggacagtctcatattgcttaaatcaatttcctcttcccggtctgcgatggcctggattccctccgaagctccctcctccacagccttgaagctctgggatacattctctgccgcagttgccagcatccccttaatctcgtcatgaatctggttgatcgcaatggtggagataccaaggtggtgcttggaggccataagcccctcaaaccactggtccgcatcctttacaggaactgccttatccggaagaatggcaatggcaatcttctccagaagggcgccaaagggcagaagaatcaaggtggtgctgatattgaaaatagtatggacatttgcaatctgagccactggattatccggagtcaggcttaccacaaagtccgtaaaaggagtcaggatgcacagggtcacaaacagggccgtaccaatcacattgaacatcagatgaatcagggtggtgcgctttgcattgcggctggttcccacagaagccagaagcgctgtaatacaggtaccgatattctggccgaacagcacgaacacggcactgtgaaggttgatgacgccgcccatagccagagcctgaaggatacccacagacgcagacgaggactggataatggctgtgaataccgctcctaccaggattcccagaaggggattggaaaacttggtcaccatatggatgaaggtttcggaatcccgcaggggaaccatggcatcgctcatcatgcccatgccgatgaacaggacgccgataccggcaataatgcctcccacatgctgtacctttttatttttcgcgaaaatcagggacataacgcccacaaaggcgatgagcggagccaatgctcctatgtccagggcaatcagctgtcccgtaatggtggtacctacattggcacccatgataatccatacagcctgcttaagtgtcataagacccgagttgacaaatccaactgtcatgacggttgtggctgaagacgactgaatcagggctgtgattcctgcccccaccagcactcccagaaaacggtttgccgtaaggcgctccagaatctgcttcatacggtttccagccacagcttccagattggtactcatcatctgcatgccgtacatgaacagggccaggccgcccagcaggcttaaaaccaattctactcccatgtgttttctccttttgtccgaggaaattagcttctgctatattatcattttacggataaccttatgtgttccggaatgattccgggtaaaaatgggcaaaaatatggcatagcccgccatcccaaacaaacgatcgcaggttatgcctcctttatcatattcttgcggcatccgtcacacagggcgtttcccatgatatctatagcctcttttcctgattatttaccatttctttacgacttctttacacatactcattatacgggatatttcatatgtcgtcaatatcgtttcccgccagtaatgtaaagtctatgtaaattatgtgtaaaatttcttctggaaatacatatatttacaaatccccccgcagcagagccgcaccattatccatttattgagtatattgttttttcctgttattatacatgatttttaaaagaccgatggcaagaactgccggtatccagccggctgcggccagacccgccttcaaattacctcctgatgcccctgctatgagtcccaccagcgccggaccaccggcacatcccagatccccggccagggccagcagggcaaacatggcagtaccgccccgcggacagctcacggacgccagcgagaatgctcccggccacaggatacccacggaaaacccgcacagcccgcagccggccagtcccagaacagggctggcggcagtggacgccagcccatagctgaaaatgcacaaaacggcgctgcctgtcataaaggcggtgagacggatgcgctggctgtatctggcatacattgccctggatatgcccatgagaattgaaaacatacaaggtccggccagatctcccactgtctttgacacattaagccctgattcagcaaaagcggaggcccactggctcatagcctgttccgatgcccctgcgcagaccataataaaaataaaaagccagaacaggctgctttttaacagtccccgaatccccatctcctgcccatcctctgtcagtgccagaatgggaacccgcgaaaacaggacagcgttcataacagggactgctgcccagagaagggccaatacccgccagctgttcagacctgctgtctgaaaaaagacagtggacagtaccaccacggccacggacccccagcagtaaaaagagtgcagcaggctcatggccgcatctttgcgggccgttggacaggcttccacaatggggctgatcagtacctctatgatgcctccccccactgcgtacagggcaacgcacacaagcagtcctccaaaatgtcccggaaccatatccggcagaaagctcagcccggccagccccaaggcagcgaacacatgagccgccacaatgcatgtcctgtatccaatcctgtccacaaaccgcgccgacaacaggtccaccgcaagctgaatgccaaaattcaccgtaaccagcatagcaatgcgcgccagagatatgccatagcttttctggaaggtgagaaataaaagcggagcaaaattattgaccactgcctggaccacatatcccaggtagctggcattcaatgtttggttgtaattatctttaagggccacttatgcggtccctcctccccgtttccttcattccgttttctttattccgtttccttcattccgcttccttcattccgcttccggcacccccctaaagagcagcctcgtgttcccggccatagacctcaatctgcgtcagggcagggaagggggacggatcgtctgcctttatgagctgcccgaaggtaagccatgtgatacccttgcgctccaggctgatgatatgaggttcaacgctcttttcaagctccacggtctcagaggttccgtcggaaaaggtaaaggtcaccttctcccaccagttgtcatgaggaaagtcagcccttgtatagaggacaatctggtcaaaatccacggggcggccaaactccagcgtcatttgggcatcgtcctgcatattgatgccccatgactcatatggccactttccatgggacaggtttgccgtcacaccgtcaatggcgttgcgggccgcaaacacagcctctcccctggtttccacattggcgtgggcgtggggataacattcctggcccctgtgctggtccataacgttcttggccagattccggtatgatttaatttcataatccctggcataccgcatagtcagatagtggcgctctcctgtaaatgatttggggttataggatgtcttaccctctgcaaagggaacctcataaaccagctcatttcccgccccatagataaaggcttcatccatggtatcatccacacgtatgatatagaaacggttcttttccggaagagaaaatataatcctgtctccctcctcatactcacccttccatgccagtacggcctgtttcctgcctgcggcctccgcctttaccgcatcgtttttatccttcactgtaatctgcattcccatatatttacacactcctctttccaacaatttcttttgggttctttcattctaccatggagtcccagggaataccatatacaaaaaaggcgaaattttataatattttaagcattagcgaatattctaatatttacaaaaccttcactttttattcatcagaacctgatattgctgatggtataatggaaaaaataatgaatgaaggggatgattggatgaattggaatgaaacattgagaaacaatgtaacccgcgcccaggaactgaaaacgtatatgaggcttaccagccaggaggaagaacacatgacccgaatcctggaacagtttcccatgacagtcacaagatactatctgtctcttattgactggaacaatccggaacaggatcctgtgttcaggatgtctataccctccattcgtgaaaccgacctgtcgggggactttgataccagcggggaggcggataacacagtgctgcccggcctgcaacacaagtacaggcagacggcgctcatcctgtccacccaccggtgcgccatgtattgcaggcattgcttccgcaagcggctggtgggaatctccgacggcgaaacagccggaaatgtggaccagatggcttcctacatcgtctcccaccctgaaataaccaatgtgctcatatccggcggggattcctttctgaacagcaatcaaatcatacgccggtatctggaggcattcagctccattaaacatctggatctaatccgtttcggcacccgcaccccggtggtgctgcctatgcggatttatgatgacccggaacttctggatattctggcccgctatacaaaaatcaaacaaatctatgtggtgacccagtttaaccattcaaatgaactgacttcgcaagcagtaaaagcgatccggtgcctgatggacgctggtgtcattgtaaagaaccagaccgttctgttaaaaggaatcaacgatgacgcagggagtctcggaaccctgttaaagaatctgacaagatacggtgtcattccctattacattttccagtgccgtcccgtatccggggtaaagagtcagttccagattcctttgacagagggctgccgcattgtggaagaggcaaaaaacatgcagaacggccagggcaaatgcatccgctacgccatgtcccacgtcaccggcaaaatcgaaatcctgggccaaatgcccgacaaaaacatgctttttaaatatcatcaggcaaaatatgaaaaagaccagggccgtatattctgcgagaaattggcacctggacaggcatggctgcaggggtgataacagactttgccgcagactgtttcccggcccatgcaggacttcgccgcaggcaaatgttaagccgcgggacataccctaacaggggcatgtcctgcggcctttttgtgccgtaggcggctgtatatgtaattacatcagtgacagatacaggttcttgatatcctcaaaggacggatcctttggattgcccgggcggcaggcatcatccatggcggactgtgacaggaagtccacatcctctggcttaaggatttcctttaagtcagcagggattcccacgtcagcggacagtttctttaccgcgtccactgctgctttgcggtattcctcctgtgtcatattctcaacaccatccacgcccatggcaatggcaatgtctttaaacttggttcctgtacatggcgcattgtattccatgacggttggaaggatgatggcattggcaacgccgtggggggtatcatataaagcgcccaggccatgagccatggagtgcacaatgcccagaccgcagttggagaatcccattccggtcagatactggcccaaagccatgccttccctgccctctggcttgttctccaccgcatccctcaggctgcgggcgattacttcaatggcttttaagttaaacatgtcggtcatctcccaggcacccttcgtggtatagccctcgattgcatgggtcagggcatccataccggtagctgctgtcagtcccttgggcatggaagacatcatctccggatcaaccactgccactaccgggatatcatgggtatccacgcatacgaatttacgctttttctccacatccgtgatcacgtagttaatggtaacttccgctgcggtgcctgctgtggtgggaactgcaataatcggcacacacggattcttggtcggagcaacgccttccagacttctcacatcctcgaattcagggttggtgatgataacgccgatagccttggaggtatccatggaggaaccgccgccaatggcaatgatatagtcggctccggatgccttgaaagccgcaacgccggtctgcacgttctcgatggtcgggttaggtttgatattggaataaatctcgtaggccagtcctgcatcctccagtacctttgtcaccttgcaggttacattgaacttaatcaggtcagggtcggaacatacaaaagccttcttaaatccccttgcctttgcctcatttgcaatctcctggattgcacctgcgccgtgataggatgtctcgtttaatacgattctgtttgccatgattttcttctcctttacattgacagtatgccgccggacccatcttaagtgtccgtggatttacctggttgcttttgttaatattataacaagtcctgttttaaaataaaagtgacaaacatccctgtctgtcactttcctttaagttttgtgcagtttcaccatttaggattatgcataatcaccatgttctgtctctgctgcggctggggatatccgggactttccggggcttaaagcagtttcaattttccgaacacctctgccagctttggcggcatggcttccaccagcttatccgacatttcccggggtgtgtccttcatgcctcccagaacccacttcaccgtcatgtatacagagccctggcagtacatctccaaaaggaactgaagctcccggcccaaaggctggctggtttttcttgcaatcaggtccgtataaaactggagaatcagttcaaaatcatgttcctttaatgagttcctgtcatcggagcggaacgcttctgtgaaaaacaccttttcattgagaatgaactcaaacttccgggtcaggctctcccccaccgtatgccccatgccaatctgctcaaaagactgaagcaccagcttgtcaaaataccagtttatcagatcgtacttgtccagaaaattccggtaaaaggtctgccgggtcacaccgcagccctccacaatatttttgaccgtaatcttatccacgggcgctgtcttcatgcactccttaacggattcagccagcttgtattttgttttttcctgctttcctgtaacggccatggtattcctcctgcggcaggtactgcacggaaaccctccggtacctgtgtattttgtaacatatccctgcgccacaacaggcagtgcaggcctggttgcgctgcactgcccgctgcttctatggacagtatatcaaattttgagacaggcttctacctgtttttgaaaatgcttaccattgccttccacatctgtaccagcacattccacatccgccttaaggggctttccttggccttttccacctctgcatccgcggtcttggccgtgtcgtcgtccacgctgatctcatcggtgcgcatgacaatctgcagtgtcttgggcggtttgttccggtccgaggtaaaggataccttgtctgcggacggatccataaacaggaaacggttatctgtatcaaacttatccagctcattgtcaatggtatccttcatggtgcgtccggcctggcgcatcaccgtggtgctgtccaggatgttcaggcttttatccagaagttccatactgccgcgcaggctgtccctggcagccgcgtcaaaatcatcgctgctgtcttttaatgtgttctggatgatagtcagggtgctgattccattgttgagtgcatctgtggtacgccttaccagttcctgggagtcatccagggcagtctggagatccggataatatacgtccagagaatcattgagggcctttaaatcctcaatcagataatccatattgtcaactatctcggcgctgtatttcgcagaatcagacgtgtcatccatcagattcgccatcttgtctgtcagggatttgctccgggcagataaatcctgaaggactgccaccttgtcatacagggattgttcaatggctatcgcggcttctgcggcggcctgctggtcgatactgcttaccagagggatgtttttcttctctatggatgcggtggccgccatgcctgccaggccggtgtttcctgtatttatggcagagctaatagcagtgcctgtatccggggtgttactgccggagtttccgctggaatttccgctggaatttccactttctgctgcgcttgcgctgctgctcccggttgcgcttccgttggtgctttcgcctccggttgtatttccgcttccggctccagttccgcttccgtccgtacttgcgcctccggttgtatttccgcttccgctcccggttgtgcttccgtcggtacttccgcctccggttgtatttccgcttccgctcccggttgtgcttccgtccgtacttgcgcctccggttgtatttccgcttccgctcccggttgtgcttccgtccgtacttccacctccggttgtatttccgcttccgctcccggttgtgcttccgtccgtgcttgcgcctccggttgtatttccgcttccggctccagttccgcttccgtccgtacttccgcctccggttgtatttccgcttccagctccagttccgcttccgtccgtgcttccgcctccgtccgcatttccgctcccgctcccagttccgctggtgcttccgtttccgtctgtgcttccgcttcctccggcacttccatccgggttatctttcccctccgtactgccgccggaatttccgcttccctggtcattcccctgattattattctgggtgttttcctggctgctgcctccgccggatgacgaatggctcccgccatttgatgtcccgtaatccacatcctccatgttttccagttcttcctcatccagctcctcgtcatagagccttctggccttggtactggaactcttatacagactgagatacgtcagcagtgtgtcctgggatgcctgaagctgggtatccagcgcaatgatggattccatggtcttctggagttccggcaaatcgctgctgataccgcctgcgctgttttctatgttcttaagtctggtctgcagctttctcaaagggtcctgcatgtctcccagcgtgttgacaatgtcattcatgctgctgtgaaccacctcggcacagtccttggccgtctgcaaatggggaatcatggtatccatctgctgtgacaccgatgtaagcgctgccagcgtctggtcatttccggccagtatgctgtccttggaattactccacttctgtctggcgctctccgctgagtccataccctggcggacctggttcacgccctgccgcatgttctccacagactttgccatctgctccaggctgtcgtaaagctcatcccctgcatcctgccacgtatccttggcttccttcaggtccttgatatgttccagatcctccaccgtacccggtaccatggtcataatcacgccaatggtctcaaagctgtccgtgccgatgcgcaccgtgtaatccccgtcctccccggggagggcagtaaataccaccgctgtggtttcacccaggttctgggtctgggacccttcagcctccacgctgtagcatttgctcatatccacgggcacagccaccataagcatcatgttgttgcggtaatactccccggcattgtcattgggctctgccttcacattgatctcaatcagcccggaagctcctgccagcttatcgccgtccatgggtacaccgttcagcttgtaagatacgtcaaagtcccagggcagtaccatcatgcctttatccacagcgcatttaaaataaaatcttcccctctggtcctccggaagctgccacgtcaccattccgtcccccagcacaggttcgatgctgttagacatgttaatcacattttcataggttccgtaatccgtaaattccgtctggccgttgaggcccaccccctttaccacattaatcttatccaccctgccgtaatagtccaggttcacatacatggtttcatccacgtccacagaaggctgtgctccgtatacaggcgcgctgccagtgccggtgcaaagcatgacaaagaccattcccgctgccatgattctcttatatttcattttcatcgctttccacctccgctggttctaaatcagtccgtttcaatgcggacgccttgttgacaatggtacctattcctgcctttatcagggctttgcgcttttcatggcgccgtttcagatacttctgcaggcggtcccattcattgctggtaatgatacggtcaaagagcaccagaagggccggcagcacagtcagcaccagaatcacgctgaacagcgccccccgtccaatcaaatggcccaggtcccctatagccgctgtggttgatatgaaatgaatgatatatccagccaatatgataatggttcccgaagtaaaaatagagggacaggacagcatcagcgcctggatacacgcttccttcttctccagggactttctacaggacacataattgttggtgagcagaatggaataatccactgtggctcccagctggatgctgctcactatgatgtaccccataaacaccatggtatcccctgccaggtaaggcatggccatattgaggaaaatcgcagcctcaatgggcaccatgacaatcataggtatggcaaaggaccggaagctgaacatgaccaccaggaacacgcccagcatggataacaagtttaccctggaattatccgccgtaatcgtagtcttgatatcctgtgtggaaggtgtttcccccaccagataggaattctccggataataccgctccagaatatcccgtatttcatccgcgcccttaaatgcctggtcgctctctgtcttggtccgtatgtaaataagcatcctgcagtaatcctttgtgtggagctcactggtaacggaatatggcaggaactcctcgggtattccctccggaagggtattggacatggacgtcacacttttcacatagggaagatcctctatctcatctgacatctctttctccgttacagccgaagtattgggatacatggccagcatcatattgcttcttccaaattcccgggagattacctggtcatccgcatagacctgggttccctcgctggctcccaccgcactgttgccgtacaggaaatcattcattccctgggccacataagcgggcggcgccagaatcagcataatgataagggatgcgtaacgcaccctgtagacccattcgctgaatttccggaaggagggcaggaaaggacggtgcctggtcttatcattccacctggaaaatttgagaatcatagccggcatgaagaacagcacggttataaggctgaacacaattccctttgccagcaccagtcccatatcaaatccaatggtaaacttcatggataccaatgccagaaagcccaccaccgtggtcaggctgctggcaaatatggagttgatggcagcgtcaatggcattgatcatggcctgttcttctgagagccccttctgcttttccctggaaaatgcatccagcaggaaaatagagtagtccatggaggtggccagctgcagcaccatagccacattattggtgaggaacgagactgtcccgataaaaatattcgtgccccggttcagcaaaatagccacacccataaccagcagaaaaaggaatggttccgaccaggcggtggtactgatgcacagcaccgcaaatatcataatgacggcaaccgtaagaatgaggttcatctcgctctccacattttccgtcagggatttgttctgtacagccattcccacataatatcccttatcccctgtaatagctttcatctcatcaatggcctgggatgtcttctttgccgtatccccctggtcaaaggtgatgtccataacagcacatccgtccttgtagtagtcctcaatatccttctggcgtataaaatcctcgcctgaatagatatttaccgtactgtcgcaccagagaatctggtccaccccgtccactgcttccagtttatccttgtactgctttgcctcatacaggctcacatccttaatcatcagcctggcagtgcccggatagccgaattcatcctccatcaggtccagtccaatacaggatctggccgatgcaggcaggtactccgtcaggtcataattcacatttacaaaaagcatcgctatcagggagaaaacacaccctgccacaaatacgctctcaatccagccttttttatgtatgataaaccgggccatacggaaggaaaacttatccccctcctgcggctcccggccttttaccctgtgcattctgtccttgattctgccaaacagcttctgtcccatatttccatgctccttatgctgccgcccattgcggctgtgccctgcaggccttataccctgtgccgcgcaattctgctgcggtatttctgctgcggtatttctgctgcggtatttctgctgcggcgtttctgctccggcattaccgctgcgaaatttccgctccggcgtttctgctccggcattaccgctgcgaaatttccgctccggcgtttctgcttcggcattaccgctgggatatttgcgctccggcaatttgcttcaatattcctccacaaaatccttacgctcaccgcatcagaatcaccacaaaatattgcttcccgtccttttccctgtgggccatccccaggctgcggtaatattccagggaatacttccggtcggtctttgactggaaacgtttatccagcttttcctttattttatcaaatgcctctgacgcgtcctcacagtccctcacgtacagctccagacaggaagcactccttctgtagttgataacggagaggtaatcgttaatggtaccttctccgggaatcctgtcatctgcatagccccctgccatggctccctccagcctgtggtccgccgccttgttgagggtcatatccatctgaaagcccgcgtaccggtcatagacacggtgcatatcaccgtcatattcatcctcacggtccgggtattcctcaaagaataaatccttcttttcctcattcagctggtcaaacaaatcctgggccatatggtcgtagcatcctgcgtcgtaagcccctccgcctgtattttccacccagccggccgaaaccagggctccctgtgctgaaaactcatatttcccgttatccagtatcagctctcccaggttcatgcccccatcttcgtggaagtaataccactccccgtccacttcccgccagcctgtaaccatggccccattttcatccatgtaataggaccttccgtctgcctgcagccatcccctgtgtaaagttccatccggttccagccaataccatattccctctgtctggttccagcccggtacaaatgaaacgcttatctcctgcgcctgctcatctgccagagccgtcacgggtccggtcccctcaaaggcccacagagctcccgcagcagccagaatgactgcacatattctatatctcatgccatttgcccccgttccttatatatatatccattatacaccttttatactgttaaacaacgtccattttgttaattgacttttgtttatttattgactataatggattataataaattatggcaaaaatacaatgattaatttccttgattttgatggttaatcaacattttttccatttttgtgcaaaatacaattgttaaatctttgtaaatacacgcaaatccacataaacaaaaggaggaacagataatgggcattgaacctgtggaccgccgggtgcgtaagacccgaagacagcttcgtgaatgtcttataacattgctcaaggagaaaaaggtccaggatatcacggttcgggagctgaccgacatggcggacttaaaccggggcaccttttatctccactataaggatgtgtttgaccttctggaaaaaacagaagccgagctccaggaagatttcaaccaattggtctgtaaacatgacgccgtggatctaaaacagcgcccttctgtcatattcaatgaaatatattccttagtatatgataacgcggacctgattgagattcttctgggggaaaacggggatttgaattttgtaaaccgtctgaaacagcttatacgtgaaaagtgcctgaaggactggatggaggtattccgctccggcaatgctgctgcctttgacgcattcttctccttcatcgtgtcaggatgcatcggcctggtacagtactggctccagacaggcctcaaggaaacaccggaacaaatggcaaagctgacagaacacatcatcaccaagggaatcggtgtcctggaaattgatccctacgtataatgacacctgaactgtttccatttcctaaaaatagagtcatgtgtgcgcagtggcatgtatatccacaaaccggatgaatttttctccatgttatgatatgatgggaaataaaccacaacagaacacaggagaatacaatggaaacacgaattgaatacagccccaaagcaatggtccgcatccgcaaaggacagggacgttccctgaaagccggaggcgcctggatttacgacaatgagatagagagtgtcaatggagcctttgaaaacggcgatatggtaaccgtggaggactttgacggatatccccttggtaccggcttcatcaataccaaatccaagctgacggtccgcatgatgtcccgcagaaaggatacggtcattgacagcgattttctggaaatgcgggtgcgcagtgcctgggactacaggaaggctgtgacagatacctccagctgccgcgtcatattcggggaagccgactttctgcccggtattgtcatagacaaattttcagatgtgctggtagtggaatccctggccctgggaatcgaccgactgaagccggtcattgtggacaagctcagaaaggtcatggcggaggacgggattaccatccgtggtgtctacgagcgcagcgatgccaaggtccgtctgcaggagggaatggagcgccataagggattcatgggagatgcatttgacaccaaggtggaaatccttgaaaatggagtccggtatatggtggatgtggaggacggccagaaaaccggcttcttcctggaccagaaatacaacaggctggctgtccagaatctctgccgccgcatccagccaaagcaggtgctggactgctttacccacaccgggtcctttgccctcaacgccggtctggcagggtccgcacatgtgctgggcgtggacgcctcggagctggcagtaaaccaggccagggaaaacgctgccctcaacggcctgacagaacaggttcagtttgagtgtgccgatgtcttcgaccttcttcccaggctggagcaggaaggccgcaaatacgacgtggttatcctggatccgcctgcatttacaaagtccagaaattccattaaaaatgcagttaagggctaccgcgaaataaacctgagaggcatgaagctggtaaaggacggcggctatctggccacctgttcctgctcccatttcatggacccggaactctttaccaaaaccatacgtgaagcagcgggcaatgtacacaaacggctcaggcaggtggagtacaggacccaggcagcagaccatcccattttgtgggcggcggacgagtcttattacttgaaattctatatttttcaggtttgtgacgagaaataggtttaaaaataaaaaatccctgaataccggtatgagatgcaatgtacgccattgccggtattttggggatttttcttttattttccatgaacaaaaggcaggataaacggataaactataagtagataatatgataaatagatgcatcattacatgtatatggctgtaagtttataacaacagattcatcgctgcgcaatgatagtgcacacttgcagcagtacacttataaatgtacatttatgactgtatatttacggctgtacattcatgactgtacaatgatagctgtgtatatatatagaaaggaccggacatgattatactcattatattcctgatactgactgttctatccatcctggtctgctgttttgtggcaggctcaacgccctatgacagggaggccgacgatgaggcgcagctggaatttctccgcaaatacagggaatccaggaacaggtaaacctgccttaataccgcgaaattccatacttctttttcctcagccgtctgccctgcttttttatcttaccaatgatacatttccatcaaaatggatactaatttgtctgtg

SEQ ID NO: 3358 - DNA, 5883 bp, Unknown
  gut microbiota DNA sequence
tcttctatcttccattcattcttcataatcacatcctgatttaagtacagaccgtttttatagcctatattctttgttttgtctttcgatgttctgtctcttttctgcttaaaagacatattgtaaagatttggattatagccggtaatggtcaggttgccgatggtatgtacgtagcttgcgcggtactgccttgccagcactgcatccccatttgcgatcatctgcacccatggagctggtatattttcaccttcgggaaaaatatgctcaatcgtccacacgtacttcttactggtatcacgagaccaaagatcaacatagatttctctggtctgatgctttgcttcgatgctgcataagataaatctggcagcttccggattctcgtcgtatatgggaccgcgcaatttttcttcaaacaaggaatccggcgcagatacagattgcagctttttacagatttccgtaacaacagcagcgccgcttaacgttttaatcactgtgataatatccatgaacatctgcgtaagctttctggtattcggaacatccgttacgttacggcgaacaaaaaatgtaatcaatgttttgataattccgtttaaatcggattctgaaatttgaagtttctcctgattagacatcaggtacagcagcagaatatacgacggcgcgccggaaattctgctcaaatcttgcagcgcatctgtaaattcatgtatctcatcactgttgtttacgatcacagaatacttttccgcttttgctgacaggtcctccagaaaaaagctgtagtcatattttatcatcttttcgtaaatatcaagaagtgttgttctggttgcaaggtagcccagataataacgcttatccgttttaggatatggctcattcaattcttcccgaaacgcattgtaatactgtctgaaaaatcgctcctgtacagcgtagtcatcctgacctatacaatttagtatatacttccatttttcgtaactattctccgcgtctgaagcatcctctgcctgggcaatcaatgtattcttgatgagatccagcgcggacaaaggaacgcctctgtggttcagcgattcaaaaagcatatatgcatccttatttgtatccacctcaatccccaccagaacagcggtctcaaatctgcgcacaatgccgaacaaagcgcccacctcagttatattaggatttttgctcctgatttctacaatctcatcatcaatgagttttccgaaatgtctgtatgcttttgctatacggcgattaccgaaattaagcggcttggatttctgatccgtgataatcccattatcaaacaagataaaagaaaaatcttcgtcattcatattctgtttctgcagaaaaagccgctgcctatattctgttatctttttaccgtttgcggcaaaggtctgctttttgtttgccaattcacttcgcagatttgccagatcatttctatcgtcatcatccatttcatttttgcgttcagacagcttctcatatagcgcagtcagaagaagcataagcgttgagaagcgctgctgcccatcaataacttcaaggacagttccgttaagagaaccgccatttacacaaatgtaagacccgaggaaataaccatgctcattgtctgtaacatcctcaaacaacgcattccagtcgttaattccccaggtatattccctctggtattttggtattctataaattttatcactgttgatggagaaaatgtctgcaaccgtagtctgatctactgtctttatcataagcaaatccctttcacatggtaataaatcatccatccgcgcggacagccgtatcgctgctttcagaccctctgtatcggcaaaacatgatatacgccttccttgctgatattcctgctggtaattattataagtaataactagtatgatatcaatagaaacttacagcaataggcattacatcaggggcagattttacggctttttgcaaatcctctctgcttaataaaagaaccagaccccacaaaaaagtgaaatccggctcttgtcctctattatttttggcacattaagacttcctgatacctttaaaccactttcccatttcccagccagccgtatatcttcccgcggattctccggtgaaacatgtcgattaccggacctaatccaaaggtacatacgatggttcctatgccaatctctccgcctaacaacactgccagaatcacacacaccgcgtccagtgacaccttggcggttcccagccttatccccctttcatggagggccaccaccaggtcatcggtgggattggtgggaaatacgctgatgatataacaggccactgcaaatgccaccaccaccacgcctgctgccatgatgagcagggaggctgccagcccggttccctgtacaggcgccagagcagtcttccacatatctgtaaatatccccagaaaaaaggacgaaatgaatgtctccagtctgggatatccctttctgataaacgcagtcagaatcaccaccagaacggctgtggcataaatgccaagggatgtattgatccggagccgctcagccagagcaaaattcagggcatcgtatcccccggcgcccaggtgggcgttgatggtcagtaccacacccataggcataatccccacaccgatgccgtaaagtgccaggttacaggcccatgctccgggcgtcatagacttccatttcctcagagtcatagttcatcctgccttatcacaacatcctccagactgctgcgggctgcctttcccctgaaattctccagcatcatatcccggcactcctgtgcaaataaggcatggctgaaatcatttctctcctccccttcaaatttcacctggcaattccggaggactacgtcatcagccctgcgcatataaaatccggaggtcttaatctcctctatcttctgtccgtatcccgggcgcagatcatacatgcccttgggccatttgctcttagatctgaccatcacgcgcacattctcaaatagaatgtcttcaatatggtttcccgggctccctgacaaaaatacgccgttttcagagtcgcaggttatattggaaaaccgcacattagatatgtgaccggatttggtgtgttcatccctgtcatgggtggatatggtaatgggttccgcgcatccccaccagcaatccgcaaaccgccttgtctctatgatgatattggaaaacgaaacattcctcacatttcccccatcccgaatctggatggatattccacggttgctgtcactgatgatgcagttgtccacaaccacattttcaaaatcccccgtcccctctgttccgatttttaaagcagctgaggtagatgtaagggtgcatcccgaaataataacatttttaagaggtccatactccatattgccggaagagctcttcagacagatacagtcatccgcgcatgtaacgtggcagccgatgatccgcacattagtggaatgatccgggtcaattccgtcagaattagccacattcaaatcatttaaaatccgcaggcctgatatgagcacatcgtcacagccggccggatgcagcgtccagaagggggcattcctcataattacatccctaaacgtgatgtgactgcaatgctccacatagaccagggttgggcgcggataaaagtcgcctgtcacatagtatgggctcacctgcttcacaaaggcataggcatttccgtcgatggcgccttctccggaaatggctatattatccgcatccttcgcatagatgaacacataggaaggcttcagtgtcaccggagttcccacccgctccacaccgtcgtctctttgtccggcgttaggatgaaagtaatgctccaaatcattatgggcctgtaataccgccccgcgttccaggtgcagatccacgttttccttcaagacaatagaaccggaataaaaatgctttccgccctccagaatcaccctgccgcctccggcctcgctgcaggcgtcaatagcagcctggatggcaggcgcatcatctgtgatgcggtccgcctttgcgccaaaatcaagcacattaaaaatcataatcaaacactcctttcccctgtcctacacagcaccgaccagtgtcggaatcaccatggagaaccagggcacataggccaccagcatcagtgcggcaaagatagccccataaaatggtaaaataggctttatcatatcctccatatctatacctgccacagagcacccggaaaacagggcagaccccacaggcggggtgatattgccgatacccaggttcatgatcatcatgataccgaaatggatgggatgcatgccaaaacttttcaccaccgggaggaaaataggcgcaaaaatcagtacagccggagtaatatccataaaggtgcccacaaccaggaagataagattaatcatcagaagcaccacgtacggattagaggaaatgctgagcatggccttgccgatggcagccggcagtcctgtaaaggacataacaaaggacatggtggaggaagcggcaatgaggaacatgataatagccgttgtctcacaggcatcgcacaatatagctggcaggtcctttatcttaatggtgcgataacacacaatagacaggaacagggtataggccactgccactgcggctgattccgtggctgtaaatataccggagcatacaccgcctactataatgacaatcagcagaaggctgggcaccgcgtcaataaatgtatgtatgaattccctggccggaacagccttggtggttggatacttatttttctttgcaatgacaaaggccaccagcatacaggcaacacaccacatgaatccgggtatgtatccgctcattatcattcccaccacggaacaccctgaaagcactgcgtaaataatgaggattcccgaaggaggaatgataagtccggttggagcagacgcaatattggctgccgctgcgaacttgcggtcatatccttctttttcctccaggggaatcatcacgcctcccacggcaatggatgctgccacggatgagccggatatggagccgaacagggtgctgcccaggatattggtgtgggcaaggccgcctggaataaagcccacgaacagcttggcgaaattaatcagcttttgggcaatccctcctgaattcatcagaacaccgcataaaatgaagaagggaaccgcaatcaatgaaaaactgtccacacccgtaatcattttctggctcgccacaaaggtagccaaatccaggtccataacgcaggccgttgtcaggacagacgaaacaataagacttatggatacgggaacactgagggccagcagcaggaaaaacgtcccgattaaaattaaaccaacttgtaccacagacattgtcatgatatgtcgttcctcccattctcattttttgaagcatccgccgggtgtgctgaggggttttgtttttcccgggggcatcccgcagcacattgcacccggtatatcctcaattcctttacatcctcccagataaaaataagggcgtagaagataaagaggaccgcacctaccagcagacagctgtagatatagggcatgggaattcccagggccgcagaagactggtccgcagcggtagcgcatagtctgagaccgcccattatcataaccacgatgcagaatacaatgacaaggcactgcacgcctatgtccacgattttctgcacaggcgcactgacctttttcaaaagtatattgatagacaggtgcttcctctttccgtaagcataggctgctcccaccatggtggtccagaccagaagatagcgaagggcc

SEQ ID NO: 3359 - DNA, 3231 bp, Unknown
  gut microbiota DNA sequence
tattcaaaacataccgggtgatgacctgccagcatacagccacaaccatgatgcccatgatagcagtacacagtacccggatgatactgtcgattatatttctcatttccttatcccctcctattcagcataactcagaaaatctgccagatatctggcgttatccccgctctcagcgcagaacgcatcatgttgggactttaccgcctggataaagggcgtcttatcaatttcataaaattggacaccggcttcctttgccccctgtatattgcgttccacaatttcctgccacttctcttcatgtttccaaaagctttcatccatggccttgagcaacgcatcccggtcctgctctgacatggattcccaggtcttagtggaaatgattacgatatccggggtgtactgatgctgggtgtaggtataggattttgccacttccccatgtccgtcatccaccaataccgtctcattattctccgcaccatcaataattccctgctggagggaggtataaacttccccggatgacatgggcgtggccgcgccccccatattacgtatcatttcaatggaggtagggctgtcctgggtcctgattttaagccccttcaaatctgccggactttccaccggtccctctttggtggtataaatggaacgcgctcccgaatcataccagccaatggcaaaaaatccctggtcatatgtggatttgaaaatatcctgtactgcccggctctcctccatcaccttaaaataatgctccgtggactgaaatacataaggcagtgaaaatatggaataggctgggttaaactgttccagcgaactggcgcttaccttggcaatatccagtacgccggctttcaccatctgaatcatatcactgttgccgcccagctgaccgttgggatatatggaaaacgaataccccgtattcttttccatctcatccttcatataagtcagccccacatggaccggatggttttcgttgtgggaatgggccaccagcaaatgcgttccgctgccccctttactgcagccggtcaacgagaccagcatggatgttgccaaaagacagcatagaattcctctcctctttttcatgttcctctctcctgttatctactgaaattaacatagagcctgctctgatgcgcgtctgggacgcgctctggtacggtaccgtatgaagtgtttacattttccacttctcatgttatagttctattataattgcaaactctttcaatgaaaattgagttatttggtaaaaacattgcaaatcttggaagattgagattaaaaacagaagggctttgtgcggatgtgccaaattaggcaggtacattttatgcaaagcgcccaaggataaatggaataagatattaaacagataggcaggagacttatggttacatcatccaaccgtgaaaaaatgctgaagcattatatgcacaccaatgattttgagctggaccaccacagggatattacttaccctgcagtagaaccccattatcatgaattttatgaactgctgtactttataagcggccatgtggattatattataggagatgagatttatcatctgcaaaacgatgaccttctgatcataccgcccaatgtcatgcataatcccatattcgcagatttccgcgtgccatatgagcggtacgtcctgtggatatcgctgccgaccctgcagcagctggcttccattgatgaggacctgaattactttcttaccgcaaaggggatgaaaaactacctgcttcgacgccataccactgcctggggcaatttccgcaccatcttcacctccttagaagaagcccttggagaacagaagcccctaaggcatgcccaggtcaaggccttcattctgcatctgctggtggaatataaccttgccctcatggaagattccggcacggcccagagcggggtacgtgataatccgctgacagatatcctgcactatatacagaaccatctcacggaggatttgtccatggacaccatttcaggtgccttcatcatggataaatacaatctggcacatatgtttaaggataaaatgggaatctcttactatcagtatgtgcttcagcagcgtcttttgactgggaaaaatctgatactggaaggcatccccgccaataaggcatgttttgcctgcggttttaatgactattccagttttttcagggcgtttaagaaggagtatgaggtgtcgccggcggcgtttcggaggattcatgaggggatgattgggtgatgtgttcttgaatcgtcatttcatagtattttacattcttcttaatttgtcaacagctttttaattttgcgtatacaaattatagcaattggatttcctccaattaataaaataagaccataaataattactgaggctaaaatacaaacaattactctgaataataattgagttatcagcatcctacatgtaaaacaaataaatgcaatcgctatgcagccaaagccaatctctatgctccccttactccctaccatatctacataattttttgctttttttctgcatgcaaataaaacaaatatttctgcgataactgttgtaaaagcagctccctcaatcccagtgaaaggaataatcacgatatttaataaaacattcattatcgctgaaatcaacgttattttaaaaaaatatttttcttctctatttggtataaggattgcttgtgaataaaacccgccaaatactgaaaaaaacaaagctaaacataatattgcaagcgctttatacccactctggtactctttacctccaagtaatagcattatgtctgaacttaggcaaaacactcctataattgttggaaatactacggtatataatacttgccttatttttcttattagcttattataattatcaaattgcatatctcctagataataagatattcttggtaatgtaacagtaattacagcattaagtacagattttataattgtgtatatttttgaagctaacgtatatattccaacttcagaatccgtactcaaaaatcctaatacagttatgtccgacttaacatatatacttatcgtaacggttatacaaaacaaatacaggaccggctttaaatgtttttgcatgcctatattcttagttaatctaattggcaagtatttttttgaataaaaaagattgactaaatatcctcc

SEQ ID NO: 3360 - DNA, 5129 bp, Unknown
  gut microbiota DNA sequence
atacatcgttaagatacaaaaagaggatggatgatcatgcttcgtattgcaatatgtgacgacctgaaatcagaaagggatatggtaaagggtttcctgcgctccttttttgcggccgtaccctacgagtatacattggcagaatacagccgcggcgaaactatggtggatgattacgatgacggttccgttgattttgatcttatttttatggatattttcatggacggcatgctgggaatggaggctgcccgctgtctgcggcggtacgcgccccatgtgtccattgtgttcctgacaactactccggcatatgccctggagagttatgatgtgtatgcctacggataccttgtcaaacccttggacgggaagaagacggcagccctgctcagacgttttttgcaggaggaatacgagggaaaccagaaaacacttctgctcaaaaagggatgcaggggccgcaggattgcctaccgggagattgaatacatagagagccgcaggaatgtgcttctggtatttctggaaaacggagaggagtaccgggtatacgcaaaactggacgatgtggaaaaggagctgaagggacacggattcctgcggtgccaccaaagctttattgtgaatatgaaccgggtgagagtagcggaggaggatttcctgatgatgtccggggcccatattcctatacggcagcggggcagccgcgcaatccgggacgcgtatttcggatatctgctggaacgggctgagctgacccgtatttagtacaggaggaagatttgttatgtctgcagataagagacagttggaacagtattatgccttcctggcaggccatatagatgaggtgcgcaggatgcagcatgacatcctgcaccatctgcgggtgatgagcggatacgcccaggccggggactatgaccgtctgaaggagtacctggatgcccttgttgaacagatgccggacatggacgggttgtattactgcggggaccatgcggccaatattcttttaaaatattacggggaacaggccagaaacggggggatcaggttcaattgcgacgcccagattcctcctgacctgccctgtactcccgtggatttgtgcacggtgctgggcaatgccatgcagaacgccatggaggcatgccaacgccagggccgtggagccggacggtatatctcgctgctggcccgcctggtagggcataacctgattatggaaataagaaacagctatgacggaagggtaaaatgggatggggaccggctggttaccctaaaagaggaacacggacacggactgggactggacagtatccggtatgtggcggagcgctaccacggctactgtgcggtcagccacaccgatgatgaattcacggtcaaggtggtactggccctggaataaaaggaagccacaccgtgttaaaggcagggttgtgcagtccggtgtcaattatcccggaaaaaccgttttttgtcctgcatccctcattccttttaaatgctgtgatatgtttgttccgtggtcagatgatgctgtttcacatttggctgcaaatcatgtttatgaaagaggagtgtgcggccatgtcggaaaagaaaatccggggagcggtgattggcgtgacagatgacggctacccgattgtgacagaggattacagctgtccgtattttaccgggaccagccggagcatgcctgctgtgcgggagtgctggtactgcaggtatgccgacttccgtaaatccacaaagctccatatacgcagcagtatctgccgctgtatggaaaacagagtggataccaggttcggttttatgaaaaatgaagaatgacagggaggaaatgataatgacaatcacaaccacaaaaaataacggctgcctgactctggagctggagggacgtctggacaccacaacagcaccggagctggagactgtgattaaaaacggattagagggtgtggacagactggtgcttgatatggaaggcctggcatacctgtcttccgccggcctgcgggtgattctggcggcccagaagcagatgaacaggcagggaaccatgacggtacgcaatgtgtgcgggacaatcatggaagtatttgaggtcacaggatttacggatatcctgaccattgaatgagagaaaagggagtgaaaaaagggaaatgaaaaacagggaccgctttacaggcagaatattccggcgcatgtggggacccgccatcatttcctccgcaggatgggcgctcagtgatattgcggacgcggttgtggtgggccagagaatgggagccgtgggtctggctgccatcgcgctgattcttccggtttacatgattaactgtatgtttgcccatgggctggggctgggaggttctgtcaggtactccaggcttttgggggagggaaagcccggggaggcagtggacagctttaaccaggtggtgacaggggctctggcatttagtatcctcacaggaatactgggaaatgttttcatgacgccgctgctggctgtcctgggcactgtgccggatgacggaccgctttttgaagccaccagaagctacctggtggtgctggtttcagccacacctcttttttatatgtctaatattctcaattactatctgcgtaatgatgacaatgagaagatagccggtcttggttcggttgcaggcaaccttactgatatcggcttcaatatcctgtttgtgctgatactgggatacggcacagcgggagcagccttgtccaccatgattggccaggcagttgccatcctgtgctatctgccaggtatcctgggaggaaggcatatactaaaattccggcctgtccgtcctgcgccgggggctgcagccagggcctttaaagacggatgttccagttccgtccagtatctgtaccagcttattttcctgctgctgtgcaataacatcctaatccgtgccgggaatgaggcgtctgtagctgtttttgacatgctgcagaatgcctcctatctgattctctatctttacgagggaaccaccagggctatgcagcccatggtgagcacctattgcggagagcaccgcggggagggaatgaggaatgtgcgcagatacgcctttcggtatggatgcagcgcgggaggcctggcagctcttttgattttcctgtttcctcaattcatatgcaccctgttcgggctgcgtgaggcagcggctgccgccatgggggcaggagccctcaggctttactgcgcaggtacggtgtttgccggtatatccattcttttggccggatatttccagtcctgcaatcaggagcgggagagccttatcatttcgtcgctgcggggcgccattgtgctgatacccggcgtattgttcttctcattcctgagaatggacctgttctggtggatgtttccggctgttgaggtactttcactgggattgtggataatacggtttatagcgggccggggcaggacggaggaatttgacggatccagggtttacacctgcacggtcaaccagggaaaccaggatatgaccctggtcacaggggaggccggggcattttgtgaaaaatgggaggccagtcccagacagacgtattacgtgaccatgaccatcgaagaattatgtgttgtaattctgcgggacggaggcggggatgacgtatgcatcgagattacactggtggccgggcagcagggggaatttgtcctccatatccgggacactgcaagatattttgacccctttgccctggagacgggccgtgtcagccaggaaggcggttttgatatggatgccatgggagtgagggttatcaagagtaaggcaaaggagttcttttaccggcgttacggcggttttaattctctggtggtgaaaatataggtcttcgggccggtgaaacatacaaaagacagaataccgggggaataaccgatgaaaaagtttgtgggagtcaatctgtttttcatagtgattttgtcattcacaattcatgctatgacggtgtttgggctggacggggcggttgtgaatggccaatatgggaaaatggtgaccgggatccgtgttccggagacaatttgctctatagcaaaaggagaattacaaaagaaaagagagaaacctgcgggaaacaaaggaggtccacaaaacaggtggggaatacagcttgatgagatagagctggacatgattgcaagaatcaccatgctggaggcaggcgcggaaccggacaggggacagcaggctgtagtggaggtgattctgaaccggatgtattccgaccagtttcctgatacggtttatgaggtgctcagccagaaagacaatgggtgcagtcagttcgtcacatggaagaacaggaatatggacgctgcgaaaccttcggagcgtgtgaaacggaatgtaaaagcagtgttggatggggaaacacagattctgccttttaagaccatgtatttttccctggaaaaggaaaatggacatatacagtgcgtgattggaaaccatgtattctgtaatcagacttaaatgatagggagagccgcgatgcgtatttacaacagaaagaaacgagctattagtttggtaatggccattatggtaatgagcagcagcattcaaataacaggcctggcagagggtgaaaaagaggaaggaaagaaaataattatttccgagttccaggaactgccggaggaactctcctccatgaaggtgcctgaaggaaccagccaggaggaatttgaaaagctgtttcccgatactttgatggtaaagacataccgggatgatgctgaggaacaaaaaccggaacagccaacgtcagccgtaacaccagccgtaccggatggggtccagaaaccgtcagagggggagatgcccgaagagaacctgaatccgtcggagggggagactccgggagagaaccaggggccgtcggaaggtgagaagccgggagtgaatcaggggccgtcggaaggtgagaagccgggagagaatcagaatccgtcggagggggagacaccgggagagaaccaggggccgtcggaaggtgagaagccgggagagaaccaggggccgtcggaaagt

SEQ ID NO: 3361 - DNA, 4772 bp, Unknown
  gut microbiota DNA sequence
ccgggagagaatcaggggccgtcagaaggtgagaagccgggagagaaccaggggccgtcagaaggtgagaagccgggagagaatcaggggccgtcggaagatgagaagccgggagagaatcagaatccgtcggagggagaggctccgggagagaaccaggggccgtcagaaggtgagacaccggaaggagaccagagtccgtcgggaggagaaaagccggaagggaaccagagttcgtcagaaggagcggtgccggaaggcaaccaggatacatcacatggcgcatcagcagacagtggcagctctgatgattccggggcttccatatctacatctaccggcaatgctgatggctatgacagtacagataataatgattttggagattctgttgtgattatgggccggatggtaccatgggcaggtctgccggagaatgcggatacaggtgcggatgttactgagaatgacggtaaaacgggaagtattgaagcatatacagagaccgcagcggaaaaggtaaatgtaaaagacgggaatacagagtccgggaatacagagaacagtaacacagaagaaacggataaccagtggactgagataacggtgaaggcgtgggaaccggatgagggagaatacgcttactcccccgaggatgaagcaggaaccacctattgctacatacccgttataagcagccgttatgatatggatacagagctgccaatgatttttatagaaattacagatgctgtgattatataccctacttctgccatggaatctgtttatgagaaaatccaagcgcttccgtcagtggcggaaatagtggagttggttgagcggataagtgtgcccacggcatcccagattcccgatatccaaggaatagtggagcaggagaaagaagcaaagaaggcatatgatgcgctcagccaggatgagaaggatgaatttgattcggagctgaaccggaagctgatggacctggacacatttttcagcaatatgaaactggtgaatacaatagaggaacaagttattaacatcagggttgatggcggtatggaactgactggaacgggactggaagacgctttgaaggatcagacttctgacaatattcattccctggagattctgggaggtactttttcggaaagtgattggcattatctgcggaatatggtatcactccagacatttattatgagtgattcagtagaaaaagaaaagatagcagatatgccggacgtttcgtctggttccatctttccgaagaccatttgttctgtggaattgggtcaggcagcacgtataggtcaaaatgcatttaacgcatgtggacagttacatgaattaaccgtgccggagagtgtaacctctattgggagcaatgcactggggaccggcagcaggctggtggtttctctgccccggaatacagggattcctgaggggattgcaaatagtatcacaggatccggttctgttattatcagaacggatcaattggaactgggcagagcgttgtatgatgtatgcaagagtgagtatccccgtatcaaagtcacattttcttcagacctgagccatgagctggaacctgtggagacagagaatggtgttctatcattccggctttctgcatcagcagacaattacgatgtacatggaataaaagatggtaagaatgtacaaaccacctacagtaacaacggatattacctgggggtctgcgcaggtaaggaacctacaaaattttcggactgcacgtccattaaaaatttggaacgtgaaccggtttttgttgagctgaaatcaggagagatattggcagcagggatttccgctgattttgtgagcgacggaaaatatctgaaggtgactcataccctggtaaatgtatcagataagactatggaacgggtatgtattggggtaaatgcagatattcagattggaagcaatgacgcagcatctatttacagaaccggaacgggatttaggatggaggatccaggcagtcagcagcagttttcactggcatgtaaaaaggcgccgggggcggatgatatatctaccatgtggtttggatactatagcgacagacagagtaatcaatttaacgataccagtgcagacgatctaatcggaagtgacagcggcctggccttctcatggaaagatatggagctctccccgggcgaacgtattacgcgttctgttcttttctcagttggggaaattgcggacccgcctgtactttcaaaagacccgttcagctttatgatggaggcagaaggaaaaaagagcattaaggtagatgccagggttacggataaagcagggcggactgattccatttactataccattaaaaaggacgggcagccccagcaggaggagaggaatctggccagtgtactggctgacggcagcgagaagaccatcacaggggtgattggggaagccgagttcccggatgacggtacctacattgttaatgtatggattatgaatgacgcgggcgctatcagcgaggctgtaacaagagaaatagtcgttgaaaacggacagattacagcgggtatcgacggtgctgcgccgatagtggatgtaacggttaccctgtcagcgccttctgacctggtctattcaggggaggaaaaggcagcttctgctgtttctgctggggcggacctgacggaagaagattacaccgtaaattatacccggaccacagacagcgggcagtccgtaccggtcggccatgcgcctgtcagcgcaggctcttatactgccgtattcgcgcttacggagagcggtgcgcaaaaatatgagctgacggaggattctgtcactgccatatcttatatcatcaaacctaagccggtttccataacagtatcagggcgcaaagtatatcagtcggatcccattggcgacagcggctttatagttacatggccgggagatgaaggccttacagatgctgtaaaagcgtccatcaggtcagcgcttattgtttccagcgagggcaatgcaaaggaggccccggcgggaagctatgatataagaatcacgcagactcaggtcaatggagatgcggacaattaccaggtaatgccggaagtcataacaggcggctttttagtggaatcagtacgcaatcccgtactcagcctgtcagcgcccaaggatatcaccccaaacagcgccatgctggagggcatcatcttactgggcaatgtaccgttaaaagaggtgacggtgagctataaaaaggccggaacagaagatggataccagattgtaaaccatgagctgagccaggattcggacatggaaacagtctctgtaaaagcagcactggcaggactggatccggagacggattatcaggtgaagatgcagatatcatatgaggaaaacggtgggggaggaataaaaacccatgaacaattagtacgtttcaggactgccgccttaaacggtcccctgggtgaaataagcggtactgtgacggacaacagcggtatggcggatacattgatttatgtaacgctggagcggggcaatacggtccaggccggggcaggtccccttcagtcaccgggacaattcaaatttgagggactgcctgacggattctacaatctggtagctaataacggatactaccgcgttacgcagattgtggagataaaaagcgggaacagtgtggccggtatacagatgagcataggaaagacacaaagcataattgagattgccactgaggatactccggaagttgtggccggcggattaaatgagttgtttcacagtgaattgtatacacaagctgacgcagatgtagtcagggacggcggtactgtggaattcaagctccgggtcgagaataaacccataaatgaagtggcccaggatgcagaacgcattgcccaggagatggctcccggcgggcaggtgggcatgtatctggatttgcaggtgttaaagaccgtaaaaaatgccgccggagtgacggcaggggatcatgagacgcctgtaccggacctgaaaggcaaaaaactcacgattgtgattccgctccctgaggaaataagaaacagggcgccctactttgtatataaggtccatgggggaacagtatctgctgtggacaatacgtatcaggaggaacatcagacactgaccataagagcggatgaattttcaacctacgcaatcgcttatacccaggaaacagaggaaacagcaggagcggtacaggctgaacatgactcaggtactgtcagggaaggaagatggatgcagaatgacactggatggtggtacgcctacagcaacggcacatggccaagcgccggctgggcatatctgtattacaatggccgttacgactggtactatttcgatcctaagggttatatgaaggacggatggattgagattggcggaaaatggtattatctgcacaagctgtatgacggcaggcggggatatatgtacacgggtctgcggcagattgacgggaaaatctatttcttcggcagcgacggtgttatgttctccggcggatggaagaatgtgaacggacactggcggtattttaacgctgacggttccatggcagtgaatgccgtggttggcggctgcaaggtaaatcaggacggtattattataaattaagaaggatatataagaaggatattattaagaaggataaaaaaggaaggttaaagtgaaaatagtatattttgggt

SEQ ID NO: 3362 - DNA, 18540 bp, Unknown
  gut microbiota DNA sequence
gtttttggacgtttttgaatacctgcatctgaaccatgaaattctggcgttatatacataccacatggaggaggactattttaatgagcataatatagtccagcttgcccacatgtcaggcatacctgtctgttatggacagatcacagaagatgagatgttctcctatatggaaaaggagggctgtgaattgttttttgtggcggaatacagccacaaaattcctgtgccggatgacagccggttttacggcgtcaacattcacagctccttgcttcctgaggggcgcagctactatcccgtcgagtgtgccatggagcgcgggctggggagaagcggcgtgaccatgcataagattgcaaagtccctggaccggggggacatcctggcccaaaggaagtatgacatacagccgggtaatgacagcgtggatatttatttaaagagcggacgccaggccctttccatggtaaaagagctgatggaggattttgacagggtatggtcaaatgccaggccccagaaggagaagcttccctactggaaccgtcccaagaaggaggcgctggccctgaatcacagcatgacggtggaggaagcccggggggtgtaccggtgcttcaataagatgacaacggtgtgcatagacggacgttcctgctatgtggatggatttgcggcaggaagcgtgcttctggggcaggatgacagccataatctgtttgtccgtgaaaacagggtgctgtacggcgtggctgacgggcatctgcgtctggacctggtgccggtgtgggaggaataggcgtgatgagaagcagaaaaaaaggaaagctgcagcttaagttccttataggactgattgcaatgaccgtggtcctgatgataaccctgtgtcttgtcatcacacggcagtaccgccgcagcatggaatcatattacaccaagatggcctttgaccaggctaagatagctgcggagtatattgacggagacaccattaaggactatgcgctgacacgaaagacagacagctactacgaccaggtaagccgttatctcctgtatatgaaggagaccataggcatcaagtatttttacgtggtcatcccctgcgaggaccatatgtactatatatgggacgtgggaaagacgggggaggagggagtatgcagactgggggatgtggacgactattatcagggcggcagggaaatcatgcggggcgcttatctgcatccggatggtgaggacaccattctcataacagataatgaggagtacggctatctggcttccgcctatgtggctattcgggattcttcaggccggccagtggccctgtcatgcgtggatatttccatggacatgattaacaggcagatagggagcttcgcagccgcggtggtgctggtcatcctggcagtcctccttgtctttatcgtgggatattttttctttatccgacagtcggtcttaaggcccttaaaccgcctgagtcaggcggcgaggaccattgtcagcgaacagatggatgacctctctaatttccatgtggacgtaaagaccggggatgagatagaggagctgggggaagccttcagccacatggcccatgagctatacagttatattgagaatctgtcagctgtgacagcggaaaaggaacgcatcggggcggaactggacgtggccacccatatccaggccagcatgctgccgggcattttcccggccttcccaaactggtcggaatttgacatctatgcaaccatgcagccggccaaggaggtggggggagacttttacgatttctttctggtggaccagggacatctggcagtggtgatcgcggacgtgtcgggcaaaggtgtgccggctgccctgtttatggtcatcgcaaagacgctgatcaaggaccacacccaggcaggcgccaccccggctgaggtattcggcgaggtaaatgcccagctctgcgagagcaacgaggaagggctgtttgtcaccgcatggatgggggttctggaaattgccaccgggcacatggtctatgtcaatgcgggccataacccgccgctggtgcgtcaggcaggaggcagcttcggatacatgaagctgaggccgggattcgtgctggccggaatggagggaatccggtataagtcaggtgaaattgacctgtctcccggcagtacgctgtacctctatacagacggcgtcaccgaggccgccaacagggagaatgaactctacggtgaagaacggcttttatctgtgcttgccgctcatgaggacgctgcgccggaagaacttcttcctgctgtaaaggcggatatagacgcttttgcaggggacgcgccccagtttgacgatataaccatgcttgcgttaaagctgtcagaaaaaaggggacagccagcagaggagggagcgctatgatggagttgacggtaccggccgcattggaggaactggagcatgtacaggaatttgtggaacaggcgttggaggaacagggggtttccatgaagattcagatgcagatttccattgcagtggaggaaatctatgtcaatattgcccggtatgcataccaccccgaaatcgggcaggccacggtgcggtgtgcggtgggaggaaatcccctgcaggtaaccattcagtttttagacagcggcaagccatttgatcccctggccaagccggatgcagacaccaccctttccgctgaggaacgggacatcggcggactgggaatcctcatggtgaagaagtccatggatgatgttgtttatgaatacagggacggctgtaatatattgacattgatgaaacgtctttgacccattgggcaaaggaagaagggtcatgagagaggaagataaaatatgaagataaatatcaggaaatgtctgcttgcctgcatggcatccatgacgctcatatcgtttactgcctacgggtcggaacagtcagaccaggatcagattctaagggaaatagcggaacgcattgccgcctccggggatatactggacaaaatacaggaaggcgctccgtgggaggatgtgcagaagctggtggaggatttaaagccgatggacgtgggcggtccggggcttgattcagaggaaggagaaagccggggcgcgtccatgaccggggctatggtaggggcaggtggcacggactctgggggaggcagttcttccaatataaatcttgagttggccaggctacagatacagctggccaacagcaccaaagataccatgacgccctatatgaatgagataaaccgcattcaggaggatcagaacagggcaggcagctttttatcccaggcacggcagatacaaaaaagcgcagagagctccagaaaaagcattgccatgccggatacgatgaagttctacatggataccaataagatatcataccccaagtcaaaccagggccttctgtattcgtcggaccagtggaagtctgttatacggggcctggaggattatatagaaaaaaccggcgcacaggttcagtcccttatggtaaagatgcaggagcttatgggagagtataacagttacagccagggagcctcctcatcccttcagggcgggtataagcccctccagggcattaccaggggacagagccttttttcccagcatggaggagctgtgaatacagcgcccattgccaccagtatgataatcggcgtgttcatcggaatggctgttatgtggggaattctcaaaaagaaaggtccgggatccgggaaggaggcccattcgtgaccggcctgaagctggcagccgccctggtgtgcgtactctacgggggatgggagtgtatccgcagaaagcagcccctcttttttaagctccttctctacgccatggccagttatctgctgggaaccctgttcacagccggctatgcattggtctatggccatgaaccggagggatttcatgtgggaatattgggttacatgggaacctatttcttcctgctgtcctcctactatggcgctatcaaccggctggcggacggcggcgaggccagataccggggatacaggctgactgctgcctccggtccccttctggtgctggtgctgcttgcccactcggtgcggaccctgggggccggggcctgcctgacctatgccctcctatgcctgcccattgccccgaccctgtatttttccatcaagcacctgatattaccggatgtggatttgggaatcatccgggtgatgcgcccttacaatgcctgcgtcatcgtattctgcatggtgcaggtccttttacaggcccctgcatgtaccggtttggatatccgggcggccgggtctgtcctgtcgtcggtgcttcttatgacgctgctgccaatggccgaaatgggggtgcgcaaatggtttatataatatttctctgtctgaccatccccatgcttctgatgcttccgctgctggagatcaggtcgcgctgcatagtgggttttatgcttctggggaccgtcacagccctgtccgcctatgaaatcaataccatcgtgtatcccatgacaggactgagcgccagaagcttttccgagctggttccgcccatgacggaggaattgctcaaggcaatgccggtgcttttgtatgcggttttgctggatgaccggagaaacagggtgctcccgattgccatggcggtgggcgtgggctttgccattctggaaaattccatgatcttaattgacaacgtgggatcggtaaccgtactgtgggccacggcaagaggcttctccgccagcctgatgcacggactgtgcaccgtggtggcgggaaccggaatcacatacgttaaaaaacaaaaaaagctgttctacaccggaaccttcgggcttctgtccatttccatcaccatgcatgccctgttcaacctgttgattcagtcagtttatgattatatcggtatggctatgccattggtactctatgggctgatttactggctgtataaggggcagagggtccgtcttccattttaggggggcctggagtacaagacctggtgaatcaggatgcccgggtgcaggtagaatttaccgggagcacggaagcattcctgacgagccaacatccgccctggaccctgccatgatgggtgaggtgctttccgtcatacgcgccctggcaggggaagggatcaccatgctgattgttacccatgagatgaaatttgcccggtatgtttcctcctgcatcttttatatggaccagggagaactatatgaggacggtcctccggaacagattttcggccatccaaaaaaggagcgtaccagggcctttgtcaaagggctcgaagtctttgaacaggagattacatcccggcgttttgacttcatcgaaatcaatacggccattgaggaatttggacgcaggcagattctttcccagaggcatatcaacaatattgcacttatctttgaggaactgtgtgtccagacactgctggggcgtatgggggtgagatacgtttgggctttgcggttgaggtgtctgaggcggatgaatcctgcctggtgacagtgacctatggcggcaatgcatttaacccgtttatgggctgttctgattcactgtccatggtgctgctctccaggatggtgcgccagtacagccatcgtttccagaatggaaacaatcagatgaacctgtatctgtaagagaatgcattacagatatcatatagttcccaccaagacagcctgatattccatgccttttccatttcagaatcacattgcctgaaatgtgccgggatgataaaatggaaacagacagggcgaattggtgggatttaaattgcaaagggggagccggagtgaaaagaaagacatgaaaagaaaaacatggattgcggttctggtcttactatgtttcatcgccgtatcagacgtgaacacaggcatactgtcaggtaaaccgtccttctgtctggcgggacccattgccattgcgagaatcgcaggcaaggaggatttactgaattggtatcaatcagacagtgccaatggaggattcgccgttcttaccgcggacctggtgatagacggtaaggtggagctggggatggaacaggggaacgcaggccggagaagggaattaaacaccagggattttaccatccgtatcgctaataaagggcggttgacagtggacaacccggacctttattttatgggaaacaaggaaattatgaccgtggagagcggaggcagactgtctctgtctcagggcgggacatatgaaagcctgtattccgatcacatcctggtccaagcgggaggaaaatacgagatttcctcccgttttcatctggcgggaggaatcagggatgaaaatagagagccggaaacctcagatccgcccggcgaaagctggggagaggacgtgcctgcggcaaggccgctgctgcccaatcccgacagcactgttcccactgtggcctgcgcggagggagaaccgccgaaaaaggaggagtaccctgcttatgaccttgtgctttatcaggcggacaatgggaaatatgagtgggcagaaataccggtgcagtgggacttgtcctccgtggattttaaccgggcgggtgtgtatagggtatggggaaattattccaaggaggctctgacagaccggaacctgtgcaacccaagcgatctgcgggcatccctggacgtggcggtgcagagcagaacgtcaatgaaaatagaagcggcagacattctgtcagcagacgcggacggctatgcagtgatgcggatacggattgcgggaattcctgataatgcagtgggactgtatctttattacagttttgaccaggtcagctatgagatggcagcatggacagggaaagatggggaatatacgaactacctggaacaaaatgctgcttccggccaggcctatgattatattgtctttaaatacaacataggaaaccggcccatatggtttaaaacccagctaaaggtaagagatggggatgcggtgcgcactgtgacttccgatccggtaaaatgccaggtcagtctggtgccggaagccacaaagccgtcgtctgacagcgacggaagttccgggggcaacagaggcggaggcggacagggaacatccggaaggggcggtgtggtttccgggaatgcctcaggaggatctggagccggcggggtagatagcgccggcggaggagagatggcaggagaccaggctggtatgggagagggcagtccgggaggagccggggtgtggggaggcggttttggcattcctgccacagggcagccggacagcatccggccggatactgacaggtcggatacggcccgggtaacgcaaggggatgtgtctgcatcagaccatcctgaggatggactttttggggaacgaaacagactgggcagagacgcatatggaaggcgggggatgcctggagatgaaaacggagacaatacggaagaggccggtgatgcgctccaggctaatgccggaaaggttgaaacaggaccagggggagacggacaggaagggggagaaggggacggttcttctgcttccggcggccggcatggacgcgtaaagcggttcgtgtatgtttttgcaggctctgccggaattcttctgagcgctaatctgggagtggggctgctgaaagggcgcagaggagagagtggggtgaagcgtttagtgaggaaatggaggcggaaagggtagctggccgctgtgtccgggtactccgcggcatagagtgtccaaaattctacaccggaaggcccgtgttccaaggattccataaaatgggacagttggcataattacggactgcatggacacgccctgcaccccagcgccttccctgtgggcgtggccgcacatccgcccagcgctgtttcgcgcaggtcaggggacagctgtcttcccacacggtacatggccgcgagcatttcatcaaaaggaatcagctggcggatgccgctcagggccagctccgcagcggtcagcgcaacagcggcgcctgcggcgttcctgccctggcaggggcattccaccagacctcccagggggtcgcacaccaggcccagcaggttcatgagaaccgacgaggcggcattgagacactgttttgcagttcctcccatgagctccacggcagccgaggcggccatagccgaggcaacccccacctctgcctggcagccgcccaccgcgcctgccacggtggcgtttctcatggccaggtaaccgatggcgccggcattaaacagagcatctattaccctgctgtcaggaatgctgtattcttcctggagtgccagaagcaggccggggacaatgccggaggatccggccgtgggagccgccacaatgagccccatggatgtatttgtctccaggacggccatggaataggtgattgccctggagagaacgctgccgcagatggcggctcctctggcccggtgcaggtctgccagcctggcttctccgccaataagcccccctatggatttttttggttcctggataggagaagaggctgattcacgcatgatggaaagggcatggtccatctttgcatatatatcttccaggctggtctcagccaaggtgcattccctctgtttcatgatatctgagataggacagttcagcttttggcagaagtccagaagctcttttgcattcttaaaatccattttcgttttctcccttcaccggtataaacataacatcctgtacatccgggttttcgtaaatccgtgataccatatggtccggcaggcttccgtcaaattcaatgatgctgtaagccctgtctccttttgtttcccggaacagcttcataaaggcaatgtttacatatccctcgctgagacagcgggtgatatgggccaggacacccaggcggtcgcggtgtatgatgatgagtgtgctgtactcgccggaaaagtccacgtctatatggtcaatgcggctgatccgtaccttcccgcctcccagggattcgccccgcaccgagtaagtgcgcccgtttaagcaggttatgcggatatccactgtgttggggtgggtgtccgaatcagtgtcatcggtgatgaaacggtaggagagtccccgttcttctgccacggaacatgcaaggggtatccttctgtcgtctgtggaaaagcccatgattcctcccaggagcgccaggtctgttccatggcccttatgggtctttgcaaaggactggtagagggtaaattccacatgtgtaatgggactgtccgccattttcccggccagcagggcaatggagcatgcgccggctgtgtgggaactggagggccctatcatttccgggcccaacacgtcaaatatactgataaatgccatatgtaatctcatccttttctttttttgcagatggtactgcagaggcttatccttgattgaacccaggtaattgacatctgcgtaagtgcattgtatcataaaggataaataaatcaaattcatgaattttatatatataataaattaaattcatagattgtcaggaggtagttaaatggagttaagacagctgcagacctttgtgactatcacccagaccgaaagcttttccagggcagcagaggttttaggctatacccagtcagccctgaccgtgcagatacgccttttggaaaatgagctgggagtaaaactgtttgaccgtatggggaaacgggtttacctgacagcgcccggcaggcagtttctgggccatgccaaccaaattatccgggatataaaatgtgccagggaatttgcaaaaagcgaggaggagctgtgcagcccccttcatgtgggaacactggaatccctgtgtttttcaaagcttccccagatactgaattcctttcgcagcagccatcccagggttccggtcaaggtgactgcctccacgcccaaccagctgattgatatgatggagaggaaccagctggatttgatatacattctggaccggccaaggtataatgataattggaataaggtcatggaagtccgggaacccattgtgttcgtggcttctccctcctgcggccttggggggaacagggtaatcagcctggaggaaatcatggacgagccgttcttcctgacggaaaagaatgaaaattacaggcgggagctggattgtttcctggaatcacagggaatggtcctcactccctttttggaaatcagcaatacggaattcatcataaggatgataaggaagaaccggggcatatcatatcttcccctgtttgcggtgcaggaatatgtaaaacgtggggagctggctgtgcttgatgtggctgacatcaggctggccatgtatcagcaggttatttataacaggaataagtggctgacaaaagagatggatgcgtttatccgtattacagccaaccactcaggaaccgggtcaatatgcggcggtaacgatatataaagcggcagaagcagctggatacaggaaggtccggcagtgcagggagctttttagggggaaatatgggaagggtgcagatgagtacagaagagaaaaccggccgcagagccagggatagaaaaaagaaaaattggcgggaagaaagctttgaaaccacaaaatcccacagcagaccagccgtgagcaggatgtcagccagcatccttcttttggctggtctgttgtttatggtgacaggatgcagccccgcagcgccccctgggtccgtcagccgtcaggacccagaggtgaaaatacgggtggtctgctcatcaggggacattagatggaagagcggaatggagaatgcggcagaagctttcatgaaatctaatcaggacattaaggtggagctgtatttcatgccggaagcagaaaaccagacatacgccaggcggctggaagtgctggctgcccagggagagtttaacgatatcgtggagctgagggagacggactcccttgtacaggcagggcttctggcccccatgccggaggaagtgtattcgctggtggagaatcccggtacctgcggcggcatatgctatggtgttcccctttacaccaccaccctggggatgatttataatgcggagatatttgaacggctgggactttgcgcacctcgcacatatgaggaatttcttcgggtgtgcgccacccttaaggcatcaggatatgatgccattgccctgggagctgccggcgaccggcatatgaaatattgggggaattacctgttctgcaactacattgcgtcaggggacggacaggcctgctggaccaaagaaaaggcagcggagatgctgggggatttccgtgatctggccagccggggatatatcaattcccggtacagggcagtgacagaccgtgagacagccagggccatatccacccggcaggcggtcatggtgtatgcagggcctcagatgctgcagcagatagagaacctgaatcctcagatccgcctgggcttcttctttcttcccggaaagaacgggactgtctatgcaatggacgacagaagtgtgcagtgggggatttcgtcgctgactgccggggatggaaaaaagatggatgcgtgtgcccggttccttcagttctgctattccgaaggcgtatatgaaaccatattggaaatcatgaacgggaactctgtgacagtccgccgggtgaacatgccggacacgccggacaggaaaatcatggaggctgcttatgagggaagtcctgtgcatacggagtttctgcttaaggatgcccagccgccggatggttttattgaatgctatgaccggatgctggttgagacgctgtggggcggaacatcaatttcatccctggcagataatatgttggaacgctgggaggagccgtgatgcagagaaaagtaaacagattgattcgtctggccacatcctttgtgattctgggcctggtgcctcttctggctgccggcacggcgttaacgggacatttcagaagcaatatggaacgtgtggtgctggatgacatagggcgcatggtgagctatgggggcagcaatacagaggcggtgttggaggaatgcagcagcctgacaaagcatatctatgacgtttccacggatgatggaatgttcctgtaccagattttaaaatcccccggtcttggccgggaggaaaggaaaatggaaattacccttcttctgagtgattttctggacagggacagcaggctgcacagcgtttattttaaggaccggaaagggcagatttattatgctaccaggaacgcgtataaggtactggatgaggacgcgttccggtattggaccgggaaagaggatgagaaaggggatttttcggtcctgcccgcccatatggatgattattttcaggattgcgggagtcaggtcattaccttccggcgcagttatcaggatatcacctccttaaagaccataggaagctgtctgggccatttttatatggacatggatgtaagcaggctgcagtccgcgctttccgatatagatttgggattcggcgcatccttttatattatggatgatagcggagcatgcatttaccgtgttgataccgacgggagcgggaatacagcggacagtatggcgtcccttctcccgtccatgaatcaggagacgggcagccttcttggggacggaacctatgtggtgtataaacgtctggaaccttatggctggaccgtggccgtacaggcagcacaggaccgggtcctggttatggagagtaccatccggtatacagcagtgtttttaggcgcggttttcctggcgtttttttgcctgtactcctatttcccggagcggattcacagaccataggagtctttggagagcgggatggctgagatccagaagggcagccgggaatcccggttccatttccacaactttatttctttgcattagccccgggatgctgtataatggaaaaaacaataaaccaacaataaacaaacagcaggtcaagagaatagggcggaaaaacagcatggaaatcagaatattggaattgattgaaggagcaaagaaagcagagggattaaccgttatcatagatgtgttccgggctttttccctggagtgctatctgtatgcccggggggcgtctgccgtattcccggccggaagcgtggaggaggccaggcatatgaaacaggtacatccggaatatcttctcattggagagcgctggggccgcaggtgtgtgggctttgactatggaaattcaccgtcccagacccgggacgcggacttgtcagggaaaaaaatcgtacatactacaagcgcgggaacacagggaatcgtgaatgccgtacacgcagaggagatactgaccggaagcctggtgaatgccagggcagttgccgattatatcagcagaagacagccggagacagtatccctggtagccatgggaaacggaggagaaaggactgcaagggaggatgtgatttgcgcccggtatatcaaatgtcttctggagggcagaccctgccttatagacgaggaaatacggtccctgaagacagccggcggcgaacatttctttaatccccatacccaggaaatctatcctcaggaggatttctggctctgcacaaagcatgatatcttcccctttgtccttcgggtggaaaagcgggatgacggtagtctggaaagtgtgaagattgatttaggggaaggatgggacgcggtgagctgagtctgtcaggaatgggaggatttgtatgaaaaagagagagggaggaatactggcatgggcggcagcggtattcctgttagtagggatggcagccggctgttcacgcagtgaggaagccaggtatcagctgaatcccaaacagccggttatgattacggtatggaattattataacgggcagacaaaacaggcctttgacaatctggtgtccagattcaatgaaacactgggcacggaaatgggaattattgtggacagtgtcagctatggagatgtaaaccagctggcggaggaggcttacaattcagccagcggaaggctgggagctgacgccatgcccaatctgtttgcagcgtatccggaaaatgcctaccgcattgatgtgttgggcaagcttgtggacctgaatcaatatttttccgaggatgagctgaaggtataccgggcggattttcttcaggactgcagcttcggcgggaattatgggcttaaaattcttcctgttgtgcgctctacggaaaatctgtttctgaataagacggactgggacaggtttgcaggggacacaggggtccggctggaccgtctttctacctgggagggggtggctgagacagccaaggcctattacgagtggtcggggggcaaggcatttctgggcattgacagcctggccaactacatcattgttgcgtccgtgcagacaggaaatgatatttataagctgcaggacggccaggtgacgttttcctttgaccaggacctggccaggattttgtgggatgaactgtatgtgccctacgtaaagggctattatgcaaatctgggcaagttccgttctgatgatgaaaagacaggggatatactggcttatgtaggctccagcgcaggggcggtttattttccaaaggaagtgaccctgaatcagaatgaaatctaccggattgagagcagtgttcttccatatccctgtttccgcgacggggacttgtgcgccatggtccagggggccggattcgctattgcacaaagcgacagtacccatgagtatgcatcggccgtatttctgaaatggctgacccaggaggagcagaatctggattttgcggtgaacagcggttatctgccggtggagaacagttccctgaaccagggatatgccaaggctatggcagcctattccggtacgccggaatataatcccacgataggagggtccgcagaggctactctgaaaatgctctctgaataccgcttttattccaatcctccctttgagggaagctatgagatgagacagttttacggcgaatatatggaggcttctgtggacaatgcccgtctggaggctgaggataagatgaaggccggcatgacaaaggaagaggcccaggcccaggtcacggatgaggcccatttccaggaatggtatgaagggtggcaggataatgccgctaaattattagggagctgatgaggaatatgaaacaaaagcagtccatagcatcaaaatgctctgcctttactgcgggtctggtgattcttcagtctctgctggttctggggatgctgatagcgggcggaatattgaagcagaccagggatacggcgtaccagtcatttgcgtccactgtgaccctcagggccagctccattcaggaccagattgacaaccggtggaccaatattcatccctatgtacaggaattgtccgaccgattgtctgagagcggctatggggagggaaaaatggatgcggagtcatttctgattggctctgcggatacccttatatccatgctgcatgtcagcggtaccacgggcacatttctgatactggatgaaccggggcagggaaaaagcatgccggctctgtatttcagggactatgacccggagacatacagcgcggacaacagtgatttgttccaggtaatgggacctgcagagatatccaggagataccagattcctctggacagcgtttggcattacggcctgtcattgaatgaagaaaacaggaagttttttgatatgccgtttcaggcggccggccagtccagggattatgaaaagctgggatactggagccggcctttctacatgacacctgaggatgtgcctgtcatcacctacaccgttccgctctttgaccgcgttggccaggtccacggtgtgattggggtggagatatccctggagcatataagaaagctgctgcctgccaacgagttgtctgcccaggattcaccggggtacatggttgccgcaatgcaggagaacccgcaggagctgtttgttctggtcaagaagggcgagtaccagaacaggctttttggggatgaaccgctgctcaggataaagcaggaggacgaaacgtactctatctgtcaggtatccagccttacaggagaaaagatatacggctgtattaagagcctggatttatacggcacaaagaatgttccatatgacagcgggaactgggtggttctgggattaatgagaggggatgcactgtatggttttcttcaccggatcataaagatttttgcagtgacattgatggtatcccttttgctgggtgccggggccgccgggttcatcagcaggaaaatcacggaacctgtggcaaagctggccgccaaagtaaggaattttgattataccagaaaaatcaggctggagaggaccgggatagaggaattggatttgttgtctcaggcagtggagatatccaatcagaatctgctggacaacacacttaaaatgtctgaaatcatggaccttctgggccttcatatcggtgcctttgagtacagtcccggcggatatggagtacaggtcacaaaacagatctttccccttatggaacttccatgtgaggacgagaatcatttgtatgtggatgagaaggtatttctgtccaggctgtcggatatgcaaagatgtccggtgccggaggaaaacggaatctacagaatcagcggaaaaacagagcgctgggtacggattaccctgtctctgcgccacggccattccctgggaatcattgaggatgtgaccgttgatatgatgaaaaaacagagaattaaatatgagagggaccatgacagcctgaccaggatttacagccgggcagctttccagcgggaggcagaggccatactggaacaggcgggagaaatgccgggacagacaggagaaatgccgggcctgagcggaaacggccctgtcaatttgggaaccgccgcaatggttatgctggatttagatggccttaagtcagtaaatgatacctacggccatgaaagcggcgatatctatatcagagagaccgcagtatgcatgaaagggataccggaggaccatgccatagttggcaggcgttccggggacgagtttttcattctgttgtttggctatgaggacaggaatggcgtcaggaaacaattgagggatttctatgatattctggataaacacccagccgttctgcctgacggaatacagctgaaaatccagatttcgtcaggcattgcctggtatggaggtgaactctgtacatttgaggaactggtaagatgtgcggacattgccctgtacgaggcaaagtccaccatgaagggacagaccgtggagtacagtaaaggatgaggcttctgcggtttttcagggggaacatgcagggtcctgctgaaaaacatgcagggttgtcatgcccggaattcaccggcagccacctcctcatccaatagccggatgaattcttttagtatggtatttccctttactcctttatgatacaagccaaaagcaaggggaggtattcccgttaccgggatataacagagcccttttttatcactgcccggatagaaggggagaaggctgtatccaaggcctgcccttaccagagccagtatgctttcataggtatccacaaagaaaagctccgaaggatggcaggaggaggaagcacggatttgagactggagtacggtggctggcagcctgtggggctcacccaggactatgggcccctccagctcatccacattcaggcaggtgcgcccggcgtagggatgtccggcactgcacacgcaggccagcggtatccgggccagctcatggaataagccgatgggtttcttctgctcatcctgctggaagccgaacatgacgtggatgcgctcttcatccagaagattggccatggacttaaacggaatcagtttcacagtggggtggagggtggggaaacgatccgccagcctgcgtatgacagggggaagaagatctaactctgactggttatggcaccccacggtgagaaacagaacgtcattgcttcctatgcccagccgttttttagcgccgcaggcaatcttcaggatgctggatgcatcctccatgaacatgagcccggcttcagtcaggtttacatttttactggtacgcacaaagagcctggtccccagctcgtcctccagggatgtaatctgatggcttacagccggctgggtaatttttaaaaaatcagctgccttggaaaaattcagatattccgccacggccagaaaacattctaactgcactgtattcataggaatcgcctcctgaatttcctttgaatttctgttgctgtttcttttcaatctttgttaatcttcttttgttcgattgactctaaaaacaatactaatagtaaacaataaaatatttttatagat

SEQ ID NO: 3363 - DNA, 2912 bp, Unknown
  gut microbiota DNA sequence
gctcccaggagcgcgcccaaaagcaccattccgaaaatgccgaaatcatagtaggcgtcatagaacagggtaagggtggtcagctccttctttgtcacaaagagaggaaaacttaccaggaccgggaacaggaatttaagccccgtaagagcccacaccggaaacagcatgcgaagcccaaggctgtgggattccagctgctccaccagacagttaaaattatcgtagttattggcaatatacatatagggctgtgtgatgaatattggcatatggctgttcttcatctcaaaaatgccgttcaggtattccacgctgtggctgcgcataaccgttaagagcagataggccggaatcatacaggccatcagcacgcccacatagaccaggctgaaggtgccgctcatggaaatataggtaaatgcggccatgcccacggccagaatcagctggaacctggacacgcaaagcaccggcacggccagggacagcaccaccatgagcagtcccagccagaatccctgatctctggtcagccctcttcccctgcgggatatcataaggctgtacaccacgaacagactgggcaccagcacgcaggaaaccgtaaaataatggacaccgctgacatggaaataggaataggcatggggcacaccgtatgagaacagcggcacaaagcccagcttccacgcctcaaagaaaaaagcgaggaaggatatgaccaccagcgccgccatggaatgaagcagccgctttgcctgcagcggagattcagccgaggcgtaaaaacggtatacggactgcatgtccgccgcgctccatccatcatatatcctgtgcagcacctcaaacacaatccagaaggtgagcaccgccagtcccaggcagacccatgtccggaggtcccaatccgtctgaaggcggctgagcttaaagcaggatattccctgcccgcccacaaaaaagaggcagaaaagcccccgcaggtgaatcaggttgcccgtctccctgtaatcctttatatacagccacaaggctgctgtaattaaaaccagcccagacagcatataaaaatgctgccgggccaatatgaagcttatgatataacaaaccagataaactgccattaatctgtaaccttctccacaaaatctctcatgtattgttctgtttctgctgctgtggcaaagctcatggccttgtcagccactgcctgaagctcctccacactgtactgggtaaccatcttcctggctttcagaatggcggatgcgctcatgctgaattcattgagtccaaatgccagaagcagcggaatcatcatggggtcgcttgcagcctcgccgcacatgcctaccataatgcccgcctcacggccgcaggcaatgatatgcttaatacttctgagcacagccggattaaaggtggaataaagataggatacctttttattgcccctgtcaacagacatggtatactgggtcaaatcattggttccgatgctgaagaagtccgcttcctttgcaaagatatctgcaatcagggaagctgctgctgtctccaccataatgcccacctggatgtccttgttgtatgcaatgcccttttcatccagttccttcttgatttcctccaccagtgcctttgcctgacggtactcttcaatgcatgttactaacggaaccataatacggatgttgccgaatgcgcttgcccttaaaagcgccctcagctgcggcttatacacatcctccctgcggtccagacagaaacggattgcccggtagcccagaaatggattctcgtccttctccaggcccatgtacggaatctccttgtcgcctccgatatccagggtacggatgataaccggctttccgttcattgcggctgccaccttcttatatgcctcgaactgctcttcctctgtaggcatggcatttctgtccataaacaaaaactcggtgcggaacaatccgatgccctctccgtcatactggagcaccttgtccacgtcctcgggctttccaatgttagccacgatttccacctgcacgccgtcctttgtgacagaaggcttgccgatatacttctccagctccttcttttccaccaggaactgttttctcttctcctcgtaatcagccgtcacagcctggtccgggttcacatacacttcgccggtgctgccgtccagcaccacctggtccccgtccttgacgccgtccataaagcctgtgacagccaccacagccggaatctccagagccctagccaggattgcgctgtgggaggtcttgccgcccagctccgtgacaataccggttacattggcgggattgattcccgctgtcatggacggggtcagatcctttgccactatgatgctgccttcaggcagggaggagatgtccacagactggattcccataagcatctgctgcatacgggtcttgatgtcgcgcatgtccgtggctctctgctgcatcagctcgtctcccatggaggcaaacatatccgcatacatgttgcacacattctcaatggcatattcactgtttacgccgtcattcctgacagagttctcaatctctcctgtcagcatggggtcagccagaagcatcatatgtccctgcatgatttccgcttccttctctcccaccctggttgccaggtcctctgccagtttctctgtggccttgatggtctcgtccagcgctcccttaaaacgctgcacctcctcttccacatcatttaccgcctgcctggtaatcaccagctggacttcttccacaatcactgcttttccaattccaattcctgcagaagcgcttgttcccttgtacatcctcttgtacctccttattaaaaattcatttatactcacaacctttggttgccgtcaatct

SEQ ID NO: 3364 - DNA, 6276 bp, Unknown
  gut microbiota DNA sequence
ggcctccacgataccaaccatggcttccagtgcttcctcctcatctggcccctcacagacgaattcaatctcgtctccagatttcacgcaagccccaaggacgcttaatacactcttggcattggccgtggtggtgcgcaccttgaaggatatttttgatttataacgcagcgcctccttgcagaggactcccgccggacgcaggtgcagaccggatggattcttgattacagttgttttgcttaccattatgcctctctccttgctttttgttactgaccgggctctgccttggacgtactggcaggaccttctgatgtctcactttctgtcccttcctggctctcatctgtactggccgcagtactgtcagctgacggccctttttctgtcacagtcacctggatacggtcgtagctcaccagttcataggcatcgcccagctggaacgtaatctccccgctgttctctcccggaaccatatcctccacatccatctcagcgcccagagcggcagccgaaagctggtccagatcttccttcaggcctcttatgaccacattcacagaatccctgtcatactggtattcataatcgctgtggtatcccacccgcttaatctggcttgttttaagctcaaatgtcctgctctccaaagcctccaccttgatgacaaccttcacctctttggatgactcgtccgaaaggtacactccctccggcagatactggctgatatccagggtaacttccttatcccctgtggctccgtccatattcagctcagagcttgggatggtaatggaattaatattggccaaatcggatttcagaccattgacagccacagaaggacggctgctctctatccccgtataccggtatccgtccgccaccctgccctccggctcaaagttcaacaccaggctcttgcgcttgagaatcggcatggtataatccacactggagcggctgaatgtgatgcgctcgtcagtgggtatctcattttcattggcgtcaaagcacaccacaggagcgctgtctgacaggttggagtcagcgccgtccacattgatcacaattcccaccgcgctgatctgccccaccacggacatgggaccgctgacatttatataattcggtgaaacagaaggtgttcccttatcgtatccttcggcagcttcccctatgaccttggccctaatctcaaaggacttgcgctgcagatcctctgtcttgacgcggataactcccggctttgccaccggagtgtccaaaagacgtctgttgttcttaacctctatcttcaccggcactgcgcccgtgggttcatatatatcggccaaatctatataggccctgaaatccgaggcgctgatgcctgccttatccagtgtccttacacggtagctgacggtaacagtatccttatccgtcagcagctcatatgtcttgccgttggatgtcaggattccttcgttgacaatatctaacggcacctcctttgaatctgagtcctccgggttattgatattcaccactgccagccaaacaaaaaatgccaggaagacagaaagtactttaagcccaatattgttagacagctttttttccattcttcagccttcccttccatattttcaatcggttcaatgaaacagtctcctctttcacattggaaagtacctttttgaggctttctgcatctggtatcctggacagcactcctccttctgctaccgatacccttccggtttcctccgacaccacgatggtaatactgtccgtggattcacttacacccacagccgccctgtggcgcgtgcccaggtccttgctgatgctcatgttatcagtcagcggcagataacaggtggccgctgtaatgcggttgcccctgataaccactgccccgtcgtgaagaggtgtgttgtgttcaaaaatattaatcagcagctggctggtgaccaggccgttgatttcaattcccgtcctctctatctccttaagggaagaaccgcgctcaatcaccatcagggcgcctgtctttaccttggccatctcaaaggtggcccgtaccagctcgttgatggtcttgtcgttaaagccctggttatccttgccctcgtcaaaagaaaagagataggacatgtaattgcggcttcccagctgctccagagccttgcgaagctcaggctggaatataaccagaagggccgtcaccgcaatggtagtggtattctccagaatccacaatatggtagtcagatgaagcacggcggcaaacagcacaaacaccaggataaccagaagtccttttaacaggttccaggccctggtgttcttaatccacaccagaagttcatagaccagaaaggaaataatcacgatttccagaatattccccactgatatccttggcagcagcgacagccaggatgtcacttttaccagtatttccgccatactctcacctccttacgttcactttttttcattaataagaatttctctcccttgtgccgcgtttatgggtactgattttctgtaccttcacatccggggtgctcacggtcatcttgggcaccgccttcacataataataataatcatcgtcctcgaactgcacatattcggtccgggtataatccacagacaggacaaaaaaattgaacacagccgctatggctgccgataaaacaagtcccagaatcatctgacccacgggaacagataccccaaacacgaaatctcccacaaatatggccagaagctccgccacggcacctgccacaatggcaaccacccatgcgtaatccatagacagcctgcgtatgagatacaccacaatgattcccaccgcgcaggtggcaatcataaccatcatggtctggttaaagagcacggatttaagaatctggctgtatttctgtacaatatccacggagccgtcgctggcagccaggatgcccgcattctgcttcacatatatgagcaggtaatacaggaacacgccgcatccgacgggaatcacagatgccaggcttccacccagtccaaccagcaaaggaaccacatagggaatcttaaacaggaaggcaaggggtgtcagaaccatcagataactgtccccgggcttgaatccgtagtaaagaatggcaatggtcagtatgagcacaatggcaatcagggccatctccagtgaaaccgcatatacatgggcaatcatcaggcagcccgccaggaacacgatggcgccgtaaggcaggaatgcgctgaccagacagaccggaagaataaccaaaggacttttaagctttgccatatatccgatattcgtgttaaggcttaccatggtgcagagcgcaaacaggaagcgcactaccggctgtattccgtaactgtagcggttgtaaaatcgtttcagatgttctttccatagcagaagacttgtcatcgaacccttcctcctctgttgtccttggtcctgtcggtcctgtctttgttgtcgtacttcttgaccaggtgtctcagtctggaggcatacatggtctgggaacgggacgcgtagtcgtaccttttggaatatactatccaggtcacaaacaggtaaaacgccagtccccccacataaaggatgccccagttcctgccgcactcaagcagttcttctatgctcatgccgcccaacagcacgtccagtttgtagaggatccacagaagcagcatcagcaggtagcagaaggtataaccgaaaaaggagcggaacatctgtccgccgacataatcctttttaaaataacggttaatgggaaatatcttcctgccctcattcttttcaaatatggccagcccagtcatatatctgaccttttcttcgttcagcatacaggtacctcttaggctttttcataacatatcaatttagtataccacaactttttcagatttgcgacactataaatcaatttttatgattttgtaaggaactggaatttgccttaagaaaccgccctattttcccaccagcaccaccacggttctgggacgaatcctgaatccgtctgcccccaggggacccggacaaggcgtatcctcccaggtgtctgctgccagctcccatttcattccgtccggtagtacaggcagctccacatcaagctcctcccaatatgcattggacgcaatgtacacggtctgagggtcttttccctcctcccggccggcaaacataactcccacatagcgctcgtactccgcaaaggaactgcaccagggctttactccgtgaaagctcacatccgggaagccgcaggccccgccgctcacattggcgcgcaccaggcggtgggtcttacggaaccgtatcatatattggaagaaactaaatatatccctatacttccccagtcgtccccagtccagccatgaaatttcattgtcctggcaataggcattattattgccgaactgggtgttgcagaactcatctcccgccagaaacatagggattcccctgctgcacatgaggagggcgcaggcgtttcgcaccatgcgccgcctcagggcttccacctgaggatcgtctgtttccccctctgtgccgcagttccagctgttgttgtcattggcgccgtccgtattgttccacccgtttgattcattgtgctttacattgtaggaaaacagatcgtaaagggtaaaaccgtcatggcaggtaatgaaattcacggatgcgttcttcctgtcatggtccgcatatatatccctggatccggcgattcgcagggcagccgcctgcgccatgccctggtcccccttgatatggcggcgcatatcgtccctgtacctgccgttccactctgcccagcggttccaggacgggaaggtccccacctgataaagaccgtccgcatcccacgcctcggctatgagcttgacatcccccagaatggggtcaaaggcaaggctctgaagcaggggcggcttgctcatgggcgtgccgtcctcgttgcgccccatgatggaggccagatcaaagcggaacccgtcaatccggtacgccgtagcccaatagcgcaggcagttgagaatcatctgctggacaatgggatgattgcagtttaatgtattgccgcagccgctgaaattgtagtagtatccctcaggagtcagcagataatatatattattgtcaaatcctttaaatgaaaagaagggtccgttttcattcccttccgccgtatggttgaataccacatccagatagacctctatcccgtgctggttgaacacctgtatcaggtttttaagttcattgccctcccggttgtactctgtaccggccgcgtagctggtattgggcgaaaaaaagcttacggtgttgtatccccagtaattataaagcttacggccgtccacctcccggtaatcctgcatctcgtcgaattcaaatatgggcatcagctccaccacgttcacacccagctccagcagatagggaagcttttccaccaatccctcaaaggttcccggatgaagtacggctgaggatccatgcatggtaaatccccttacatgaagttcataaatgattaaatcctccatgggggtcaggggctgggccatatccgcccagtcaaagtcatccctgaccaccctggccttatagtgctggcatcccggcagcggttccccccaccggctctgtccggtaaccgccttggcataggggtccagcagatacctggtcttatcaaatataagccctttttccggttcatatggaccgtccacccggtacgcatactcaaattcaccgatatccagccggaacacaatcatggagtacacattgccgatgcggtaatgctttggaaagggcaggaccgcataaggctcctcctctgtccgccgaaacagcaaaagctcaatatctgtggctccatgagaatacactgtaaaattgactcccccgggtatggcggtggctccgttgatctcatagaaccccggcctgaccgcgtatcctcccacgtaatccatgggtaccaggtgaatggtgccgggcagggccagatggtcgatacagtttgtttttttgtcccatgttatgccgtctgcggggccggcagctttctttcccttatcctccatacattcctcctatatgcgcccttgtcaggctgtttcaggttcaggcactgtattaacaatatacaacatcccagggtatattacaagacttggaaaaagccgccggacccaaactggtcc

SEQ ID NO: 3365 - DNA, 26275 bp, Unknown
  gut microbiota DNA sequence
tcttccttctgtctgtttacacgctgacagctcatcttattctatttctaatatctttcccactttatcttttccatgggcagctcatccaattgatgggcaggcgcctctgcatccggcattccaagggtaaggatggcttccagcttataattttccggaaatcccaggcgttcccttacatattcctccgtggttatctcatccgcgttcctgagcctgccctggacccagcagctgccgatccccaggctggatgccatcagatgcatgtttgccatggcaacggaacagtcctcaatccacacgtcctgctccttttcgtcgccaataacaacgatagcgcactgtgcttccttcagcattttcacgcctcccgccctgcatccggagagatcatccaaggtctttctctggcgcaccacgataaactcccacgggcgttttgcctttcccgacgccgacaaaaggcctgcctgaagcactttcgtaagactttcctccggaatctcctcaccgctgtagttcctgatgctgcgccttcttctcataatctctaataaatccatggtcttcttcctttctgctgctgcatccatatgatgccggcttacagtttcagatacgcttccagcacatccttcatatcgcaggtcataccgtaatctgcgatattaaagatcggcgcgctttcatcctggttgattgccacaaagagcttggtatccttaatgccctccgtgtgctggatggcgccggatacacccagggaaatgcatacctttggccgtatcgtaaacccggtctgtccaatctgatgctcaaacggtataaatccggtgtctgccagaggcctggtgcctccgattgctgcttccagcttttcagcaaacgcttttaagagtgtaaagttttcctcgctctcagcgccgcgtccgcccactaccaccacctctgccgcaaggatactgtccgtatcattcattgcaggggcgcttgacatcacctgaatccctgattcaggaagggtgatatctttgtaatatgtgacatctgcccttctgccctcctgggcctcacagggggtgtacacacccggccttaccgtcatcatctggggataaaccccttcctttgtcacgatggtgacaaatacgttttccccaaaagaaggtttgttctgcttgatgaaaaaggtcccgtcctccctggtatccacggctaattccgtacagtccgcagtcattccgcagccaaggcgggcagccactctggaaaaaacggagcggcccgtgggggtagccggaatcagaacactggacgggtctatgcgcttcagcatttccgccatagcctggcttaccgcatcgtcctggaacaggcagttcctgtctgtctcaacggcatatatctcgtcaaacccaagctgttccagctgggacaccaaagccttgcagtcctcagccaggacagcggcctgtatcttttctccggtggtctctttgatacaatgagctgcgcggaccagttctgccacaacgggttctaagttcccattataattctctgcaaaaacacaaattccgttcgccatctattcctttcctttctcaatctcaatcagttccttgagcttggctgccagttcctccggagtaccggaaagcatctgggctctcctggtactctcaggctgaaatgaatccgtcaccattgtgggagatcccggaagtccaatctcatccgccgccatcttaaggtctgcattggtatatacctccaggggcttgtttttggcagccctcttggaacgcagggtcgccagacgcggttcattgcttccgaagcacacgctcaccagcgcgggcagggccgccttaatcttccactccataccctggtactttttcacagccgtgatacagtccttgtcatcctcatcatatgagagtccctgtatttcagccacatgggggatgcccatgtattccgccaccatggctcccacctgtccggtggcgccgtcagcagacaatgcgccgcttaaaatcaggtcgaatttcccgtatttttcaatgcttcttgccagcaccttggctgtggcaatggtatctcctccggcaaggcaccggtctgtgatgagacagctctcatcacagcccagggccatagcgtcccttaatgctttctccgcgtcagtggggcccatggtgaacacggccaccttaccgccggtctgctcctttaagaccatggcggcctctatggcgttcaggtccgcaggattgatcatgccttctgaactggaacggatcagggcatgggtttctgggtcaacggaaacatcgttggaaacaggaacctgttttataagaaccgctatatccatattttctcctctccgccgctttcttattttaacagacgctcaaacgcccagtcttccaataatggtgtcttttctccgcgcataatgaattttgcaaggtctctgctggcggcaggtgcctcgataacgccgttcccgccgtaaccggttgccaggatatagccctccaccggtgtctctcccagaatcggaaggaaatcctttggctccgcacggtatgaaagccaggatgataccagtccgctgtccacgattcccggtaccctgcactctaactgatctaacaggaagtcaatgaagtaatcatcggttccgcctgtggccggaagtttgtccggatcccactggcctgcgtgcataggattgcttaaatccatggaaagatgggacttgcagataaagatgttgtctcctgcgcgcagggcatagaaggccgggtatttaagcacagggaaggtatagcctaatttcttgcctggagggcataagaagaaggcttctgcctttgtatgccagatcggcacgtccatgcctaccatctcgccggtaaatttgctccatgggccggtacagtccacaacatagtcaaattcataatcctgtccgtcgtctgtcttaaggccttttattttattgccctctttcagaacttccgtcacctttacaccggtcttgataacgccgccgtttttctgcatcttctttgcataggtgttggagatcatggttccgtcaaagtatccgtcatcctgtgtgtagcctgcgcccaggatattgtctgtggagatgtcaggaaggatttccttgattctgtccttgtccgttatgtactcgcctgtataaccggctgcctttgccagggcgatgcctgtcttaatggtggcctctaccttctcatctgttgcgaccaccagagtacctgttttatcaaatccgacagaacccttttcctctgcttccatctttaaatatgactcaaagccatacagccttacgtcccaatatctgtttcttaaggaatcgtcaaagagacatacggttccagcggactttgctgtggaagctccgccgatggtatccttctcaaacacaataacctctgcattgtcataaagactcagatgatatccgagacatgttccggaaatacctccgccaataataccaattcttttcttttccataactttacctgcctttcacatttttatttttttatcacaaggtttatatatcatctacacgaaggactgtttccagcagcaccctgcacccctgtccgatatcccgtccctctgtaaattcatatctggaatggctgattccccccacgcttggcacaaatatcatgcctgtgggaaagaccgttgtcatgagcagtgaatcgtggaaggccccgcttgggactttcgtgtaaggaatatccagttctttgacagaggcttcaatggcatccttcacccattcggtcatgggcgccggctcatggtaggagaaccggttaaagctgtattcttcccccatcgcctcacagatttccccaaggcactctctcagcttctgttctatggtttccatcactttctcatcctggtcgcgtatctccaggtggaagaacgcctctcccggaatcacattcactgagttgggcaccaccttcatggttcccacggttgccactgtaaacggattaccgtaagcagctacgatttccggaacccgggccacgaatctggccgcagccaccagcgcgtcctttctgtcctccatcaccgtgctcccggcatggttggcctctcccgtaatcttgatttcaaaccggctcactcctgcaatggatgtcaccacacctacgggaatctgcttcttgtgaagggacgccccctgttccacatgcagttccaggaaacagtgtaccgagtctttggaccgtctggcattgcccaggtcagccacctttaatccgcaggccttaagcacatcccctctggcctgtccgtacatatcctggtcctcctcgctgacatgaaggtcctgtccgcacatggctccgcttcccaacattccgcttccgaaccggaagccctcctcatccgtgaataccacaatctccagcggatggcgcagctttctgccgctctcgatcagtgtctggcagacctccaggccggctacgcagcccagcgccccgtcataccttccgccgtccggcaccgtgtccagatgggagcctgtcatgatggcaggcagtgttttatcctctccctccagtctggcaatcaggtttccggcagcatccatctcaggttctattcccagcttccggaaatagtccatgaagatctcccgtcccttcctgtcctccggcgaatatgccatgcgggtgaatgttccgtcttcctgggctccgcattggtacagctcttccagccgtccgagaaccctgtctaaattgatatccatttaacccctcctcgcttctattcgttgtcaatcttgcacacaccgtttatttctttcctgaacttcttatctatattgcacattatagataatattttaacagattgcatcggagcaaactgataaaaatggagagataatttatctagtctggataaactatctctctatggtatattataggctgaattctcacagccacaaacccctgctgctatataaaatccttgttgtaattctctatcatcttatacactaccagcccaatccgcaccgccagcacctcgttggcattgtcaaaatcaatcccggtcagcttctctattttttcaatgcggtaaaccgctgtcttatagtgaacataaagatcctgggccgtcttggaaaggttcagattccggtccagatacgccctcagggtcgtaatcagatcatccctctggggtttcttatagttgtaaagcttctgaagcccttccggcacatactccaacagcatggaagggtcgcttaactggcacagcagcttaaatatgcccaggtccgcaaacagcataacctgggggcctccgtcctccggcgtctctcccgccacatccacgaacatgaacgcctcgttggcttctttaaagctctccggaagattgatgatgccgtccaccactctgcctgctcccgctttgattttaagatacttgttatatctggccacgtccgcctgaacctgttccgctatctttttgatgcttttgcggtattcctcctgggtctgttccctttccacctcctgtatcaccacgattttatcgagatcgttatgtattttggctttggatatacggcttcggattaaatcgcttaagacatcaatatcttttacctttgccttaaagtctcccctggccatgctttcgtttgtcatgccgaatacaatcacacggtagctgccgttgatgtcgacccccagcaggctggtattcttctggagttctcccatggaatggatttttccattgagaatattgtgtataatatcattctggaacttcttctccagctccgtcaccgcgtactgtctggaaaactcaaagcgcagggccgtaatggcgctctctgcagctatgcagtccatggtcccaaagggctggtttaactctgtcaccaccaggtatatcttctcccggaaactcatcttcacctggatcaggcactgggggacctctcccttctgcctcatataggtgtaattggaataagtgcccggatcaaacggcaccgcgtccctgctgacggcgaactcccttggcgcctggtccgtagccgccaggcaggtcaggttctggttgtatacggctaccgggttgcggatcagcttggagagcacatccagtatctcatccacaccttttcctgtggaatcaggagctatggcaagggctgcgaaattgtcgtgggtcgtcttaaaatacttaagcctggtaacctcctcgttaaaaagccgttccatgatcagactcatgacatcccggaaggaaacctcgaacggcacctccagaaccggaatgttatgttcctgggcaaacgcgaacagcagttcaatcttggtgtccgcattctccaccttcctgccccgctttaacacaagggcactgacactctttctgctcagctcgttaatatacgtgcggaattcatctaccgtacaggatctgaaagcatacagacctgtcagaagtacctccccgccgtcaataaactttacgatgtccggcgcctcaatgattgtcacacccttaatttccttgtccagtcccctgtcgcctgcaagtaccttgatatccttcatttcctctgccaaaagaagttctcttactgttaatcccatctttttcctcaccgccatcatttgtcctgccaacactacctcctaattatagcacaaacagacacagacgtataataaaatatcacgtctgtgtccttttgctatttatatgctatttcatgaccttttcttttgccagcttctccataaccactgctgctttggccaggtcgctgtacttggtgaactcaaccgggcaatggctccgtccgtccttgctcggcacaaacagcatgactgtgggaagtacctggccgatttccagggcatcatggcctgcgccgcttaacatcctcttgcagctgtagccccgctccccgcattctttctccatgatatccagcatttcccctgaaagctccacaggagttatggtcagtttgttctccatgtcaaaactgccgccatactcaccaaccgcccgttcaagagcctttctgatcctgtttgtaatatcatttatattgtcgttatttctggagcggatatccactgtgaactccgctgtatccgccacaatgttcatcccgcccggtatggtgttcacatatcccaccgtagcaacggttccgtccgctttttccctggcccagtcagcaattcttgagataacctttgccgccgcgtccaccgggtccatcctcatatccatgggtgtggttcctgcatggtcggcccttccgtgcaccgtcaccatgtagcgctgaatgcctacgatacagtctaccagtccaagctctgtgccttccgtatccaggaccggtccctgctcgatatgcgcctccaggaagcagccgatttttccgtcttcccagacagcttctttgatccgctccggatccatgccgtattccttcatggcctcatagatggatataccgtctttgtcacggaatttcttcatatagtccacatccctgtggccaaggatggctcccgaaccaaaatagccggttccaaaccgtgttccctcttcgtcacagaatccaaccaccacgaaatctctcttaggtctgattccttcttctaaaaggagacgtgccacttcaatggcgcagatgacgcctgctatcccatcatagtctccgccgttatatacagaatcatagtgggagcccatcatgacacagggtaattcggagtcctcaccctttaataccccaatcacattgccggcagcgtcttccctcacatcaagtccgctctccgtcatcagctcctttaaatactctacggccttcctggcctcttttgtgaacggcagcctggtgcagccgtttcccggtgttgccgtaaactgttttaaatgctccaaatccctggcaatcctgcctgtaatctcctcaatcaccattagtaaaccctctctattcttttttagaaaccaacttgggtttcctcttatttctttctgtctaatacatataccttaaacggcgagtacagcatagccgccaccagcaggataaatcccaacaggcatgccccgtctccctgcatcttaagtcctgtcagtatcagggcaaaggccgccaggatggctgcaaaggccactgtgagcctgcccccttttgtcttgaaaaatttctctgtctccatatgtcatcctcctctgccccggcactgcctgcgcgttatgaaacagccactgataaaaatacgataataccgattgccagcgtcataatggtcgtgaagggtatgattctctttagcacctgtccctcgcttcccaggattcccgctgtggtagtccccaggatgatattgctggggctgatggcgcttccgatagagcctcccgctgtctgggctcccaggattggcgcctggttcagatgaagcagattggctgtggttacctgaaactctccaaagagtatattagatgacatattgcttccggtcatgaacgatcccaccattcccaccagaggcgccaatatgacataagtcttaccaagtacccttgctattccgtccgccagcacactggtctgccctgttccgcccatgattttggacataatgaccagaccgatgatagcgattcccgacggcatggacatggttatggaacggacaaacacacgctttacgcctcccggacgaatccatccgtgcctgccgaaatacaccagccctgcaatggatgacaaaaacaggaacatactggcatgggtaaagggccgcaacggcgaaaacagttccgtagcctggttgacgaatccataccccgtggaagtctccggaaatgaaaatccaatggacacctggttcaggaaacgatttaccggaggcaccactaacaccaccatggtaaccaccgtcagcaggatataaggcacaaatgcctgtaccagcgtcatgccgtccggcgtctcctccgatgtgcctgacgcagcaccacggtccataatccggctgtcctccacactccactcctgtctgtacatcttcattctgcctatcagtatcagggccaccagggagagacaggccggaaggaagcaggctatggttgtattgacccgggtcagaagcagttctccccctccctgaatcagggacaggataaggagggccggaagtcccttcctcacagcctttccttttccgtagaaccagcatatcaccagaccaatcaccacattccacatccagatgaacacacctgcccaaaaggcagccgccagatagtcaggcgtaccgggcacaagtccggtggacatggccagggcatcccaggcagctgccagggtaccgaaggtattgccccatgcctgccccaataaaggtatgatgactgcgaatacgggaaccactccaatgcccatgagcaggggagctcccactgccaccggtacaccgaatcctgtaattccctggagaaagctctccagtatccatcccagggccagcaccatcaaaagttcattgggcaaaagctttctcatcccgttgcggattacaagaaaggcccgggcttcatccgccacctggtacagaagaatcgcagtccatacaatcagcaggataataagagcgctccatattccttttgcactttccgctgccagcaacctgatatcagctttatagaatacaatgccagtaataatcgtaatggccagccccacgggggctgcttccgtagccccccactggaacttaatcattaacagcagcaggacaatgattggcagacatgccattatccacataaacagatttgttggtacgttcatattttatctcccgattacttatgtattactgtccccgtgctgccggcgattccttccgccgccttgtcaagcaaggtgataagtgtacgcctgccttccccagactgtgcgaaacggatggctgcctcgattttcggaagcatggaccccttggcaaactgctcctgggcaatgtactccttggccttatctactgtaaggtcactgagccattcctggttctccctgccgaaattgatggctaccttttccacagcggtcaggataatcaggtaatccgcctccagctccgctgccagcaggctgctggcattgtccttgtcaatgacggcgttgactcccgagagcctgccattgtcattcaccacaggaataccgcctccgccgcaggtaatgacgatatggccggcgtccaccagcgtctcaatggtcttgagctcccggattttcatgggcatgggggaggccaccacgatgcggtaaccccttcccgcgtcttccatgcagggaatcccgttttccatgtttttccttgcttcttcctcggtcaggaacctgccgatgggttttgtgggattcttaaatgcctcgtcctccgggtccacctccacctgggacaggatcgtggatacctttacatccatgttcctcttatacagctcatacttgatggcattttgcaggtcgatgccgatatacccctggctcatggccacacaggtcggcagcggtgtttccttgtaattctcatagctgcaggccagctggtccatggcattctggatcatgcccacctgggggccgttgccgtgggtgataatcaggtccatgccctgctgcaccaggtcaacaatcacctcagctgtctttgccactgcctgcttctgctcttcgatatccttgcccagggcgttaccgcccagggcaattactactctttttttatccataaccccatctcccttacatcttaagcttagtccaaagagaaccccagtttcttcgcgtatgccgcgattgccttttcaaaacatgcaataggcggatgtacggtgccggcccctatctgtccgtagccagccaccttatgggcgattcccgtgttgatgactggtgtgatacccttttccaccaccagtctggcatcaatcccaaggcatgttccctggaagttccagtttggtatgataaagttgggattccggtcaatggtaatctccgtcatctccgtgctggtacgaagcgcgtcctcgtacccgccggctcccacgaatctggtaacggccggagccgcgatcatggccatgccgcctacgccgaaggtctctgtgatggcgctgtcacccatatccgggcaggcgtcctcaccgtcataacctgtaaagtagagtccctggggcgtgttgacaggagcggtgaaccattcatcccccatgccgcttatgcggataccgaattccacgccgtttctgcacatggcagtgacaatggtgccgtcggttacctgccttgcggcgtccatgacggccttacctgttgccatcatgatattcaggaagaactggtctgtatcagccaggaatttgatgacgtcatagcggtccttttcgtccatatccatcttggtaatcaccgggctgacctctttcaggaaagccagggacgccgcaatattcctctggtggaactcgtctcccatggcgattgccttggctacaagaggattcacattcagtccgcctatggaacggatggcccttccaagggttggtcccagcacatccttcatccacagcaggcggtcaaccacctccttggaatatgcaccgaacctcagcaccttgccgattccctcattcatggtacagtatgcctcattgccgtcagtctggttctcaaccacgaacacaggcatgttggcggaggtaatgcctcccatggggccaacggcctttacatgatggcagggaataaaggtcacttcaccggatgcaagtatctttcttgcttcttcctctgtagcggcccatccctcaaagagtgccgcgccgacacaggaaccctgtaccgggtccggcatgttctcaaaccggattggcggtcccgcatggagaatcacctttccctcattcaattctttgatgacagacttagccggcaccacatccctgatgacaggctggctggcaaccactttggcgataacggagcggttggcctcatcaatatccatttcccggcagcttctcaggaaattcaggacctttatcagttccacgttgcccccggcgggcggcgcccagtcatactggaccacgtcacatccaaaggcttctatgacctcagcaaagctcttaaggcccacattgatgacccttggcttctgtgacagaagttcaaggagtttttccgatgcttccgttttctggatccgggctgttgtcttggggcggatttccttcaccggctcttcaaagtccagaccgatggcgcggattgccgtatgtacagccagcttattattctcacatacaatgacccctgcttccttcagtgtttccacggccttgtcataaccctggaaatcccttcttgtcccgcatacagtggccacaaagaatagttttctcccttcctccctggccttgtcgcgaaggcggataattgcagggaggagggccccggccatatcctcatgggaaccgtaacccagcatgatatccaaaaggataacgcctgtggacccgtcgtctatcgcctcctgcatgcactcaatgcgcttggcaggatcaatcatgggatgaggcttgccctgggtgtatacatcgtctcccaggtccaccacgatatgtccgtcggtctttaacataaaaccttctgccttctggggcggaaccttaaggttcagggcatccttgattaacatggcagcttcccctgccagggtgcctcctgagtagtatgccttgattgtcttcttttcctctgccgcgaagaagctggaggaatccacctccacgctgccctctgcgatatcctggcccctcaccagacccacggccaggcgggcggcttcatccagtgtatacgcatggtagaagttttcctcatggtactccggcttctcacccaggaacaaggtgacaaccggtttcttaaagttgctcagccggtcggaaatcctgtccctcacagcctttgccggaggcttggatatgatgatcagcactttcacggtatcatccttttccatggcctcaatcatatccatcatggtaattccacctacttcagtggacagatccctgccgccggtgccgatggcgtttttaacgccctctcccagacggtctatgatggtggtcagctcctggatgccggtgcctgacgctccgatgatgccgatgggtcccggagccacgtgattggtaaacgcaatgggcacgccctggatgattccggtaccgcagtccggccccataacagccagccccttttcatgggcctttttctttagcttaatctcatcctccagcgtaacattgtcgctgaacatgaatacgttcatgccctcatccaatgcccggtcagcctccaacgccgcataagcgcccggtatggaaatcaccgccagattggcgtccgccagctttcccagtgccttatcccaggaccggaccgcctccgctccctttttatccgactctgaagtggactgtttcttaaagaacgcctccacttcctccatgatcacgtcaagcagcccgtcgtcatccacatcagccactaccaccatatcattggcggacgcctcctccagctcgctggtactgaggccgctctgcctgtaaatgtccttgttggcaggagttgccatcatgatggaaaccttctttacaccttctatggaagaaatctggttagtcaaaagcataaggactacagaatcatgataactccctttttttactatggtttttaacatacgctccccttctccttattcggcaaacctgtttttgtggtcatatttatcaaagtgtaccttatcgctctttaaatactcatagatttcatcaactatctccacgccgcccgtggcataggctttatcccgcctcatgactgcgcgctcacccggataatacaccttatcaaagccttctgcggccggcatctctcccagctcatcaagcacctgtgacatggacgccttgaatgcgtctaatcccacgaatctggacggatccatgacaatgaacatctgtcccagctccctgcctgccgacaggtcatggtacatcgaacttacatgcttcccaaagggaactcccagaagcacgcccgagaaaatgtccaccatcatcatcaggccgtatcccttggcgccttcaatgggtaccagggcattcacaaggcgggaatccgtaaccggacgtcccttggcgtccactgcccatgtgtcgggaatggattcatgcctggagcgtttgtccagtatcttgccccatgcctggaccgtggtagccatgtcgaatacaaccgttctttcgtcagccgtgggggctgcaaaggagatggggttggtaccgtagtaaggctctatcccgccgtacggcactgccatcggatcggactggcagcatgcaatcgccaccagatccgccttggcggccatttccgtataataaccaatggagccgctatgggaaatgttgcggatgccaaccactgcgatgccggacttctttgccatctcgatggccttttccatggccagcacagacgccacatatccgcagccgttgtccccttcaaagacagcggaacaaggtcctgtctccctccactcaaacttcggatcaaccgtgatgccgcccttggcaatcctctcgctgtaatactccacgcgcacagccccgtgggagtgataacccctttcgtcagaccaggtgaggacatcagccgtcatatccgcatgatccgccttcagccccgcctgcatcagcttatttttcattaacccctttaactcatcatgggaaagtttcatatctgcaccccgcttcttctcaatattctataactgcacgtctctgttgcaatccttggagtaaatatacgcgaaatcctcttcacgtcccaccgcataacatgcctgcgggcaatatgcgtccaggaacatgtaatctccggcctttaccggtacccagtcattgtcagccctgtacatgcctttgcctgacaggaaatacattccgtgctcctggatatgtgtctccacgtagccgtgggacgctcccagcttgaacttcaggatgtgcatgttcatatcaaatccgaaattacctgctgccggaaggaaatccttgatgtggcagttgtccattccctcatattctgtccagggaatatcattggcatttcccactaccgtaaatgcgctgtatccctcaatcttctcatatctgcgcttatatacatacagcctggcttctttgccgctcttgttttcaaaggaaaccttaacgctctcaggggagaagatataaccgccctcggtaaggctctcttccttgtcggcattcttgacaaccacttcgccggccagtacataaatgaacgtctccagaccttcaccgccaatgccgctgttttttccgccttcctttaccgtaaccagataatccgcaaaggtagctcccatggcaggtgatcccagaatggttacgtcgcagttctcataaccagggatgctgttcttaaccagaccgtccggttccagcagaacataattttctttcttgattacagaacgtgttgccagtaattcctctctgtatcctacctgatcatttaaataactcatatttacttcctcgctttcattctttgttaaaggcctttttgggtcaacttttttatatttatattattgcaaaacaacgttcttttttcaattatgtatttatgcaaatctccctatgatttttatccattttataccctattgctaattttttcacatcccacttttttccggtctcatgttataatatctttaaatataacttatctattacataaaggagaacaccattatgacggaaaaaagagagataaacctggaacatccagcttatccaaagtatgcaactgtatattcagaaaaggatacagatgcaaaagcctgtatcctttacttccatgggggagggctgctgtacggcagcagggaggatctgccccgcaggcatatagataccctgacccgggccggatatatcatcgtatcctacgactacccccttgcgcccgccgccaggctggataccataatgggtgatgtctgttcctccatcacccattacataaatcatcccgaaatatactgcggacgcaaactcccgttcttcctgtggggccgttcctccggagcatatctctgcctcttagccggggccaaaggtaacctgcccgccgtgcccgctgggatcctctcctactacggatacggattcctgtgcgaccactggtatgagacacccagcggattttactgctcccttccggccgtggatgcgtcctgcctggaacaggccggtgctgacctccacacggccggaagcctggacacccactacagcatttatgtatatgcaagacagaccggatcctggcgttcccttctgtatgaaggcagggataaatatttctatctggactacaccctgcgcgcctgcaccgcccttccctgcccccttttctgcgctcacggcacccgtgacaatgatgtgccctacggggaattcctggagctgtcaaaccgtttccgcccatggcagttcatcgcctcctgcgatggccacgactttgaccgggatgaggaaaacccgtttacggaaaaactgctggacgagacactggcattcctggaggagaacctgaagctgtcgccggcccagtgctgataactagccttcctgctcctggaaaatggttcctgtgcggaatgattttgcgctcttcatgttcttcatcaggaagtaatacacaagtcccgtgggaatcaggctcacataccaggacagctgtacgatgaccagagagcagagggagccgatgacgatggctatgatggccgcccagttgattcccttgaacacgccctgcttgtcatacatatgattgatattcagcttctttttccggagaatgtaatagtccactgccattacggcaaaaatcgggcccaggaatgcggagtagaactgggtaaacaggcttaagcccgctgccgaatcatctgtcaccagcttccacggcatacagcatgccgagaggattcctaccaggatggtggcgtgggaccatttcatgtggaatgattccatcagtacataggatggcggaacgatattgttcagcacattggttgtgacctgggcaaatgcaataaacagcaatgtcactactgtgaggaacttgcttcccatggttgtggagaacaccacaaccgggtcgctgttgccggtagcagccgtcacaagcagcccgatcagtcccataaacagcgttacaggcagaatggcaaccgtgtaaatacttccggtaaaggtgggtcccaccttcccttccaggttacgggaatagtcggatgcattgatgatcatggttgaatagattcccaggaaggaggtggtggctgcccagaaaggcatgccccatgttcccttgattccggagaacacatcatcaatctcagttgcgaactgtgtcttgaccacatacagcatgtaggccagtattgcgatgatgaatacacaggaaatattttccagccatttgataccctcaaatcccttgatggccagggcaacctgcagcattgtaaacagggcatagaccaggggaaggttgctgaaaccgaacaggatgctcagacagctgttgatggctcccgctcccacccagctctggaaaccaaaccagataatggcaggaatacctcttaacaggccgggcaccttgacgccggtggtgccgaagctgctccgaagctgtaccgtgtaaggaataccgtacttatgcccgcagttgccaatgattaccagggccaccgcgatgaccagacatccgataaccatggcaaggatggcctgccccactgtcaatgcccctatcaggccggcgcccatggagaaggtaccgatggatacgcaccctcccataaagcttgccgcgtaggaaaggggccccataatacgttttttcgtcggctgcagatccggatccacgttctttaccagttccggatttaaattcaaattttctaccatattactcatactttctccttttccggggagtgtctgaaaatcacattctgtcagctcagtctcctgaccagggtccccacacctttttctgctgtaatctttccgtcttcagccaccacattgccgcggatgatggtgcatacaggcagtcccctgcccttcattcccacaaacgcggaaatcttgtttacatacaggagggattcgcttgtaatctcccactccttttccgggtcaataatcacaaggtccgcgtcaaatcccggaagtatgtcaccctttttcccgtatatgccgaatgcttttgccggattaagggccatggctcttgccaataccctgggatccacgccccgctttacgcatccctcgttaaacgctacctggaagccgctctggataccgctgatgccgccccatacgtcaaatacattctcgattttatttcccagaatctctttgaatttctcatcgtaggagcagggagaatgatcgcttgctataccgctgaaggtaccgtcctccacataggcccagagacggtccacatcttccttggaacgcaggggaggcgcgcatttgaacagaggtccgttggcaaggacatcctggtccgtcaggctcagataatgagaacatgtctccgccgtcacatcatagcccgcctgctgggcctcctttatcttctgggccacgtcgggactgctcacatggcagatatgtaccttgcaccccgttgccttggcaatctcaatcatatccacagtggcaaccatctccgcaatcaccggcctggaatccagaaaaccctgccagtccatacgtccttctcttttcatcctggcttcctgccatttaatcatggaaaaatcttcgcagtggaagccggcacgtccgccaaattccttaatcctctccatggcttcataggcctgcccgtagtttaaggagctgtaatcaggtgataccggtccgataaacgatttgaaggcaacacagcccttctcatgcaggccttccagttcgtcaaaattatccggcaccaggccgccccagaagcagtagtccgtatatgcgttacagtccaccttctccacttttctgtcaaaaattgccgcgttcgtcatggccggttcattttgaaggggcatgtcgatgatggtggtataacctcccatggctgccgccgctgtcccatgttcataatcctcccgccattcataccccggatcattgaggtgggcatgggtgtcaatggctcctggaaacacatattttccttttgcgtcaatcacctttgcagcctccggctcctgtccggcctccagcagggcggcaatcctgccgtcctttatgccgatattcccctctgtcactgcctgggcggtaacaatccttccatttttcactaacagatcatacataagctttgcctcctatttacttctccagggaagttcctttcctgaaacgttggcaggacggcatatgcttcatgcagaaataatataccagtcctgtaggtatggttgccgtaaagaaggatatgtctacattgacaagtccgattaccgcgcccactgccgttgcaatgatggcagcccagttgattcctgaatgggttccgttatcatcgtagaggtcatccagggccgctccttccatctttcccctgtgcaggatgtagtaatccgtgatcagcacggcaaagatcgggccaaagaaagcggtgtaaatcttaacaaacagatccagtcctgccgcggagctgtcgttggtcaggatccacggacaggtacatacagccaggactcccaccagaatcacggccgtcctgtgcttcatcttaaatgcgtccataaacgcataggcagggggcaccacgttgctggccaggttggtggtcatctgggcaaaaaggatgaatccaagggttgccaccagcagcaccttgttatgtaccatctgtgaaaatgcgttgatagggtttgcaatccctgttgccgtggaagccattgcgccgataagtcccagaaggacagtggttggtaccatggcaataaaataggcaacaccgcgctttcctacggaaaaaccgccctttaactctctggaatagtcgccggcattgagcataaccgtggtactgttgccaaagaaagcgatgatggcagcgatgaacggcattccccatgaacccttcctgctgatgagcttatcaccaatcacgccccagtactgggtcacgcatacaaataacatatagagcatggcgctgacgattaccacgccgccgatgttctccacccatttaattccgtggaagccctttactgataatataatctggaccacctggaacaggaggaagaacagcacaacattgtcatatccgaatatggcaatggatatctggttgatggcggagccgcccagccaggtctggaatccgtaccatacaatagcgggaagcccacggatcataaccggtacaatgtttccctttgtgccgtacgcgctcttaagctgaaccgcatagggcgcgcctgatttgtagctgaaacggtcatttgcacagatgccgataaccagtatggtggagccaatcagcaccgccaaaaatacctgcatcaggttaagccccttgtccagctgggcagaccccatggtcaatgtgccgatggaaatacatcctcccagccacagcatcaggtaggatccccaccccataatacggtccttgtcctgaatcggcgccaatgaatctgtttgcttatttacttcattttttacatcgctcataatatcaccccttattttcttctcctcgtattaacagtcatgtaccggtgtcacgtattccccgtagcccagagcgtcttccctataggttccgccggaggcaaccaccttgccccggatgatggtgcatacaggagcgccctttccttccagaccgtcgaagcaggatacatgccccttggtcagcagttcattctggctgcatttccaggctttctcaggatcaacaataacaatgtccccgtcaaatcccagctcaaaggcccccttccggccgtagaggccgaataccctggccggattgtagtccatcaccctggcaatcagggtggggcttaagcccttcttgtttaccaccatgtcaaacatcatgggcaggaagaactggatggagttgagaccgccccatgcatgccagatatcctttgtggaattgtccttttcctcatccgcagccggtgagtggtcgcttcccacacaggataatgtgccgtccagaacataatcccacagccgttccatatcctctttcctgcgcataggcggcgtacacttggccggagcgcccttctcaaagacaaagtcctctgtaaacccaagatagtggggacatgtctcagccgtaatgggaagcccttcgtggatggcgtcctttacaacctgcgccaccatggggtggctcacatggcagatatgcactctgcccccggttgccctggccatgtcaatcacatttttagtggcaacatactcggtccacacatcatgggaatccaggaaatccctgattttctcttcgctggtccttccggtttttgcctttgcctccttttcccgttccagtacctgaccgaactcttcacagtggaaaccgcacagggccccgtacggctttaagatttccagagcctttctcacattgcccatgttcacggttgggaacaaatcgccgttagggcaggtaaaccctttgaatgcagccacgccgcatttgtgcaggtccaccagatccgccatgttgttcttcaccgaaccgggctgattgtcataatcccccacaataccgccccacagggcaaaatccacataggagtgcttgctgatgcgccccatcttcaggtcaaagatttccttattcatcaaagacggatcattgttcaagggcatgtcaatcaggcaggtacagccagctgccgcagctgccctggaaccggtctcaaagtcctccctgtattcaaatcccggttcattcaggtgcgcgtggcaatcaatgattcccggatatatgtagcatccctttgcatctatcacttcttttgcagccgcctgcgaccccttggcaagaaaggcagcgtagaccccgtcttttaccgcaatatcagcttcataaatcctgtcaggggttaccagctttccgtttgttattactaaatcatacattttttacctccttacagactgtaaatcgttgaccgtttcaatacttacgttgtattttattagatacacagtcagaaaacaatgacgagaaagcggggaaaaattatgtttttttgtctatcatgtataaaactttattatttcaaattttgtttttgtgtttttttcgataatctggtaaaatttattgttgaagcattgttataagtgcaacaaacagcatagcacagggagaaagcaaatgtatcctaccatcaccgccattgccgcctacgcagcacagcagctggaggagtgccgtctttggacggtccactccgtctacaaaaaaacagtgaatcttcaggcaggagagcgccttctggccctgcaggccgcatcctctcccatgtctcctatcagcatcataacagacatggatgtcagggcttttgaagttctaccggttaaaccaggccagcaggtgtccattgccggcagccgcattataatatcctctccggagcacacagtgtcttttgggtgcctgccgaaaaaagtttgctgcacccggttaacctgcccgcccgggccgtttccctgcaaagagcttctttcacagatccgtcaggccgtcgccagctcgcaggccggcatattccggcttctgttctgcgattccacggaaggacaggcgattacaggcaaagaagaatacagcctaattctggctgcagccagaagccgaatcctccaatgcagcgaatgtctggaacagcatttgtacggagatgctgccaaacacctggcaggactcattggactgggaataggccttacgcccagcggtgatgattttctgtgcggggtgctggcaggactcatcctgcgcggagaagaaagccatccatttgcgcacgctctctgccaggagataacttcccgccgttttgataccaatgatatcagccgcgcctttttggactgctctgtgcagcaccatttcagcctggctgtcaacagcctgacagaccttccctctgccgataggattttaaacgtattctcagccattgggcattcttccggcattgatactttatgcggggttgcgtacgggctctccgcagaggtatagggatgtggttcagacacaacaaaagcgcaggcttctgtgtcctccccggaggagtatcacggcacagtgcctgcgcttatatatatcctattatatttcaaagttattaccgccttgtaaggatagaatcaatcagtccatactccaatgcctcctccgcgctcatgaaattatcccgctctgtatccctggctatttcctcctcggagcgtcctgtattcaccgccagaacacggtttaaacgctgcctgcttttctgcatgtaatccgacataattttaatgtcgctggcagggccctggattccatttccgtgcatggcgggctggtgtatcatgatttcggaattgggaagggccatgcgttttccatgtgctcctcctgccagcaaaaaggccccgaaactggctgccagtccaaggcagatagttgaaacgtcgcatttaatatactgcatggtatcatatacagcccagccagctgtcacagaacctcccggactgttgatgtacagctggatatccttgtccggatccgtggattccagaaacagcagctgggctataataaggctggcagaggtgtcgctgacctcctcgcccagaaagataatacggtccgacagaagcctggaatatatatcatagcttctctctcctcttcctgtctgttcaatcacataaggtatggtgctcacgctgcaatccctcccattcctctgtcacaaactccatatattgtaaaacaggaagcttgatgcatttgaatccgtttctttgcaggcagatagatcccccgttttctgtacgctccgggcggacataaatatacctgtttaaatgcgagagaaaatgcctgctgggactggtacccggcatcgtaggctatctgcgtgatgtccatatccgtatccaccagcttctcagccgccatggtaagcctgcgctcctgcacatatttatgaatcgtgcctcccgtctcttccatgaatatccggttcagatggaacctggaataacctgcatgctccgctatctgctccagattcagcttctcctccaggtgttcctcaatataatcaatgacctttctcactgtatgcttttgattcttcattccgccacctcctggtctggttcattttattataacaggcgggagccggattgtcttaataaaaagtgcgttttgtaacgcagtgaactttttcctttgagataccccatcacctctgacacagcatatttgggcggaatacttaccagcatatggatatgatccggcatgcattgcgcctcgattatctcaatcccttttcttcggcataaggtccctagtatttggcctacatctgccttgatatccttatatattacctgcctccgatattttggtgcaaaaaccagatgatacttgcaatcccgttttgtatgagctaaactgttattgtccatttttggacctcctgtgcttttttatttgtggtttgcagacctacatctattttagcacaggagttgcttttatctgaagatattccctccacctgcagagcaggtggtttatttttactgtgacacaagtaaaaaacgagaggtagggcaaaaagcctcacctctcgtttttttgcgtttggcgatatatcgtcgaaaataattctattcaaagtattcagtaaattccgctattgattttccaatacaataatactgattatcactggcactccagtaatatacttttcctgtttcgttgttgacacagtagtaattatctccggaatccaaaccaatcggcacaatcttccccttggtattgtccaagaaaaaagttagcggcttttcaatatagtagttcttgttcgcacaatccaacgataagaaaactctgatttcgtattcttcgccgtctaccttgaccaaatccttaacaggataacctccagaattggcagtcagaaattctttaatatcatctcgaatccgaattgaatactttgcttcaacttctgcaaagagcgtcaaatcagtcaccttatcacaatgattcgttatacttttcattagaaagattcgtaaatttcatcttataaatttgttctaaacgatagcctttttctcctcggtcataaaccactgagttgatacatccgaccttttcgccgtcttcttctaggtaattacgaatatcatcaatatctcgttgaatgctacgctcgttcacaccataattaacactctctgcgcttttgtcgataacatgaccgttaagaagttttgtgtatatgccaagaactctttcgattttatctctcttgaaattttccatagacacctccgtcctataaaacattatacattttcagtatgacagatagtgtctatctcattcatttttccatcttgtttctccaatttttatactctccagttgtcactcgaccatcagttggtttcatcgcatcttttggtattgcccaatcccgaccaaattttacggctccgggtatttttccgtttgaacaaagagtttgaatccatcttggtgtcatcccccactgttcagctatattttttattgtggtatacccct

SEQ ID NO: 3366 - DNA, 135164 bp, Unknown
  gut microbiota DNA sequence
tcacctccaaaaagaaaaagagcactgccacaataggcaatgctatcaacgtgcaactggctaccatttcacaggccttttagctttgcgtcatagactttcaactactttgctacctgaatatatcatattcctctaaacgcattttgtcaattcgtttttcgtcattttaccctaatttacaacaaaagataacaagacttgtgcaatatgctttgttctatcgcacaagtcttgctttcagccattttagattgtataaatcaattctgtcaatacaatttcctctgcccggttgcgaatgttattcatcctctgaacccagacaagctgctcactggtttttaactcatccctcatgccctcagcttccttcatctgccgaatgatggtttccagtctgctttctgcctgctcattcaggtctggcttggaaagccgcccccagcggccaatagggcggtgttcctccggcacctccaatgctgggatatagtaatcgcccatcaactcataatccaaaccgttgctgtcatcgtgaatcctgcttttcaacttgttcatatcaacaccatttaacctttcctctgctcacgcagatatgcttcaaagatacttctccgtatcagaacctttttcccaatcttatagacagcaccgcactcatgggacaagcgagtgaccggcttcaaacccagcccatagtaatcgcaagccatattataagtaacaaattcgtgcgtcataaactccatatcctcatcgtctatctggtctgagaacacccacgcattaccgctcatctacatcaccgcccttgtagtcctttgttgcaggctcatggaaccgttccagatactcatcaaagatttccttgttgataagaaccgtactgtcaaaacggtagattgccccggcatcgcttgccagctcaaacaaaaaggagattataaaaccatgttaaatcaatacgaggacatcataaccgttgaggagctttgcgagattttaaagaccggcaagaaccgggtttacgaactattacagacaaaccagaaaagagcattccaattatggcgcaattggaagatacctaaaatatcagtgaaacattatctggagatacaatctggaatttccaaaagccagattaaaaaataatgcccaaaaacgtacaataccgctatggatatcgtccatagcggtatataaaaattctattctatgctactacaccactcaacttccaatatttcctctcacttctctgattttcgatgttttcaagaaaattggtgtaaagctggtgtagtaacttcaaaaatcacatgcttaccatactgcaaaagtctatcatccaactgtgttttagtacagttttgcacccgctggaatccggccgtccaccatcaaaagattaagtccttcttttccatcttcctcatggactgctgatatcagcatcccgcaggagtcaatccccatcatcttgcgcgggggcagatttacgatggcaattgccgtctttccaatcagctcctccggctcgtaatactcgcggattccgcttaaaatcgtacgatccgtgccgcttccgtcatctaatgtgaactgaagcagcttcttgctcttcggtacggccacgcaatccttaatcttcacagcccggtaatcggattttgcaaaggtatcaaagtctaccatttcctcaaacagcggctcgattttaaccttggaaaaatcaatcttttcctggattacctggaccttctccgctgtatctccagcttcagcagcagtccgggcagaagccatatccgctttcttagaatccccggaaccgcccagtgatttcatggtggggaacagcagcacatccctgatggccggtgaatccgtcagcagcatgaccatacggtcaataccgaatccgattcctcccgtcggaggcatgcccacctccagcgcgtttaagaagtcctcgtccgtgtggttggcctcctcatcgccctgggccagaagctcttcctgtgccctaaaccgctccctctggtcaatgggatcattgatctccgagtaggcgttggccatctcccagccgttcataaagaactcaaaacgctccacatagtcgggattgcctggctttttcttggtcagaggtgaaatctccaccggatggtccagaacaaaggtaggctgaaccaggtgctcctctgcaaactcctcaaagaacagattcaggatatcgcccttcttatggcgcccctcaaactccactcccttttccttggcaacagctcttgcctcctccagggtatgaatctggtcaaaatcaactccggcatacttctttaccgcgtccaccatggtgatgcgggcaaaaggcttgcccaaatccatctccacgcctttataagtaatggtggtggtaccaagcacctcctgagccacaaaacggtacagcttctcggtcaggtccatcatcccgttgtaatccgtataagcctgatacagctccatcagggtgaactccgggttgtgcctggtatccagaccctcgttgcggaatacacgcccaatctcataaaccctctcaagtccgcctacaataagcctcttcagataaagctccagggatatacgaagctttaaatcctcatccagggcattgaaatgggtctcgaaaggccttgcggcagcgccgcctgcattggaaaccagcataggggtctccacttccataaagccctctccgcccagatatttgcggatggcagccagtatcctggaacgcttgatgaaggtatccttcacctctgcgttcatgatcaggtccacgtagcgctggcggtaacgcatatccgtatctgtcaggccatggaacttctcaggaagcacctgaaggctcttggaaagaagggtcacctctgtggcatgaatggatatctcgcctgtcttggtggtaaaggcagttcccttcacacccacgatatcgccgatgtccattttcttgaaatccttataagactcctcacccacgctgtcccttgccacataaacctggatgctgccttttaaatcctgtacattacagaaagaagccttgcccatgacacgtttgaacatcatacgcccagcaatggctgcttccttcccctcccactgctcatagctatccttgatatccatgctgtgggcagtcacatcatattttgtaatctggaaagggtcctttccagctgtctgaagctccgccagcttatccctgcgcgccttcagcacatgatttaaatctgtatctgcctgattaaccttctgctgttctcccacgtccttaactcctttgtgtcagatttatgaaaccctctggatttccagcaccttatactggatatcccctgcctgggtctccacgtctacgcattcacccactaccttgcctatcagggcgcggcctaccggtgattcgttgcttatcttattctgcaggctgttggcctcggtggaaccaacgatatagaactccatctcctcgtcatactccacatccagaagctttaccttacatccgatattaattttatccaggtcgatttcatcctctaccacgacctcggcgttcttaagaagcttctccagttcctcgatacgcagctcaatgtccctctgctcatccttggctgcatcatactctgcattctcggacaaatcgccctgctctcttgcttccttaatcttctgcgcaacttcttttcttttgacaactttcagattctgcagttcatcctcgtactgtttgagtccggcatatgtcaaaatgtgtttcttatctgccatcttacccgcttccttcctttaattcttactttatgttgatttcacttgagtatcattcttaatgtccacacattctgagtattatataggaaaatgtgtccattgtcaagattggattttcctgtccagaagctccacgaacccctccaatgtctccacctggttgatttcattcctcagtgtggctgagtggggcattccttttgtataccaggccatatggcccctcatttcccgcatggcaaccccttctcccttgaactgtaccagcatccggccgtgccgcagaatcatggcctttatctcagccatggaaggtcccggaagaacctcccctgtatccagatagtggttaatccggccgaacagccacggattccccttggctcccctggccaccataatgccgtcgcatcctgtctccttaagcatcctgccggcgtcctccggcgtaaagatatccccgtttccaatgacagggatccgtaccgcctccttcacctgacggatgatgtcccagtccgcctttcctgaataatactgctccctggtgcgcccatggacagccaccgctgcaacgccgcagctttccgccatcttagcaaattccacggcattgacagagaggtcgttgaaccccttgcggaatttcacagtcacgggctttttcaccgctttcaccatggcggtcagcacttcctttgcccgttcaggattcttcatcagcgcggacccctcgccgttgttgacgattttcggcacagggcatcccatgttcacatcaatgtaatcatagggtccttcctccagcctggccgcaatctccgccataatgtccggctccgagccaaagagctgcacggctgcggggcgctcggccgggtctatctgcagcagttccctggtgtttttgttgttgtacagaaccgcctttgcgctgaccatctccgtcaccacgcagccagccccctgttcccggcacagcacccgaaagggcagatccgtgacgcccgccatgggcgccagtattacattattctcaagaactgtgtttccaatcctaagtttcatttaatcttccccgtcatcctctatatctatgtcctcgcccaggaaaaatgtcctgtaatacagttccagcgcttccagcatttcttttttctcttcctggtactgcttgattttaaggacgcttcctatctcgtcaaagagataatccgtttcctccgaggtcaccctgaattccaggtttcccttctcgtcaaattccatggtaagcacgccgcccacatcctctgtatacatcacacacatgatctggagttcgtctcttatggactggggcagggatttgaaatcctggttaaaataatatttctgttcataggaattggctccgcaaagcactgttgtatccttcatctcatctctccacaaaagtccgctgcctgtgacaggcggcggactttccattctatcgtcgtttatgttctcacgtaccggactagcgaatcagcatcttggcaatctcatactgctcttccgggatgtcctttgtcatattcagggcttcctggatatcgaaatccacaaactcaccgtgcttataggctaccagacggttgctcttgcctgcggccagaagctctgctgccttggctcccatgatggaggcatataccctgtccttacaggtaggcgttccgccgcgctgcatgtggcccaggatggtggcccttgtctcgatgcccgtggcagcctcaatgcgctttgccatggaaccggaatggccgattccctctgcattgataatgatgttgtgtttcttgccccgcctgcggttgtcgataatccggttaatcagggcctgctcgttgccgtcatagcgctccggaagaagaatatcctccgcaccgtttccaatgccgcaccacagtgcgatgtatccggcgttgcgccccataacctccacaatactgcaccgctcatgggatgtggatgtatcacgaatcttatcaattgcttccatggccgtgttgacagccgtgtcaaaaccaatggtataatcggtacaggcaatatccaggtcaatggttcccggaaggccgattgtgttgatccccagggaggacagctttcccgcgcctctgaaggaaccgtctcctccgatgaccaccattccgtcaatgccatgcttgcggcagatatcagcgcccttctgctggccttccgctgtggtaaactccttgcatcttgccgtgtaaaggatggtgccgccccggttgatgatgtcagacacactggtggactccatgtccacgatttcctcctccagcaggcctgcgtatccgcgcatgatgccctttaccttaaggcccttattgatagcagtccttacaaccgcgcggatggccgcgttcattcccggcgcgtcgcctccgctggtaagtactccaatggttttcactgcctttgccatagcaatttacctccttgtattaagcacatacattttttctgtgctgacatcgctctcaatcattcattctctcatctatatccaacgctattctaattcattttccccagcttttcaagacctttttctacgactttgacatttttttcaccaagtcccctccccagctcttccaaaagcccgggcgtaacctgtacattccagttggccggaaggactttcttggccctctccttctggagataaatgaccacccggtcctttccctcgctggaccgcagagaggtgagcagacgctgctccccggactgatacgtctccatatccgggaactggagccacagctccttgggtatactgtcaaagggaatcacctgctcgcacaccagctttcccaccggatcgtctccgatggacacccgtcccctgatgaacagcttggagtcctcggtaaaaaggtcccggttggcctcgtaatcccttgggaacacgatgacctccaccggtcccagaaggtcctccagggttatgaaagccataagctggttggtcctggtggtctttacggtcttgcctgccaccagtccgccgatgacagccctggatccgtccgccacccctgccgcatccgtctcctcatccacgataaactgggctgaggtggctgttatgttccttctccacgtctcctcatagtcgtccaggggatggccgctgatatagactcccagtatttccttctcaaaggcaagaagctcatcctttgagtattcccccacatccggaaatgtaatctggaattcgtttctgtcttcctcacccgcaatgtcgaaaaggcttaactgcccctcaaacatggattttttctccctggccttttcctccagcatggtgggcgccaccgccatcttctggcgcctggttccgggcagggtatccagagcgcctgacttgatgaaattttccagggttcgcttgtttacttccttcatgctcatgcgtcccacaaaatcctccatggaacggaagggaccgtttctctccctctccgccaggattacctctgtcacgggtttgcccacgctcttgatggcggacaggccgtaacggattgcgtcccctgacacggagaagccgctctcgccctcgttgatatccggcggcagcacgggaatacccatcatgcggcggcaggtcagcacatactcggaaaatttacttacattgtccatgaccgatgtcatgagggcggccataaactccctgggataatagtatttcagataagctgtctggtaggacaccaccgcgtaagccgctgcgtgggacttgttgaaggcatatttagcaaaatcaatcatctcatcgtagatgtggtttgcggtcttctcgtcaatcccattgttcacacagcccttaaccccttccgactggctgccgtaaacaaagttctggcgctccttttccatgaccgacgtctttttcttactcatggcgcggcgcaccagatcgctgcgtcccatggtgtatccggccaaatcacgcacaatctgcataacctgctcctggtacacgatacatccataggtggggcttaatatgggctccagctgggggcagtcataggtgatggaagccctgtcgttcttgcccttcagatatttgggtataaaatccatggggcccggacggtacagggagatgcctgctatgatatcctccaggttctccgccttaagctccttcatgaagctcttcatccccgcgctttccagctggaacacgccctcggtcctgcctgttccgatggattcaagcaccttcttatcgtcaaaatcaatgtggtcaatgtcaatggttatgccgtaatccttctcagccagccgcaccgcgttctggatcaccgtcagggtccgcagccccagaaagtccattttgagaagtcccagctcctcgatggttgtcatggtaaactgggtggtgatggtgccgtcagaggccctggacagagggacaaactcgtctatggaccggctgccaatcactaccccggctgcatgcatggaggtatgcctgggcagtccctccagacgcctggacatgtcgatgagataatggacctgctcatcttcattgtaggcctttttaagatccggattcatggtcagggccttatccagcgtcatccccagatctccgggaatcatcttggcaatggtgtcgcacagggagtagggcaaatccagcacacgccccacatcccggacaacacccttggcagccagggtaccaaaggtgacaatctgcaccacctggtccttgccgtatttgcgcaccacgtagtcaattacctcctggcgccgctcataacaaaagtcaatatcaatatcgggcatggacacgcgctccgggttcaggaaacgctcaaagagaagattatagcgcaccgggtctatgttggtgattcccagtgtgtagctcacaatgctcccggcagcagacccccgcccaggccccacgatgatatcctgggatcgggcatagttgataaaatcccacacgatcaggaaataatccacgtatcccatggagcggatgacatccagctcatagtccagccggctgctcagtgtgccgtcatcgtccggatagcgggtcttaaagccctcccggcacagatggtttaagtagctccaggagtcaaaaccctcaggcacctcatacttaggaagcttggtaaccccgaactcaatctccacattgcagcgctccgctatcatatgggtgttttcaatggcctcaggcgcataggggaacagagcccgcatttcctcctcggacttacagtagtactgtcctccctcgtagcgcatcctgtcctcatccgccaccttcttgccggtctggatgcacagaaggatatcatgggccttctcatcctcggcaaaggtatagtggatatcgttggtggccaccagcttaaggcccgtgtccctgctcatgcgcataaggccctggtttaccagcttttggtccggcaggccgtggtcctggagctccaggaagaagttgtcctttccgaaaatatccacatacttttcagatgccctgactgcctcctcatacattcccctggtcaggcagcgctgcacctcccctgccagacaggcgctgagggcaatgactccctcatggtaggtccgcagcacctcatagtccaccctgggtttatagtaaaatccgtccacaaaccccttggacacaattttcatcaggttttcataacctttgttgttctctgccagcagcaccaggtggtaataacggtcctcaccgcttaccgtctccctgtcaaagcgggagcccggagccacatagacctcgcatcccagtatgggcttgatgccggcctccctggcagctttataaaaatcaatgactccatacatcacgccatggtccgtgacagccatgctgtccatgccaagctcctttgccctggctgtcagctccctgattttacaggagccgtccaaaaggctgtattccgtatggacgtgcaaatgggtaaatgccattccctattctctccttatccttgcggtatcattcgagtaacagtttatcataaatacagataaaagaaaagagaaccaggcaagtcctgcctgattcccattatctatctctccaaacaaacggactggtagttactggtttttcagatacttctcaatttcagttacagctgcctcctcatcttttccgtcggcttccaccaaaatggattcacctgcggtcagacagagagtcatcattcccatgatgctcttggcattcacacgctttgcctctgcttccaggtaaatcgcgctttcgtactgactggctacctgcacaagcatagctgccggtctcgcctcaagtcctgatgccaattcaactgtaatcaatttctttaccataataatcctcctcattcctttgaatggttcacagcccctgatacgttccaatggtcatgttccaatctggccgcatcccgactgccattcaggtgcccgtactgattcgtacttgataaaactattgcaaacttgatgtattacggtctggaaactgctgccgcagctcttcagccacaaggcttaatttcctcaaacggtggttcacgcctgatttacccacaggcggttccagggcctcccccaattccttcaaggtcgcctccggccgttccagccgtatgcgggccatctcctgaagactctcaggcagacccgaaagaccggcaacagactgaatgaaacggatgtcttctatctgtttcaccgcagctgacacagtcttattgatattggcagtctcgcagttgacctggcggtttacgctgcccctcatctccttgacaatgcggatattctccagctccataagggataccggggcctccatcacattaaggatgtccacaatctggctgccctccttgatatagaccacatagtacttcttcctgggcactattttggcctcgatatcaaaggtggcaatgatgttcttaagctgctccgcctttggctcggtgggacacacgatttcaaagtggtagaacttctccggggcgctgatggaaccggccgccaggaaggcgccacgtatgaaagcccgtctgcagcaggcattctgaagcaccacattccggatcagggaaagattttcaccaatttccccctgggaattgatgagcttcactgcctgcaggaccttgagggcttcctcatgttccctgactgctacgatgtatgtcctgctccgtccgggatttattccactgcgaatcgagacatcagttcttatattaaatgtttttttcaataatgtaaagtactttcttgcaactgccacattttccgtatggatttcaatccaaaaatggtctgaggctgatatctttacccttccgcacaggctcaggattgctgctgtctctgctatctggcagtggcgcgccccaggcatctgcctggacagctcgtcttttacgctggaagaaaatgacatgtccgctacttccttttattgtctttgtcgatgtccctgtgttctattttaatgccgtattcggccctggcagtcaggtgggcgcaaagggccctggcaaccgtcacggagcggtgcttgcctccggtacagccaactgccaccaccagctggttctttccttcattgatataattaggcaggaggaaatccatcatgtcatagagcttgtccagaaactgggcgcaggtgcctccctgcatcacataatcccggacagactggtcctcccctgtcagcaggcgcaggtcctccgaatagtagggattgggcagaaaacgcacgtcgaacaccaggtccgcatcctccggaatgccgtacttaaagccaaaggaaagaaccgtgacaaacatgttgcagtactcctggtgtttgaggaatatcttttccagctcctgccgcagctctctggtaaggagcttgctggtgtcaatgatgaagtccgcgtcctttttgagaaaagccagcttgaccctctccttttcaattcccttgtccagcctgcctgtcccggccaggggatggctgcggcgtgtttccttgtaccgcttaatcagaaccccgtcattggcatccaggaacagaatctggtaatccatccccagttccttccatccccttaaaacagcatccagctggctcagttcctcaccgctgcggatgtctatgcccagggcggcctggctgatgtcgctgccggccgctgccagctgggcaaatttatccaccagggatatgggcaggttatccacacagtaaaagcccaaatcctccagcattttcagtgcaattgtcttgcctgccccggacattccggttacaattacaagcttcatccatccacctcagttacgtaaaattagcattccaaatcagaattccccccagcgcttcacttccatctcaagctccacaccggattgttccatcaccgtctttctgatatgaccgcacagggccattacatcggacgcagtagcgtttccgccgttgatcacaaaaccgcagtgcttctccgataccctggcaccgcccatgacgtatcccctgaggccggcatcctcaatgagcttgcccgcaaagtatccctggggacgtttgaaggtactgcctgcgctgggatattccagaggctgtttctccctccgtctggctgccagttccttcatccgggcctcaacggcttcctggtcccccggttccagctgaaaggatgcctccagcaccgtatagcccctgtgtgggatacagctggtgcggtatcccagctccagctcatccacggaaagctccagcacctctccctcatttgtcatgaccctggctgatttgaggatattctttatctcagagccataggcccccgcgttcatcaccagggcaccgcctacgctgccgggtatgcctgcggcaaattccataccggtcaggcagtggtccagagccacacgggccacacggcccagcagttcacctgcccccgcacgtataacgcttccctctgccccggcataacaccagtttccttccatggcaatgaccacgcccttgattcccctgtcgctgaccaggagattgctgccattccccagtacgttccagggaatgtcatgttccctgcacatgcagatgacctttcccagctcatcttcattgccggggcatacataggcttcagccggccctccgatgcggaaggtggtgtggctgctcatgggttccatgaatcggcacactgcgccttctgatacaagcacctctttcaacatatgttccagattcaaaatacattcctcgcttacgactaattttcctggccctttcccaaattggcctgtacccggttgtacagctcctgggctgcattgtagcccatcttcttctggcggtagttgacggccgcggattccacgataatagccaggttgcgtcccggacggatgggaatggtatggcagaccacctggttgcctaaaaactcggtgtactggtcttccaggcccagcctgtcgtattccttatccttgctccagtcctccagcttgataaccatgtcaatggactgggtatccttaacgctctccacaccgaacagggtctttacatcaatgatgccgatgccccgcagttcgataaaatgcttggtgatgtcaggggcgcttcctatcagggtatcatcgctgaccctgcgtatctccaccacgtcatccgtcaccagacggtgtcccctcttaatcagttccagggcagcctcgctcttgccgatgccgctttctcccataatcagcacaccttcaccgaatacatcaatcagcacgccgtggatactgatacagggagccagctttacgttgagccagcggatgatttctgccatcagggcagaggtggtcttatcagacacaaggcagggaacgccatagtaattacagaattccaaaaggtcctcatccggctcctggtcgcggctgaacaccagacatggaatctggctggatgtgagcttatcgtacatccggcgcttctgctcctggtccatggtattaatatatgcctgctctacgtatccgatgatttgaacccgctccctgtcaaaatgatcaaagaatcccgtgagctgcagtgccggacggttcacatccggatgcgtcagcacaatcttgtccgtgtcaatctccggcgtggtgtttttaagcttcatcttcttgattaattccgatatggttactccatgcatgataatacccccttgacctggtttcgcttctcgtttaacttctatcatactatcataatttagttcggttgtcatgtatttttatcattgtgtttccataatttgggagttcgtttttgccccgtcatccgtgcctgcgctggtgccgggcttttcattggtctgtaaaacggcctggccaccggtcctgtcactttccttatccccatggaaaaagcggtatacggattcggccgacctgcggttcatttgcggcgtctgttccagttcttccacggaagcgcttctcaccgcctctatatccttaaaatggcgcataagggcctttctcctggccggcccaatccctggaatgtcgtccagtatggattttacctgcccctttcccctgaggctcctgtggtattcaatggcaaaacggtgggcttcatcctgaatcctggtgataagcctgaacccttcggagtgacggtcaatgggaatctccacattattatagtagagtcccctggttctgtggttatcatccttcaccataccgcagaccggtatggaaagccccagcttatcaaggacctccagggcaatgtttacctgtcctctgccgccgtccatcatgatcaggtccggaaacctggtaaaacttcccatgcttaaatcggcgcccttttccttcagctcctctgtctccctcataccgtgggaaaacctgcgcgtcagcacctcttccatagacgcatagtcattgggaccctggactgtcttgatgcggaattttctgtaatcgctgcgctttggcctgccgtcctcgtaaaccaccatagaacccacggactccacaccgcttgtattggagatatcgtacgcctccatgcgccggatgcccccgattccaataagctctccaatctggttgatggccccgatggtgcgaagctcctctttcttaatccgctccttatcctgggacagcaccagggctgcattcctggctgccagctccaccaggcgttccttctctccctttttcggaaccaccagccttaccttctgtccccgtttggcggacagccactggctgatgacctcctcatcccccaaaggatgctggagccacagttcccttggaataaatggtgtgcctgcatagaactgctttacaaagctgtccagaatctcgccctcattttccgccgtggcagccgatatatgaaaatggtccctgccaatcagcttgccctcccggatgaagaacacctgtaccaccgcgtctctctcatccctggccatggccacgatgtcccggtcctccatgccgctgctggtaatcttctgcttctgcgccacctgcttcacgctgtttagcagctcccggtactcaatagcccgctcaaactccagattgtccgaagcaatctgcattttttcctggaggttctttatgagagggtcgaatctgccgttcaaaaagtccagggcctggttaaagttggactggtattcctccctggaaatataaccctggcacggggcgtcacactgcttgatgtggtaattgagacacggccgctcctttcccgtatcctttggcagattccggttgcaggtcctgatccggtacaatttgtgtatcaaatccagggtgtcctttacagccccggcgctggtataaggaccaaagtaacggcttctgccgtccttcttcatgtccctggcaaacagaaggcggggaaaatcctcccccatggttgccttgatataaggatagcttttgtcatcctttaacatggtgttgtaccgcggcctgtgctccttaatcaggttgcactccagcaccagggcttccagctcggaatctgtcaggatatattcaaaccatgcaatatgggacaccatctgttcaattttggccgtcttattcctgctgctctggaaatactgcctgacccggttcttaaggctgatggccttgcccacatatataatctcatccctgtcattgtgcataagataaactcccggactggccgggagtttcttcagttcttcctctaaatcaaacaatacctgtcaccatccttttcatatggccctatattcagatgctttttcgttttccggcatgccgttttaccgggctgcgcctgccggcgggacagtctctggaggaacgttctctggcgggacagtctctgccggagcgttctctggcggggctgtctctgccggaaccttctctgcagcgtccctctctgtctccagcgccgccctggactgggatatacgctggtcctcttcctctgcttcctccggagtaagcagcccgccgtagtgataactgacccctgcatcccagagaatccactggtcatagcctgcatcgtagacagcctgtatctgctgcctcacctgttcatcgccatatttaatataatgttccagataggacgcagtaaagtcctgaagccacggccttaccacggcctgcggcgcatcctcctttgcggatgcggccagaagctccctggaaccattcaatgcatttaatattgtatcatacggctgggtatccggatactctattccaaaatttcccggcccgtagtgggatggataaatcatggggcatatataatccagctgctccgccatgtcctcatattcctggcccacggcagccgcatcctcctcgctgcgcataatggtgccgaatacatcggccgacacaaagagtccttcctttgccagctcatcatgggcatagcctatgaattccgtaatagcctgggtcttatcgcgtccctgggtatccgcgtcgtcaaaaacaacatcattcatggtcttgtccacggcaaaccggatatagtcgaactgaatctcgtcaaatcccgcttcgcctgcccttttccccacctcaatcagataatcccagacttccttcttataaggatttacccatgcaaggcctttattatcccggtaaatcttgccgtcagccacatgcaggctccactccggcttctgttctgcaagataggggtccctgaacgccaccaccctggctatggtatagattccatgctccttaagctttgccataagcgcaggcatgtcctggataaaaacctggcaggcccctatctcatttaccgtaggggaatccatggcataggtgatccttccctggtcatccttcacatcaatgaccactgcattgagctccgtcctgtcaacctcctcaatgatcttatccatcatatcaccggtaccggccacataggcggatacatagatgccctttacctttaccgggtttctgggcggatatgtggaaatggtaatgacctgggaatcagccgcctctgcctcctgggtctcctgcccgttctgggcccctgatgcctcagactgcacagactcctcctgggctctggtcatctcctttgccggttcataccgggaacatcctgtcattgcaaggattaatatgcctgccgctatccaccttttcatacgtaacctctgtctttcccaattatcttatgattcctggaaattcccatttccattcttaatctatatcaaaaaggcaaatgcctgtaagttcagtgaatcagacctaaacatccgttcgttcccactataataccatattctccctgttttgtatataaaatatgacttttttgttacaaattcattaatttctcccactttttgtaaatactcacatctccccaacatcaaaaagcgcccggacaggggctgtatgcctttgtccgggcgtgtgccgggccggccaggggccggaccgtgtttcttatagattcttatattctctcgtattttcttgatttaaatgtgtctaagcctctgccagatgtttctgaagggcagcccttacagcacccttgcctgcaatcagctcagagaaaatgctctccacatattcgcccagccctgcctcatacaggtccactccgaatatcttggcatcgcttaaaacaggctgaagcacttcgtgtacattgcacggctctcctacctttacgccctgcagcttctcagccagtccctcatacatggggtccgggcttacggcaaaggtattgccctcatcatctacccccagcaggtaacggcaccatcctgcctgaaccatgggtatgaacttaagggacttcacatccagctcaggccttgccatgtattccttaatggtctcaccgaaacggatggacagcttctgggatgtgtcgcaggcaattctctgtggcgtatcaggcataaaaggattgggcacgcggatctgcaatacctcgtcaataaacttcttaggagaaagaatgccgggatccgtaaccacaggaagaccttctttgtaaccgatgatttccaccagcttcaccaggtctgcgtccttcatctcctcgctgatcttggtgtagcccaggagacagccatatacagccagggtggtgtgaaggggattcaggcaggtgcacaccttcatgcgctccaccttttctacggtatccctggtagtaaacatgacgcctgcatgctccagcctggggcgtccgttggggaacgcatcctcaatcaccaggtattccgcttcctctgcattgacaaaaggagccacatatgtgttcttgctggtgacaatgctctctgtatctgtaaagcctgcctcctccagcatcttcttgacgctgtcatccggacgtggggtgattttgtcaatcatgctccacgggaaggaaacatgcgccggattctcaatatactccaggaatccgctgtcagcctttccgttctctgtccatgcctttgcataagcgtccacagccgcatacagcttatcgccgttgtgggaacagttatccatgctgaccagggccaacggagctgcgccatgggtatatctccagtaacacagggcggagagcttaccgatataactgtctgcctgttccggaccagcctcaaaatcagcctttacgtccgggcggaaggacccgtctgccgaagtgatgctgtagcccttttctgtgatggtgaagctgaccatctgcagggttttactggcaaaaatatcctttaaacagttccagtcctccgcatcctggcgatccacggtcagggactgggcaaggcttccaatcacagttttctcaatggttccattggctttcagtgtgaccaggaggcttaagtcatcctgaggcctgtatgcctttttgatgatttcatagtcataaccttctgccacgatgattccggtcttttcaacaccatcgttcagcagcttctgctgacacgctgcaggaaatgcgcggaagatattgcctgcaccgaaatgcacccactgcggacactctctggtagctgccttcatcgcttctctgtcaaattttggaagttctatttctgctgcttcccactcttccttattcctcagttcactgtctaataaatgcataaccattccctcctgtgtttgttgatttcatgatttaatattaccaccctgagggtgaataatccatatccctttttgttcaatacattgcaaaacttgctgtcagcaaccccgtgatttgtcaaaaacaatgagacctggttttaccgcatcaaaaaagaccagcatctgcgccggtctctcctcataactgctgaacctcaaaaaatactgcatcgtcactgaatcaccgctgatactgaatcaccgctgatacattggaattctctgtctggtcaaacaaatcatccccgttagccgccattgcatttaccaaaatcagcatcgccgcaagcatggcccacgcaaagccgcccagtaccttcctgactttcattctactctgcctcctggattcataagcctgataactgaaaattacatgcttaatttcactccgttatcccattatacaaacttttatgaaaaaagcaagtccttttcctcttacactgtcttacattttccttaaaagccctatatttcaatggattttactgaattagaatttttttccataaggggaaaacaacctgattccagcgttctttagatagattctaaggaaaatgaagggcaatgggcaatggattttgtccgcctgacatatgtccatcccctctccccttacggctaaaatggaatttttcaccttttttgtaggcaaattctgcatatccgggatatgagccatttttttaggtaaactgaaattaccttatttttctatctatataatatacacgtaagaaaagaggatacaccgtgattacatatgaacctttttggaacacgctcaagaattctgatgaatccacctataccttaatctataatcataacctgtcaagctccaccatagacagactccggaaaaacaagccgttaagcaccacaacgctcaatgacctctgccgcattctggactgcgacatcaatgacatcatatcctaccaacgttctgaaagtgaccagtttctttagaagggacacatactttccttcctccttacccggtttttggagatgatttgctccaggcctaattgccttggaccgctgcgctgcgaacagcaatggctgaagccatttctatcacagcatccatactgtccctggcatcatcctcccaaagttcatagaacacaccctcatgctcccaggaaaccagtataccgtggatatcggaattttccactgttttttggattgtcattttcaccagtttctctcctgcccaaacctcctgctgcagagtcccctcctcgtcaaggacgtagtattccgaggggccgcctcctgcctccagggaagcccaggccatggcatcagactgtgtgttttcatcatgaaactgaatctgtacggtatgctcatccttctgaattataacagggctgctgcataccgttacgtcatccggcagcttcagacgcagaacaggggcttttgcagcttcctgctccgggatatgctccgtggtatgctccgatgcagtcccttcctctgtttcaagctctgtctcatgccttgtttcatgcccgttctcataccctgtttcagactctgttccggactctgtgaccccgctcaccgcggtctgctgtcctgctgacacagatgtcgccgtctccttctgcgcacctgtgccgggcgagcacgcgccaaggccaaggcctgccgcagccgcggctgcggcaaaatataaaatgtatttcttttttctcatattgcagctccttttaacctgtttgtactttcggctcatttatgagcttaacgcctttgtacctttaaaagccatgaatctgttcgttctgtgtatctacagaataccatatttttatattacatgcctcatttttttattcgtaaattactccttccgcccaaagaagtccttatcaaaaaaagcctgcccgcaggcaccccgggcagacttaaaaattcatttaacaaactctttcttattcatatataaaaccgctgagttcatagacacttacagttccgcagcacttcccttttatccgcataccaggacggtcaccgtacacccttgtggtaaagacctccagtccattatttacaaatatttccagcgaagtggtgtctgaaaatatgcgcaggtccgtaagctgttccagtaaaacactgcgtcttgtcctgccgcttccgctgtttcccatgtccagggtcagcaggccattttgataggacaatgtgacatcatccctgatggtcaggcacatatcactgcaggactccatggataaacacgcctcgaacacaagtcctgtttccacacccttcccaagctcccaaaaatcataatctcttctgtcccggcgaagctccttcatttcctccagaggctgctgtaaaagacgtccttccctcatatgaaggaggcgcggcatggtaagggcatgctgccatccggcttttaccgtcggattggtatattctgcgtccggtattcccatccagcctatgagaatgcgccgcccctgctcgtccagaaaggtctgaggcgcataaaaatcaaagccccggtccaccattacgggaaactgcgaattcagcctgatggtattttccctaaaatcatagtccagacaaaagaccgtgcactgatgcacattctgatactctgttcccatgggcttcaccccctgggggcagcagaccaggcagagctggccgtccagacagaacaaatcagggcattcccacatatagccaaatgtttgttccgtcgtaattctattaaaatactcccaatttgttaaatccattgaccggtacacaaggaccattcccttgctcagggcatccctggcccccagtaccatatagtaatactccccttttttaaagaccttggggtcccttatgtgacagctcatgtcagccggataatccttgtggttcatgaccagttccttggcagaaaaatgatatccgtccctgcttgtaacatgaatggtattgctcacccggccgctcataatataatcgtaatcatccctgtcaaacagctttacattgcctgtgtaaaaataatggatggtcttatcctccacataagcagaaccggaatatacgccatgggcatccaggtcctggtccggaaaaagcgccggctcctcctgtttatagtgaatgaaatcccgtgtggtatagtgaccccagagcttaatctcccctgtgggctcaaagggtgtatactgataataaatatggtacagtccctgaaactggcagagcccattggggtcgttcagccagccggtttccggcatcaggtggtaggccaggcggctttcatccgccctgaccctttccctgtaatcccggttgtcccggtaccatgcttcatagtcctccctgaggaccttctcatatttcttcaagctgcttcctcctcaccactgctttcttcaggcggcattcttctcaccactgctttcttcaggcggctttctccctacctgcgcagcatgtttatgccgtcttaactgtcttaaccgctttcaccgccaggtccccgctgtccgcctgtccgccaggatatacggtcacatccagatttccgccctcaggcagaatcatcatagtctgcggattcattcccttttcccgaatcaaatccaggtcagcggcaataagcttatggcccttctttaccttatccccctgtgccacaaaggcctcaaatccctgcccatccagctgtactgtattgattccgatatgaatgagcacttccacgcctgtctcagatgtaattcccaccgcatgctttgtcggaaacagcaggcttatggtgccgtcgcacggagcacataccatgccctcagccggattgatggccacgccgtcccccagggccttggatgcaaaaacctcatctgcggactgtcccacatccaggacctgccctttcatggggacataaagttcagtgatgatttcccgggactgctctattacctgtggcatttcgatttttcgggatatttccacgtccgaggctgtttccgttccctcagccctgcctgcatcctttttctccgggccgtcctccctgccaagagcaaactttttccagaacaccatggtaagggcaaaggaaacgcccatggacaaaatgattccaatggcaaaattcatatagtggtcaggcttcatggagataaagcccggaagtcctgccgcgcccaatgcctgagccagtgtcttggtggctgccagataagcgcttcctgccgccgatccggccatggctgcatagaatggatacttcagtttcaatgtcacaccaaacatggctggttccgtaatgcctaacaaggcagaaataccggatgcagagcagatggacttcatcttgtcattctttgtcataagaagcactgccaggaccgcggcgccctgggccacattgttcatgctggctgttgagaaaatgaagcttccgcctgtatgggcgctgtcggccagcagctgtgtctcaatggcaataaagctgtggtgcatgccggtcatggtaataggagcatatgcaaatccaaagagtgctccgcccacaggtcccagagtattatagagccatgtgatgcctgaggccagcagattgccggcttccctcagcacaggtcccacgcagataaaggtcaggaaagaagttaccaggatggataaaagtggggttgtcagattatccagccaggacggcgtaaccttgtgaagccgtttctcgatattggccagaatccaggagacagccagaacaggaagaacagttccctgatatccgatggcagctatctgaaaaccaaagatgtcccatacaggaggctgtgccagaccaatctggtatgcgttcagtaaatccggatggaccataatcatgcccatggccgcccctaaaaacgcatttcctccaaactttctggttgcgctgaatccaatcagtaccggcagaaaggtaaagggtgcgtttgcaaaggtgttgatggccgaagccagtccctgccacatggggtacagctcaatcattgactgcccgtttacaagcggggacgtcagaaggttgttaagtcccataagaagaccgcctgccacaatagcgggaatgatgggcacgaaaatgtcactgagcatcttgatgaaacgctggaccacatttcccttccccttttctttttcctccggcttttcctccaatgttcccagctgcttctgtgcttcatcgcagaccatattcacaataccggaaccaaatatgatctggaactgggattgtgtgagaaacactccctttaccccttccaggtcactgattgcctcctcgtttcgcagcccgttatccctgagctgaaaacgaagtctggtggcacaatgggtaactgacttaatattgttttttccgcctacgtacttgatgaccagacttgccgtctttgcataatccatcatattccttcccctcttcttactatgatttccctttgctttttggtatcggttccataactatataatagggcattcagcccttaatgtcaatgttttattggcaccggttccatttttgagtgtaaaaaaatcgtctctgaatttgtgcacttttcacatatcttcttctatttctccctgcatgcttaaaaatcactttgttctttgacgctgtgaccttctatcattgtgtaatccactatctgcttttttggcaccggttcccgatgtatcatcttaagtatggtttcagcccccagataacccagaccataggaatcaaaacgcagggtggtcaggtccggctttaacagagtgctttcatcatatccgccaaatcctgccacggaaacatcctcgggaatccttaatcctctctcccccaaaacatggtacgcgccaaaagctaggcggtccgtggcacatatgattgcatctaccggaccctggtccatcatttcctcagccatgcggattccgctggcatagctgtaatccccggcagccgtgaccacatccttaatgccccattctttcaggccgtccatcacgccctgcttgcggttgatacccacggccacatccagggcagacactcccatatacccaacccgggccggacgggcctttgccacacggactcccatggcctttcctgccccgtaatcatcgtggacaatggaaattcccccgtcatagtcctgtgccaacaccaccacaggcacagggcttccctgtatcagcttacggtgcgcctctgttatggtaatggcgctcagtatgatgccgtccaccttcagcgtaatcagtctctgaatattcttaagctccaggtccacactgtggtccgaatccttaatcagcgtttcatacccctgttccctcaggtagcgtccgatgctggtcaccacacggctggacacctttgaattcagggtgggaaggaccactccaatcacattgctttccttggcctttaacctggcaaatgtattgggttcataattatactcccttatgatttcctgtatccgttccctggtggactctcttacactgcctccgttaaaatatctggacaccgtactcttggtaacccctgccatattggcaatatcatccatggtaatctttcctgatgacatatccatcccttcactttcatttgctgtgattatactgattgcagcggaagcataacagacgcagactcccagtacgccctgcaaagcgggtattgacagctgcgtctgcttccctgttatctcttgtgtattagtatatcaaaaccgcggcgttctgtcctctattatcataaaataactgcactgtgccacattaccccggtctgttttcataccacacctcagacaatctggcttccgaagggcatcagggccagtttcgccagcttgaactgctgcagcccaaagggtatgcccacgatggtaatacaaagcagtactccgatgatggctgactcaatggccaggggcaaaccggaaaccagcagccagataatattcagaagcagggacgccgctcccccgccgtagaccacttcctttccaaagggaaagaaactcaggcccgcaaacttaaaacactgcagtcccaccggtattcctatgatcgttatgcaccacaggcagcctgtcaggagccaggataagccgcttatacatccgccgaatataaaccataatacatttccaagacatcccatataccttacctaccttcctgttctgtttccagtgtctgcctcatctcctggagacgtttcctgataccgctcacctgacgtctggcttccctgacctggttcagagcatcccctattttagactgcaccatccagtcagctatgacaccggcaaaaaagtaatcggcaaaggtcagaaaacttcccacatccatctttaaatccccggtcaggtttacatccagcaattctctctttaatctgcgcagatgtccccttgcctcattcatggctgcctgggcctcatccatccggttatgcttaaacatggtgctgaaaaatccgccgcccagcatatcccagattccccaactgcttgccttctgcagcagttcctccgccttttgcaggctcatggaagccatatctgctgccattaatgcctcactgatttcctgttgtctgctttttctctccattcttttctcctttctgcgataaacaataccttgctgttgtgcgaggcaggtattaccgccagctttgcatcagagaaaaaaagacctttatggtggctggctccctgccacaataaaagtcttgcacatttcattttatacgggtgcctccggcaccgagatgacgatttaaaatccaccttctggtggttcgctactcccttttattggaactgattatagcatgctgtatgatgaatgtcaaataccatatgctgaagaatctattacatttttcttagctgttttcttagcggccttcttagctgtcttctcagcggccttctcagcggccttcttccgtcagtgcattacaattgttttccttgatgcactcccaagtcgtcgttccatagcaaatgaatgtgtgatataatttactaaatcaaatcggaaacagaggaggtcaaaaagtgaaaacaattgggctgattggcggaatgagttgggaaagtacagtttcatactaccagattataaatgaggaagttaaaagacggcttggcggacttcattctgcaaaggttattctttacagtgtggaatttgacgagatcgaaaaatgtcagtctgacggtgactggaaaaagagtggtgacatactgggaacggcagctaaaagcttagaagctgcaggtgcggacttcattctgatctgcacaaatacaatgcacaaggtagttcctcaaatcgaatccatgatacagattccgattatacatatagcggatgccgccgcacaagagcttctggcatgtcagattcggaaagtgggcttgttgggcacaaaatatacgatgacacaggatttttataagcagaggttaattgacagaggtatagacgttatcaccccggatgccgcggatattgatattgtgaatgatattatcttccatgaactctgcgtaggtaatatcagggaagaatcccgcagacaattccaggtagtcattgataatttaaaggcaaagggagcccatggtgttatccttggctgtactgaaatcgggcttcttatacatcagaccgattcttcactgcctgtttttgataccaccgtgatacacgcaaaacaggccgttgaactggcattagaggtctagtttcctttatttaaaattaaatctgatggtttagacaatgaagcaaaccggcaaagcggaggatataaaacaatggacaactggtttacaatagataaaacagactcaaatacctacattatcagtgaataccggcattgggaggaaacgcactgctatttgctgaacggaagggaacgaagcttgcttattgacacaggacttggtatttcaaacatatttgatgaggtcgtaaaactcacggacaagcccattacggcagttgcaacgcatattcattgggatcatattggaggacacaaatattttccggatttttacgctcatgctgaagaattggactggctgaatggcaagttccctttatccatagaaacaattaaagagatggttgctgaccgctgcaatttacctgacggctttgatgtaaacgattatgagttttttcagggggtgccgtcaaaggttctgactgatcatgatataattgaccttggcgggaggcaggttgaagtgtttcatacgccgggacattcaccgggacatttgtgtttttgggagaaagatacagggtatttatttacaggcgatttggtttacaaggatatactctttgcctattatccatctaccgacccggaggcatatcttaattcactaaaaaagctttcttccctgccggtaaagaaagtatttcctgcccatcattcactggatatacagccggaaatcttatttcgtatgcgaaaagcatttgagcagcttgaagcagacggaaaacttcatcatggcagcggcacatttaactatggcgactggggagtatggttgtaagtctcccccagccgtgttgtaacttcccatgccaaataatcaatggtgctgcctcacagagcgcaaatctatacatcttcccataaacaacaaatgcgaatggcctaagccattcgcaagtttcataattagtatatacagaaaaatctctattccatgtactctcttcaatggagcatacgggattcgaacccgtgacctccacactgccagtgtggcgcgctcccagctgcgctaatgccccgacactcgtagataataccataaatccgcaggaaaatcaagtactatttttccaattattcatacttattgaaaattcgtaaataaaaactcatctttcccacgtttaatccttaaggaattttattcttaatttagctcctgctcaaacttttgtcacaatttccatgtatactcttatccataacaaggaattactccttttgatatagatttctctcatacttagccggcatggttccttcatgccggctcctctcatattcagacatttgccacttatctttcacctgaaacatccaaagaatactgttttttccctttatccccttattaacggcattttcacacattttctctgccagcatattatacgttagaagccagacaagcttctataaataaatctggaaaggatgtgtattatatggcttatccaaaagttcatattgtcaactctacgaatttcagtgtgaaagggaaggtgaaatatgcctctgccttttgttctgatgataactatgagatagctccatgggggagctggaccgctggcagccgaggggtctgccttcttacagaagtgtcggctactgtccacaccccaggccaggatgccaaagcaactccctatgaatcttccggaacatcctacagtcaatttgccgtactgcagacagctcccggaaaattcaccatgacccgtattgtgacctaagtcaaatgccggcgcggcccacgccgtgccggcccccaattatctgctgtaaatacaaagatgatgttgtactgtttcttctgccatcaataacaataactgtgatatctggtcctcagatattctcccctgccctgtctgcctcctgactgccagaccacattgcccggcaggatgctcccattttccagaagccactttgcattggcccaattgcttgctgtgggctcgcggtaataatttccgtctctggtgcaggagtactgccctggtgcaaataccacgcctttgatggtgttgggaaaccggccatgattcacccggttcaacaccactgagcccaccaaaagctgctcatcatccggacagttctgcgcctctccgcagattacatgagccagaatataaaggtcctcttctgaataagaagggcgccgtatctcaatgcctgagagatattttgtttctatatatgcatgtcctgcctctgttgttatcatggaccaatcaccgtattcacccaaaacctcaaaggatgtgttcagaaatgcctggtccaaaacaactgcccctgtgctgggttccttataaatattgattccatcctggttagcaaacttaattgtcttatgggctgcctcctgaagagcggttttgaattcacccgccacactcttggcggcgagtaccatatctgtcccgttttcctctgcctgcactgtcatgggcactgccagtgataaggtcagagccatggcccccaatataacgattcgtttcatatttactccttaaaatgtttgaactgcttgagccggttacttgccaactgcccatggtaatggttctctattatattctgtcccaaaattagcaatccaaacatatttaaggtaatgaatggaaaaaaggccgccaccatgtgacggcccggcctattcgcgtatcagccaccggcctgcttcccgcaataatatatcccttttgttctccatgactccttctaccacctggtccgccagcttagacagggtgcttccaatggagcttcccggtgtataaccaatctgtatcaaatcacttccattaatatccaaatccttaatgtgaaactgcccggtctgctccaccacctcatccagaagggcttccaaacggtggattctggccagccgttctgccagacaggcaggattctggccgcttacatcacaccggcgtacctccagcagccgccggaactgtttttctcccagacggtccagccatgttctgatgcttcgtctcttttcgtgaaggtcagagtcgtggtatcttaccagctctaccaccgtatcaatggtttcttcatcgaatttcagccgtttcattacctgattcgtaatcctggcgcttacagggccatgtccatagaaatgccctctgccgtcctcatcctcagtatagcattccggttttccgatatcatgaaacagtatggtcaatgccacaacaggatcatctcctgccgctctgagggccgctgcggtatgctgccacacatcgtagacatgataaggattattctgttgaaacccgcacatggtctttaattcgggaaccacagtaaacaggatatgctgccagttgtccatttccaggttctggccttgtgtaaactcccatcctcttaattccaattcctttataatgcaggccgcggatattggtatatcatgattacagttcaccttttaccaccctctcatttacactggctgcaaagtcattgatcttcctgatatccggttcttccggcagcgatgtattcttccgggcataatccagacgcttttcatattcatctaccatctcaaaaaattccggaacaggctgccggttctcatccagataccggccatttctgatatccataagaaggtcgtgttccttttcacggtaagtcacaatctgttccttttccagaatatccaggcacatcatgtacaggcggatcagatgcatcatatgcttacccagtttaccatgctctatggcattctggtttctctttcccacctttgcatatgattttacaatgctctgcatctctgaccacaggcatttataatccctgagcggataatgcctcagggtaatgtccataaatatctcactatcatattcttccttaagagcttttccaatatacagcttaacactgtccccaggcatataaaaataccggttcttccagtcaaaggaagcatgttctatggttttcagtatatgtctctcattatccgtctgttccacaagccgggccgccttgttatccagtctgcgcagctgctggtttgcatatcctccaaaggaataaaccgctctctgggataagaataagtgggcatggtctaacagctccctgcccactggtgctatatgcaaataatggtcttctctgccgcccagcatttctatggtatttggattacaattggtcagcaatggaatcagcttgcggaatgcatagatagtggtatcggtgtgcggatccgttacctgcccaaaatcctcatgaatcagaatttccctcttgctgttcagggcacatcctcgaatatccagatcgctggtttccatgctggttccataggcatggcttcctcccaatgtcaataggatgatgtgatggcccaggtgttcatccgttcttaagaaatcatattcactggactgcagcctttcttttatttgtcctaaggtcatacaatactcctttttcagtatcatttatgccattatagcaggactggtggatgaaagcaaaccaattaggacctgtttgcaaaagatatgtgcacacaggtaagaattatttagaaatttgattatggttaaaagcgaaacgagtacccgcaccggcacccaatctctcctgtattataaagctcgcccttcaggcgctttatatgagccttttttccacatagcggacatacaaaatccgcctccccatacccaccggtgctctgcaatgcctgcagggatgcccttatgaaacaatataaattttcaatggtcatctcctgttccaggttgattccgcaacactcctccattcgtatacctcctgcctgttttatcatgatgccggggatttgcttaaccctcattggctcctgcggcagctgccggcctgcggcgccatgccctgcggtgccatgccctacggcgcattcaccttcaaaatccgcgcctcaggaataccctctttgagaatactgctacgtaaatgcatgctgtaatcctgacggcagcggcgcagattcctttgaaaaatccaggaaggacacgctgtaaaacccgttctcttccccgtctgcggcctgggccttatgccagatatccagcgccttctgaaccgttatttctatatcatgataataatagaggttagcgctggtatgggtcacaacgtccgcaatcaaaagtctggcatcatggttctcaaataaaacttcattcagattgtcctttgtgattttcatgtggctgcctcctgtcttatataggtttttataagttccggcctggtagactcaacagactctgtatagtgagtttatcttcttgaatccgccgaaaagaacatatgttcttttatatattatatgatatcacaaacatatgttcgtgtcaagacataatacagcactcatcgcttgcaggaatgtcccagttaaaccatgaatcaatcatacatggccaaccatgcacatatattgtaaaaacatatcataagaggcttttatgcaaaccataacccagcatattctgacagaccagatggattaccaggacaccgttgtgcttaactgccagattcgttacccacaattgaacgcttcctgcaatcaggaagcgatacaggccataaaccaatactatgtcacacaggcaaatgaaaaagcaaggtactgccgcagcgtattatatccccaggcggccgaggaggcaaattacagccgcgtccgcaatgttccattttttccatatgaatttaatataagctatgtggtgacatataaccaggactgtattttcagtcttttttcggaacagtatacctttacaggcggagctcacggatccaccctgcggacatctgagacctgggatgcccaatccggcagaaaaatgacgctcagcgacttttatcaaaacaatccgtcttatatccaggatatccagaattggatacagtttgagattgcagagaggctgaaagccaatcccggtacctattttgacaactaccaggaactcctgcgcaattccttccatccggagaatttttatttgacaccaggcgggatcgtcatttactaccaacagtatgatattgccccttattccagcggcataccggaattcctgctgccctttgatgcagatacttctaatgtataacgaatccctcaccatccaaatgggagtaccgccatgatgacgatacccccattttttggttttccctgtattttccttatctgcctttctgactctcacaggtcccgcgttctctgccccgctgcggctgcatctgaccctatttcatcagcaggcaaggctcccgctgaatccggcgcctctctaactgctcacagcttcaaatctcatacgctgtctgatttccggatactttgccctgtccacctcagaaaaaaacatttcagccggcctggcaaaggttccaaactccccgtacagcgcctgatagatgaccaggagctctcctgtctccgtatgatgggccatgtccctgaccacatagagatatcggttcgtctttttttcctctgccgataatgtttccctcttaaaatgtctgacaattgtgccaggtccgattcccgtgtgttcattctgtctgttcatccttattcccctgtcctgtattattttgttctccctttggattaaataccataccggaagctgcccgttcatgcaaggacttatctctttttactgcaatctcctgtcaaatcatagctttcacctatcatccgtttgatatcctcatccgggacactcccatccaaaaccaccgtattccagtgctttttattcaaatgataccctggccgcacaccggaataggccttgcgccaaaattcaatccattcaggcgcacatttcagattaatgcagacctgtccctcccgccggtatatccaggcaaatacccgcttattgccccggtggcgtatgacagtccattcatggtccctgaagggatagtcctcatatacatctttataggtaagacaatatgtaattaaatcgctctttgtctccatccgccctcactcctttatcaatcacaccatggttatatccattctccgcttcatcccccaaaacagacagttcctcatggagccagctttataatcctagattataccagatttaactccataaaaccatcccgtaaaacacagttcggttaatgtgcagataatgttatggaatcatgcctgagacagcatccgaaataacgtttgaaataataccttcataaagccatggagcgtgccggaggactgtttcctccgtctccacgctccaggccgcattttttgcttaataccaccgcaccatgggcagttcattgtttacacccttgctcaccagtatctgatgaaggtcaatgactccattgtggaatgttgccgcgcaggagcacaaatacaaatcccacatgcggacaaattcctcgtcgaacatgtcctttatttccttttcatgttccttgaaattcttttcccagcacagcaatgtcttgttgtaatggtttctcaggttctccacatccaaaatatgaaagtcatgttccgccattagggatatgatttccctgagactggggatgaccccgcccggaaatatatatttctttatccatggatcccctgcgtgctccttctggctgctgataaaatggagcaggaatacgccgcccggattcagcaccttgtccacacagtccatgaacctgccgtaattttcccttcccacatgctccaccatgcccacgctgaccacacggtcaaatttcatgccgctttggggtaaatccctgtagtccatgagccggacatccagcagatgttccagcccttcctcctcaatgcgctttttaaagccgtcatactgctccgtactgagggtaatgccggttcccctggctccgtattccctggccgccctgattaagagaaatccccatccgcagcccacatccagaaggctcatgccctcttccagcgccagcttcttcagaatataatctgttttattcacctgggcctcatagagggtatcattttctgtcttaaaataaccgcaggagtagttcatggtttcgtccagccaaagcctgtaaaaatcattgccgatatcgtagtgggaggacacctccatcttctggttttttctggaattagagggatgaaggagctttctcagatgcaggcggttgacggaaaaacggtccatctgccccaggaaatggtccagggcctcatacagactcccctccacctccagcttgcccttcatataggcttctcccaaggccagggaggtgctgtccatcagcttcttcaccggtatggtttccctgatgtcaacagcaaacatagggttgccgtgacctacccggtcttcgtggtccttccattttaccagaaagggataatcggtaaatcggttcagaaattgaaccattgccttctcttctaacatactggtatcacacatcctttcttccagtattatccccttctggaaatagaatattcgcagcacggtccaaactgttgcaaatacacacataaaaccccggagagcctaagccctccggggtccatcatttataacatattcaaatctgacgtaagattagtcgttgccgtacagtgtaaccagcttctctaagtaagcgtaacgctccttagcctctgcctcgttacgtgcgaacagctcggctgctctctcaggattcttcatagccagggacatgtaacgaacctcgccctttaagaagtcctgataggtctcaagcttaggagccttggaatccagggagaacttcttctcagctgccgggttgtaacggaagttgttccagtaaccgcactctacagccagcttctcctctgtctgagccttgtccatacccttcttgataccatggttgatacatggagcgtatgcaataatcagggatggtcccggataagcctctgcctctgcaattgccttaacagtctgagccatatcagcgcccatacaaatctgtgcaacatacacatagccatagctcatggcaatgcttgcaaggtctttcttcttaacgtccttgccgcctgcagcgaactgtgcaacagcacctgtcttggtagccttggaggactggccgcctgtattggagtaaacctcggtatcgtataccatgatgttgatgtccttaccggatgccagcacgtggtctacaccgccgaagccgatatcgtaagcccatccgtcaccgccgaatacccactgtgacttcttagccaggaaatctttattcttaacaatgtctctgcagacatcgcagtcaacgccgtccagaactgcaaccagcttatcggtagcagtgccgttcagagcgccggtgccaaatgtatcaagccactccttgcaggctgccttcatctcgtcagtagccttctcgttagccattacgctctcaaccttagcctttaagccgtctctgattgcgttctgagccagcagcataccgtaaccaaactctgcattatcctcaaacagggagttgtcccatgcaggaccctgtcccttggcatttacggtgtaaggtgtggatggtgaggagttgccccagatggaggaacatcctgttgcgttggcaatgtacattctgtcgccaaacagctgggtaatcagttttgcataaggagtctcgccgcatcctgcgcaagcgccggagaattcaagcagaggctgtctgaactggctgcccttaacggtgttctctttgaacttagccagaacctcttccttaacaggcagggactgaccaaagtcaaagatagcctgctcgccaaggttagcctcaaggctttccataaccagagccttgttgcccttcatgcctgggcatacatttgcacaggaaccgcatccggtacaatccagagcggaaacagagatggcaaacttatagccggccatgcctgtcatatccttcatcttcatgtctgcaggtgcctttgcagcctcgtcagcagtcatggcaaccggacggataacagcgtgaggacatacatatgcacagaagttacactggatacagttgtccggattccatacaggaaccttaacagcgataccgcgcttctcatatgcggaggaaccggatggtgtggaaccatctgcatactctgtaaatgcggatacaggcagggagtttccttcctgagcacttacctttgtctggatattgttaacgaagtcaactacatcctttcttccctgggttacaactgcatagtcaaggccttcgtcttcacagttcttccagctctccggaacctctaccttgtgcatgcccttagcgcctgcgtcgatagctgcccagttcttctgaacaacgtcctctcccttacggccgtaggttgcctttgcagcagccttcattaactcgtttgccttctcagcaggaatgatgccggtcagctcaaagaatgcggactgaaggatggtgttgatacgtgttgggcccatgcctgtctcaataccaatctttacaccgtcgatggtgtagaagttgatgttgtggtcagcgatgaacttcttaacctgtccaggaagatgcttctcaagtccttccatatcccatgggcagtttaacaggaatgtaccgccgtcaaccagctcctgaaccatgttgtacttgcgtacatatgcaggattgtggcaggcaacgaaattagctgtacggattaaataggtagacttgattgggctgtgtccgaaacgcaggtgggacatggtaacgccgcctgatttcttggagtcataatcaaagtatgcctgtgcatacatgtctgtattgtcaccgatgatcttgatggagttcttgtttgcaccaactgtaccgtcagcgcccagaccccagaacttacagttcgtggttccctcaggagtagtaactaaaggagcgccaatctctaaggacaggtttgtaacgtcatccacgatacctacggtaaatggagacttggttgtattctcgtaaactgccacgatctgagcaggtgtggtatccttggaacccaagccgtaacgtccggttaaaaccttaacctggtcaaacttgcttcccttaagggcagcaacaacatccaggtacagaggctcgccgatagcgcctggctcttttgttctgtctaatacggagataaccttaacggtatcaggaatggcgtcaatcagggcctgtacgcagaatggcctgtacagacgaaccttaacaacaccaaccttctgtccctgcttcaccatgtagtcgatggtctcttcgatggtgtcattgacagagcccatggagatgatgatgtgctcagcatcagcagcgccgtagtagttgaacagcttatagtcagtaccaatcttggcattaaccttgtccatatattcctgaacaattgcaggaagagcgtcatagtatgggttgcaggcttctcttgcctggaagaagatatcagggttctgagcagagcctctctggcatggatgatttggattcagtgcatgcttgcggaaagcatctacagcgtccatgtcaaccatttccttaaggtcctcataatcccaggtctcaatcttctgaatctcatgggatgtacggaaaccgtcgaagaagttgatgaatggtaccttgcccttgatggatgccatatgtgcaacaactgtcaggtccattacttcctgtacactggactcgcacagcatagcgcatccggtctgacggcatgcgtaaacgtcggaatggtcaccgaaaatagataatgcatggctagcaagagcacgtgcggatacgttgaatacacctggaagctgctcgcccgcgattttataaagattagggatcatcagtaacagaccctgtgacgctgtgtaggtggtggtcagagcacctgctgccagagaaccgtgtacagcacctgctgcacctgcctcagactgcatctctgtaatctgtacttcacgaccgaagatattggttcttccgtctgttgcccattcgtctgtggcttcagccataggtgaggatggggtaatcggatagatagccgctacatcagtaaatgcgtatgacgcatgcgctgctgcatggttgccatccatggttttcatttttcttgccattttgatttcctcctacaaatagtgaatatgtaatggtatacatgtgagtctgccccggacccgggcatgtacaaacatgcttcgaccctatgcagactgacctgtctactattatagcaattatttaacaaattgcaaatgcttaatcgtaattacgccaaaaaatacaatgtcaatttttgaaaacatgaaaagcgccgcaaaaaaagagaaaccattgatgccggtttctcttttcctgtctgcttttttattctggtttcagcggtgcaatcaccggattatctccgccaggtccggctgcctcagtctcagacggctgcggggcctgggttggattcggtgccgctgcaggcgctgtggtgggcgctgccggctgggtcactgtgccgggaccgctctccggggagccgtttccggaaggcgcggtgattgtctcatcacccggaatatagccgtccggcattccgtcaatggttggcgttgttgtctctgtggaaagggtggtctcctcaggcggcagcaccacgcccgtggtgttgcggcggataacgggggcatggcctttgtatgtggtcttatggtcctgttccctggaaacctcttttccgtccttatataataccttgtaggtgatccatctgcttcccttgctgccggcgctcttctgaatctccactcccggctcaagggtctggtcctcttcatatgtaggtgccggcggatccagctcctccactttctcggataccaaatccagctttgttccctcctccagaatcggaataccgtaaatggataccgtcatcttctggtccgcgtagctggccttgatgccgatggatgtgctggatgtgttcttgaagcggaaatccggctgttcccagctcaccgtggcgtcctggcccggtgtgatatagttgggctcaaaggtgtgggagcgcctgaaggtaatgctctcctctcccagtccggacctgtatactgcgttgtacagggtggtggatacctggcatacacctccgccaatctcctgcaccacctctccgttgttataggcggctgctccctggtagccctttgcctctgtcctctgtcccacggctgcgttaaaggagaattcctctcccggatgcaccacggttccgttcagagcctctgaagccaacctgatattggtatttcgggccttgttggctgttgtctttgtggtgaaggtgctgatggtcttatatttttccttggcagcggcagcgctgatatccggggctgtctcacttcccgtggctgtgatggaagcgtcaaacttcttatctttcagggcctttaatatgtctgctgccagcttttcctggtcaatggcaaacccactctcttccccggcgaacacaaaggcgcccttttccttgtcatagctgtcgatggaaccgtttttggcctttttattccatttggccgcgcagttttccgcctcccccgcagctgcctcttccagtccgtccatgttcagtgtgtaactctcagccggttccccgctgtagatttcatccagcagcgcgtctaccttttccgccgcaagattcgtcacattatatgtatctccgtcataggtaactgtcatatcccagggatattccttaagtattgcattcctggcctggtttttggacatgccggtgatggtgatcccatccaccttgacttccttcatcatctctgtctcggttgtctcttccacagaatgatccggttcgcttccaccggctcctttccatttcatggccagcgatatgccggctatgaggataataagaataactccggctatggcaatctttttataatccggccccttctttctcctgtgagggctgttgcgcctggctgtctgggccgcgttcatcctgccggcctgtccgccggaacgataggaataagaacttcttgaaccgctgcctgacgaactgcttctgcctgtattcctggacgttccccgtcccgtacctttatctgaacccctgccgcggcttctgcctgctgaggaacttcttctgttctgattattctctaactgattcattctattcacctgtcatctctgcctatggatttattcacaagttgtagtataacatactttatgtaaaatggaaccgtcttttttgtttttttcaggccaattttacttattgtgaatttcatgttactatatataaagtaagtattattaaattattaaaaatcaattacaagccttttcaaggtctttacatcttacgattcggaggtcacatcatgtcttacgttgatttacatgtccactcaaatgcatccgacggcaccctgtcacctgagcaggtggtccgcctggcccatgaggccggactttcagccatcgcccttacggaccacgataccacggccggcgttgccggcgccgcggaggccggggcagaactggggctggaggtggtgcccggcatcgaggtatccagcagtttcagggaccacgaaatccatatactgggacttttcgtggacactgattcgccctcccttcaggctgcgttaaaggaattccgccatcacagagaccagcgcaaccaggagatgctggggcgttttgatgcccacggcatccaccttaccgccaatgaactgtgcgccgggaaccctgatacggtcatcaccagggcccatgtggcaagagcccttctggcaaagggtctggggcctgatttggaccatatttttaagaaatatctgcaatacggaggcacatactgcccgcccaaggaatttttgcctcccgaggcggtcatggaagccctcttggacagccatgcctttgtggccctggcccatcctttccagtacaagctgggggacaaggccacggaggagctcatcgcctatctggcaggcctgggcatgaaaggcctggaggtatatcactcctcccacaaccgcctggaaagcgccaagctccaggaaatggccgcgcgccaccatctgctctccacaggcggttccgactttcatggcagcaataaaccagatatttccatagggacgggccggggcggcctgcgggtctcctccctgctgttagatgcgataaaaaaccccctttaatccctgtatttttatgaaaattcataattgcccttcccctgcccttctgctataatcatatatgttaaaaaattaaccagccttttccatttcaggaaaatgcatacaaacacaggaggatatgccatgaagattcagaatatcacagacgtagaaaagtttttctctgtcattgaccagtgcaggggaaccgtggagcttgtatctccggaaggcgaccgcatcaatctgaaatctaaattagcccagtatctgtctatggccaccatcttctccaatggatatatcaaggaattagacctggttgctcatgagaaggaagacatcgagcgtttaatcaaatatatgtatcagggagaataagcctaagataaaagcctggaataacagccgggaatacagacaaaggcaaagcccggaaccatctgacaggttccgggcttttttggtatctcttttttattatctctgttttgtagtattcacccaatgattctctcgtatcatttccggtctttactcctgctgcccctggtccccgtctttctcaccagccggtccgcaggcatcctcacagacagctgttcctccgcctttctttcccaggcgggtattgaccccgtcccgtaaaagggcatacagcacggaacacagcggaatgaatatgagcattcccacaatccccatcatgctaccgcccacggtcacggccaccagcacccatatggaaggaagccccaccgaatttcccaccacataaggatatatgaggtttccctctatctgctgcagtacaaagaaggtaatcgtaaaaatcagtgcatccatgggatttaccatgagcatcaaaaacacgcccactgccagtcccacaaacgctccgaaaataggaatcagggctgtaaatgcaatcagcaccccaatcagcagtgcatagggcaggcgtataacggtcagtaccacaaaaaacatggttcccagaatcacggcctccgcgcactgtcctgtgagaaaatgggagaaggtacgctctgtaagggctgtgatatccaggatccgccctaccgccggttccggcaaaaaggcctccagcaccttctttatctgccgtcccagtgtctctttctgcaaaagtatatagatggcaaagataaatccaatgaggaatgaggatacgccgctgacaatggagacagctgccgaaaaagtggtgttaagcatagttcctgctccgctctttaaaaacgcaaccatgttctggaacacttcctgccagttcacttccatctggttcatatattccaatatctggggattactggcaaatatacgctccgcctcatcgcgcacccctgcaaagaataccgggatactgctttgaagattcataaaggtctttaccagctgaggcgccaccacaaagatgaccagaaacagaccgcctgtaaccaggaggatggtcaccaccaggctgacaggccgtctcagcctgctgccctgcccaaacacggtcaaatgcctctcgatattgcgcatgggcacgttcagtatgaacgctatggctgcccccagaataaagggccagacaatatgcatcaatccggccgccacatccaccagacgtctgtaattgattcctgcaaccacaattaccacggtaaaaacgataagtcctctgatttttttcattgtatcgctgtttaattccatcgtaccatcctttatagttctgtctcttccaggaacgctgcctcaatggcttcccgcgctgcccggaaggtgccctgggccatgaggctgctgcctccgccccttccgctcagacggctgttcatggctttgctgagcgcgcgcatgtccatccggctgctgccaagagcatagtgatattcgctgtccctgtcattcccggaacacacagcagccaccccggccttgttctgttcatagagaagggtcgcatactggcggacctgaatcggagttaaatcctcctcaaatacaatgaggggctctgtgctctccgggaactgtcccgccttcagggccagcaggctgctgcccagcttcccaatcaggtaatccttgtcctggctgtcacttttaagcttttccactgcatccggcacctggacgagcttggctgacagcaggttggatatcctggcttcatccttcagcctgtccctgtaatccaggagagccctgcgtccgcacagcatggacagtcgaacgccgcccttgtaatgaatcatgcttcttatcttaatgatgcccacttctccggtgttttctacatgtgtgccgcagcatgcacatacatctgcgccaggcacctccacaatgcgcaccaagccggacagttctttcttgcttctgtactccatggtcctgagttcatcctcagagggatagagcaccgttacagggacattggcatagaccagctgattggcctcatcctccagccaatccagatcctccggctcaatgatgccgttaaagtccaccgtcacttcctcagcccccatgtgaaagcccacgttatcatatccaaagtgtttgtgcaccagaccggacagtatatgctccccggtgtgcagctgcatgttgtcataccgcctctgccagtctatgattccctccgccagggtcccctcctctatgggctgcgccagttcatggattacctgttcccccttctcatggacagataccacggaaatcccgtttaaggttcctgtatcatagggctgtccccctccttcaggataaaaaccggtctggttcagagtcaccagccaggttcctttcccgctctcctcacagtgctccactgtgcacatgaacgattttacataagggatctggtaatataatctgcttttgtccattcttaaagcctcttttctttttcatctgccggagcgtattcttccttctattatcagaaaacggtccgcgcagtatcgtgtctgccgacattatactatataacccggccttgtaccaacaaaaattttctaaattttatcaaattgtggaaacatgagcaagcagggcttcatatgatacagtgtaattaaactttatatggaggaattaacatgagtgatgtagcagcaacaaactgcggttgtgactgtggatgcggatgtggaacaggaggcagcggatgcggatgtaatatcatctggcttatcctgattctgtgctgctgtggaggcggcggtggcttcggacatagcgactgcggtggcggttgtggctgtgggtgcagctgtggaggcggatgcggagatatgatttggctcatcttaatcctgtgctgctgtggcggcggtggcggcggcttctgctgctaattcccacctctaagaaatccttcaccaaagaatcaaaggaacagggagtgcttcatcactccctgttttttcttgcagggaagccgggcttatttgccggcctcacctgtctctccggatgaaaaagcacttttcgtcccccggttcttacctccatacccctttcttccctgtctctgctttaagcattcctcatctatttcatatactgcatttccatctataatcaaacggctgtacatggatttcactctccttccatacttataatatatgcagtgtccaggctttggctcattgtgccggaaaataagtggcatgtaacaggctcctcccgcataaattggaagcaaagaaagaaaaggctggtggaaatacatgaatccatctgatgactataaactaaccgacctggactatctcataggcgaccaccatctgcagatgattaaggcctccctgccctacctgggcgttcccgaacaaaaggccatctccctgtttgtcaaggtccaggaactgcgaaagacagtggagctatttgagactgaagaggtggcatccatgggcatctgctccctggaacgtccccagggaaacggctccatgcgcgatttgttaaaggccattcgtccatatgggaatcccatggagcaggatatgattgacatggccgaaaccctgatggaaggccagactcccatggaccagctgcgcaggttcctgacaccggagcagcaatcgcgttttgagaccatggaaatgatattcactgccatgcaggctatggcctgatacggccattcactgaatcccttaacagaaaggactacataattatggataacagctggaaacaagaccccaggctcaaggccatgaacaaagataaactggccatgctcaccgaatttgcggagcggattgaacattcagacaaaaacaacatgatggaggcattcatggccatcaacatggaagcccggcaaaagggcgtacagtttaacgacagggagacagaccttctggtcaacatcctcagttccaggatgcctccctcagagaaaaagaaaattgatttattaaaaatgctttcaaaaaaaatggcagggccgcgctgatagcgccccctgcctctgccttatgaaattgttttaatagaattattttatggaattagtttaaccgctccaaatccggcgcaatcacaatcttagtgtgctctgtggctgactgcaccagctccttggcccgttcctggggcaggcggatacagcccgcggatccgttatccctggcagcggtaaagcagtgaagaaagatggcagagcccttcccgggctcgcatgcttcattgtaattcaatgccagggcgtaattgtagtacggggacgctgccgccatattctctgcggagttccaggtctttgcaacctgcgatgtattgaccagcttgttataatagggactggctgaatcatccacccagtagtcgccttttgtgatcttatggtatggcaggacgctgcccggattttccctgagcccaaaagccatggtaaatccatatgtaccggagggcgtgctgccgtccccctctgtcttctggtccgtaattccgttccttcctacgatgcctgcttccttccagaccatctcccaggcttcacctgacttcttataataatatacatctgcgctacagccgccggttcccactaccaccaccagctggtccgcatcctttgctccttccagattctggggctgtatgaccccattctccactgcagccttcttttcctcaggctctgcttttgaagcagcaggtacccccggcccctgttctgccggattcacagctgtccccgcgcctgcactgccggcagccatggccgtaataccgcccgctgccattatggctcctgacagaacaaacgctgccgctgccctgcctattttatgacacttcccattcatttccatcgttcttctttcatgtctcatggccgtcacctccatatcctgttttgtccatttcctattataacctgctatagcaggaaatgttatttcttttttcttacatttcccggtatggacacggctccaaagcccagcgcaaaaatgcctgcccagcccatgtgctgcaggctgcgcaggcattttgtcttcccgcttatatgcgggaatctgatttatttacatacaatattgacaatctttccaggcacgtagatctcctttaccacattgcctgtcagcttttccttcacagcttcccgtcccgcggcaatggcatcttccttggagctgtctgcgctgatgctgataacggcccgtgtctttccgttaatctggacagccacctcgatctcatcgtccttcatggcctcctcatcgcattccggccactgtgcatggaacacgctgtcgtcaccgcctaactgctgccacagctcctctccgatatggggagcaaagggtgccagaagaatcacgaaggtcttaagggtctccctgtcgattccgccttccttcctggccagctcaatcagcttattgttgtactccatgaaaccggaaataacagtattgaggctgaactggttgaagcggtattcaatgtcatataccagcttatggcgcagctttatcatttctttggacgccttcacatccttatccttgttgtccatcaccaggttccagaaacggttcaggaaacgcgatacgccctcaatgccccggtcatcccactctgcgtccagctccggcggtcccacgaacagctcgtaaagccttaaggaatcgcaaccgtaatccctcaccaaatcatcgggagaaaccacattgcccttggatttgctcatcttaatgccgttctttccggtaatcataccctggttgaacagcttcttgaaaggctcatcaaaatcaatagcgccgatatcacacaggaacttggtgtagaaacgtgagtacagcagatggagcaccgcgtgttccacgccgccgatatacatatccaccggaagatacttgtccgccttttccctggataccagctcttccttgttgtggctgtccacatagcgcaggaagtaccaggaggaaccggcccactggggcatggtgtttgtctctctcttggcaggagcgccgcagacagggcaggtggtgttgacccattcgtcaatggcagccagaggtgactcgccggttcctgtgggctggtagctctccacctcaggaagctttaagggcagctggtcctcaggcacaggcacacagccgcacttgggacaatggatgatggggataggctcgccccagtaacgctggcgtgagaatacccagtctctcagcttgtagttgaccgtcttatggccaaagcccttttcctctatcatgtgaggcgcttcctttttaaggacagcggactccaggccgttccaatcaccggaattaatcatgatgccgttggcctcggtatacgcctcggtcatgttctcaatttccttgccgtcctttgcgattacctgtacaatgggcaggccgaacttcctggcaaactcaaagtccctgtcgtcatgggcaggcacgcacatgatggcgccggtaccgtaatcagccagtacgtaatcagacagccagataggcgtctttgcaccgtttaacggattaactgcatagcttccggtaaacacgccggtcttttccttggcctgcatacggtccacattggaacgcatggaagaatcgaatatatatttttcaacggcctcccttgtctcatcggtggccaggctcttggccagggcatgctccggcgccagcaccatgaaggtggctccgtaaagggtgtccggcctggtggtgtacacggtaatcttctcttcccgcccgtcaatggggaaatccacctctgcgccgtatgacttgccgatccagtcagtctgcatcttcttaaccttctcaggccagtccagcttatccaggtcatttaacagacgctctgcgtaagcagtaattttaagcatccactggcgcagattcttcttggtaactgtggtgccgcagcgctcgcagcatccgttgaccacttcctcgtttgccagtccggtcttacaggaaggacaccagttaatggggaattccttctcataagccaggcccttcttaaacatctggacaaagatccactgggtccatttataaaagtccgggtccgtggtgttcacttccatatcccagtcataaattgccgcaatctgtttgatctggcgcttgatattcctgatgttcgcctctgtggacttagccgggtgcacgcccatcttgatagcgtagttctcagccggaaggccgaaggcatcccatcccatgggatgaatgacatactttccctttaacagctgatacctgctccagacatctgaaatcacatatcctctccagtgtcctacgtgaaggccgctgcctgaggggtatgggaacatatccagacagtaatacttttccttcctgccatcgttcacattgatgggcttctcttcccagttctcacgccactttttctcaatggcgctgtggttgtactgtgttgccataatctcattcctccattggttatctaaggggatgattcccctttatccagacagcatacctgctgcgcgcagttttctgtgaaacaaaaaagcctgcgcctctattgctagagacgcaaggcttaaaaatccccgcgcggtaccactctggttcatgctgtctgacgcatgcacttaatcctcttataacggtaaggtctccgtcctgtcctactggttcccggtcccccgtttccggcggcccttcctcgttggggcaggctactccagggccagttcaacaaccatccatcaccggctttcaccagccgccggctctctgcatccatccggttatctactcttccctatctgcgtatttgcactgattcttaatttaacatatttcccaaacagtgtcaactgttaccagacaaaaaatcccctgccgcgatctctgaccaggccgccttataggctgtcttggagcgttttgtctccctggaccgtctcaccggtctggctgccctggcccatttggccggcgtctcatggcgtgagggctttgccggtccctgggtcctggcctcatccgtaaacatgacgcagtatccatccaggtccctgatccaccccttctcaaaccatccatactgggtgcccccaaaaccgtataccgcatcctcattcagatacgctgccggctttccgtcaaacaggtagatatgttccccgtcactgtcaatatacgctgccggcgtcccgtttctgtcatacaatgtcatacttccattctccccatttatttccattttctgctgccgtgtatgcccgcagcggatctattatactactgcgctgtcccggattcaatgagtttcttaacataattctaacggccccttctcttgcctttccgtttgtccttatgttaagctaaaatatatatgttaacataaataacggacaacaggaggtaatttattgaatcagaagctaaaagaaaaaatcacagaatccttatcatctgtgctgcccgttacctgcattgtattaatccttgggatcaccatcactcccattcccctggacccgctgatgctgtttctggcaggggccgccttccttattataggaatgggattcttcaccctgggagtggatatggctatgatgcccattggagaaaaggtaggtgcgcagctggccaaggcaaaaaagcttccggtcatcgtcattgcatgtgtcatcataggcgccatggtcacagtggccgaaccggacctgcaggtcctggccagacagacaccggcagtgccggacatggtgctcatcctggcagtagctgcaggagtcggtttcttcctggcacttgcatttcttcgctccctcttcggctggagcctttcccacattcttctggtctgctacatcattctcttcatcctggccttctatattccaggtgattttctggctgtagcctttgattccggcggtgtgacaacaggtcctgttacagttccctttatcatggccctgggcgtgggactgtcttccatcggccaggggaaaaacgcggacagcgacagctttggactggtatccctttgttccattggccccattctctctgtcatgatactcggacttttgttccagtcatcttccggcgcctatgagcccatgaccattccatccatcagcaattcccaggacctttggctggccttccagagcgaacttccccactacgcggcggaagtattcacggccctgtttcccatcctggcttttttcctgctcttccagatattcttcctgaagatgcgcaaacgccaggtggtgaaaatcctggtgggaatgctgtattcctatatcgggctgacgctgtttcttacaggcgtaaatgtgggctttatgccagccggaagctatctgggaaaacagatggcctccctgccctatcgctggattctggtgcccgtggccatgctcatcggttattacatcgtcaaggcagagcctgccgtacaggtgctcaacaagcaggtagcggatgtgaccggcggaagcatatctgaaaagaccatgatgaccggactttccatcggcatggccctgtcgctgggattctccttattccgggtcatcacaggactgccgctcatggccttcctgctgccgggttacgcccttgccctgggtctctcctttgtggtgcccccggtctttacctccattgcctttgactcaggaggcgttgcctccggtcccatgacagccacctttctccttccgctgtgcatgggggcctgcgaagccctgggaggcaatattctgactgacgcctttggcatcgtggccatggtagccatgacccctctcattatcatccagctcatcggactgtcctttgagcttaaaacccgcagggagaaagctgtttccagacatcctgtggtggatatggaacaggaattcatcaatttagaggaggaaccttatgagccataaaagtataaagctggcagccgccatcgtaaaccgcggggccgggaacagggcagctgccatattccatacatacaaccatgaaatactgctggctgtcaggggacacggcacagccagctcggcagtcatggactgtctgggactggatgagcctgaaaaggacctggttctgggactttcatccaagaccggcgccgaccgtctgctccgtgcccttggcagggaaatggaattttgcaagcccggacacggcattgctttcaccctttccctcacaggcattagtttcgctgccatggacattttaagccggcacgaagaccaaacagggccaaacagccgcccagcagaacacaaggaggatattcccatgacaaattcccattcctatgaattaattgcttccgtcatccacacagacctgtccgcgcctgttatggaggccgccagaaaggccggctgtcagggcggcaccctgataaaagccagggaaataggcagcgatgccggcaaaaagctgttcggcatgaccctttcccaggaaaaagccatactgctgattctgacccccaccagcttaagggctcccatcctgaagtccatatgcgagaccgtaatgaaggagaccggagaacacgcagtggcaatttccctgcccgtggatgcagtggagggactgaccggctgatgctggcagaaaaaaccgctttctttttggaatgaatcctttataataaatactatcaaaggaaagcaggtgcatcgcaatgtacattggtgatttacatatccattcccgctactccagggccaccagcaaggagcttacgccggagcacctggacttatgggcggggaaaaaaggaattaacattgtaggtacgggtgattttactcatccggcctggagggcggagctggctgaaaagctggagcccgccgagccgggtctttacatgcttaaaaaggaatattccttacagcgcccgtccatacttggccagagcaggccccgttttgttatcagcggggaaatcagctccatttacaagaaaaacggccgtgtgcgcaaggtacacagccttatcctcctgcccagcctggaagcagccgaagtgctttccaggcggctggaagccatcggcaacatacattcggacggacgccccatcctgggattggactgtcacgatcttttggccataacactggaggcatgcccggatgccatctatgttccggcccacatctggaccccgcatttttcactgttcggggcattttccggttttgataccattgaagagtgctatgaggagctgactccccagattcatgccctggagacaggactgtcctctgatcccgccatgaacgggaggctgtcagcccttgactcctttcagctcatctccaactctgacgcccactctcccgccaagctgggcagggaggccagcctgtttgacattcccatgtcctatgcggggctctacggcgccatacagaggggcgagggccttaaaggcaccattgaattctttcctgaggagggcaaatatcattttgacggccaccggaaatgccatctctgcctcagtccctcccaggccaggaaatacaacggcatatgtcctgtctgcggcagaaaactgaccacaggcgtacttcaccggattgaacagctggctgaccgggacgaggatttcctgctgccccagggacgtccctttgaaaacctggtgcccctgggcgaggtcattgcctcctcagtgggttcctccccgtccagcgtaaaggtttccaggcagtacgaacacctgctggaggaactgggcaatgaattttatattcttcgccaggccccgctggaggatatcagccatgcggccggctccctgacagcagagggcatacgccatctgagagacggcaaggtccagtggagacccggctatgacggcgagtacgggaccatgcggctgttccagtcagccgagcttgacaatgtggagggacagctgtgcatgacctttgagacagcgaacgcggacctgagcgaaaccatgggacctgggacccctggagccccggggggaacgggggatgcggagctggcagcagatgcggttccttcggcaaatactgcattgtccggcaaagccggcgtttcccacggctcaacggcttcccgtgaagcttcctatgaaacagccgtatcaaatatcctgactgtttccaatccctcctctgccctgaaccgggaccagcagcaggccgtggaatccgtattcccggtaacagccgtcatagccggtccgggtacaggcaaaacaaagactctggtgtcgcgcatcgaacaccttatgggtgagcggggcgtaaaaccttctgagattacggccgtcacctttacaaacaaggcagcggacgagctgacacagagaatccgccaggcactgccaggcaggcgcagcctgaaccagatgcaggtcggaaccttccattccctctgctaccggctgttagcccggtccggaacagagctgtccctggcagaccagggacaggcggaagaatgcgcaggagaaaccatagaagccctggaactcgcctgcaccgtcaggcagtttctcaccgccatctctctgcataaggcagggctgtcctccgcgcagggctttgccgcctatatggccgatgattccgccgcggaaaccggctttatcctgacgcaggaaggggcagaccggtaccagcaggcgctggagtgcaggaagcttatggacttcgacgacctgcttctcaacatgctgcgccttcttgaacaggaacagaaagcagaatacaggaagcagcatttttcttatctgctggtggatgaattccaggatatcagcccggtccagtaccggctcatcaaggcatggaataaaggcgggcgggaactctttgtcatcggtgacccggaccagtccatctacggcttccggggttctgacagccgctgcttcgacctgctggaacaggattttccgggaaccagcaccatacggcttaccaccggctaccgctccaccccggagatactctccgcctcccttcctctcatctcccgcaatccgggcggtgagcgcagactctcagccgcccgtccccacggcggtccggtgcgtctggtgacagcacagaccagcctgtcggagtccatcttcattgccaaagaaatcaaccgcatggtgggcggaatcgacatgctggatgcccacagccagacccccggcctgctggatactgccagaagctttgccgatatcgccgtcctctaccgcaccaatcaccaggcccgcctgctggaacaatgcctgcaaaaagagggaatcccttatgtggtagcgggaagggaggattatctggaccatccggctgtccagggcaccatctcctttttcggggccctgcttaaatcttcggggttagatgaagataccacgaaactctgcagaaaacgcatttccccttccgcagattacagcagcctggcagagcgcttcctgccaagactaaaaagagacaggccctggaaacttctggcggactggatttcatgcctggggctggggtcagacaagtccatggacacctttgtctgcatgtcctatttccacaaaaccatggaggatatgctgagcacactggcctttggacaggcccacgatctgaaacgaagcggtcaggattcccgcccctccgatgcagtgacgcttatgaccctgcatgcttccaagggcctggaatttcccgtggtctttctctatggcttaagacagggaatcctcccccttaaaacaggaaagggagctgtgaatccggaggaggaacgccgccttatgtatgtgggtatgacaagggccagggacgaattaattctcaccacctcagaggaaccttccccattcttagaggagcttcccaaagatgcctgccgccgggaaaaggcccggactcccggcagcgggatgaagcagctgagtctctttgatttcatgtaagatttttaaaaccgggcatttgccgcggtattttccctctcaatacaaaaagacctgacgcacgccatagatggggcatcaggtcttttcacatattcacatatatcaggaaaccggaatggcagtaccgggcatcctatctctcggacataggcacataatccatattgtcgcctacgtacttggtggccggacgcataatacggccgtcatacagcttattctcaatattatgggccacccagcccacaacgcggctgcacacaaacagaggtgtgtataaatcccttggaatccgcagcataccgtatgcaaacccgctgtagaaatccacattggtgggaagggccttgcccttgatttcctccattacttccttggcaatacgctcaaagcgcatatagaagtccagctccctggtatgcttctgttccttggccacctccatgcagcaggcccttaagacctctgcacggggatcggacaccgtgtagacagcatggccgaaaccgtatacaaggccggaacggtcatagagttctcctgccatcagcttctccactgcctgacggatcttcttatcgtctgcatcatagccgccggtttcagccagcaccgcatccatcatctctgccaccttgatattggcgccgccgtggcgcggtcccttaagggagccgataccgccgcataccgtggaatagatgtctgtgcccgtggatgcaatcacaacattggtaaaggtggagttgttgccgccgccgtgatccgcatgaagcatcagtatggtatccagcagattcgcttccttggaggtgaatttctggtcctttctcagtaggcttaggaaattctcggcaatggaatattccggatttgcataatggatgaacaggctttccctgtcataataatgcaccttgctctgataagcgtagcaggcaatggagggcagctttgccaacaggttaacacccttgaccagggtctggtatacatcaatattgtccggatcgtcatcgtaattatacagggtaaggaccgcgtcctgaagcttattcatcagattcttaccgggaaggcgcagcaggttcatttccacgaactcatccggaatggtgtagcagtgcctcaccacattacagaacttttccagttcagctttcttcggcagatatccgaacagcaggaggaaacaggtttcctcatacccgaaatggctctccttcttcccctttaccaggtccagtacatccacgccccggtagagaagccgtccgggaatggccttgattcctccgtctgtctcctcatatcccactacgtcggccaccctggtaaggcctatccgcacaccggttccgtcctcattcctgaggcccttctttacattgtactctttataccatttattaggaatatccgtgtaattctgcgacttcccataaaactgtgcaagaaaactctccttaaccatgtacccatgctcctttctcaaatacccccatcagtgtctgcccctgttatagttaatcagacagccggcctttacgatttcccgctcctctgccgtcatatccgcaatatacaaatccagggttcttatgctgctgccctcttttcccagcacataagccttaatatcctttaaatccccgtccagggctttccttacgcccggaacataaatataatctcctacctcgaagcagggagcctcctccatctggaagggaaccatgccccagttcatcacattggagcggtaacgcttggtggcgtattccttacagatattggccaggcctccgatgactctctggcagctggctgcctgttccctggcagatccgtcgccaggttttacagcataaatcatgctgcccacttccgtgtcctgaaccgtcacattctcattgccttcaatgccgcggatggcgtcaaagagcttctccaaaacaggctccagctccacttccttggccgcgccctcctttgttctggctttttccagcttatccacttccttggcccttcccacatactccgggtcccttctggacaaagtgaattctgccagtcccaggggattggaccggtaagatgaagtctcgccggaaggaatcagctcatcggtggtggtcacagggtccatgattttggaacataccttcaggagaatattgtctgccagaggactcatctccggccagtccttgatattcggtccgtagaccagctccttttccccgtcgcctttgttgtaacccatgtatacccggttcttataggaaatgtcgtcaaattcatactcaggcacattgtcccagccctcaagctcccatgcggaggtaagccttcctccgttggctgccgtggctgcaatggaacgcgcgtccatcagggcaaccgcggccatctggccgttgcctggtttggatccttccctgttggggaaatttctggtggtatggcggatactcagaccgttgttgcagggcgtatcgcctgcgccgaagcaggggccgcagaacgcagtccgtataatggcgcctgcgtccatcaggtcggacacagcccccttcttcaccaggtccgcaaagacaggctgagaagacgggtatactgccagggagaactcgtcgcagccgcagttctttccctttaatacacgggcagcttccattacgtttgaataggtgcctcctgcgcagccagcgataactgcctgctgaaccatgagctggcccccctcaatcttatccctcagggtaaaggacgcctttccgcccgataccttggcagcctctgcttccaccatgcccagtatatcgtccaggttggccttaaactcgtcaatctcgtatgtattgctgggatggaagggaagggcaatcatgggctttaccgtggacagatccacgtatacgcagccgtcatagtatgccacatccgcgggagccagttccttataatcttcctccctgtggtgcttggccagataggccctggtgtcactgtccgtcttccatatagatgacaggcaggtggtctctgtggtcatgacgtccacaccattgcggtaatcggttgtcatggaagccacgcccggccccacgaactccatcaccttattctttacatatccgttcttaaacacggctccgatgatagccagggcaatatcctggggaccggttcccggccggggcgcgccgtccagataaacggctacaacgcccggatatgccacatcatatgtatccttaagaagctgcttcaccagctccccgccgccttcacctatggccatggttcccagggctccgtaacgggtatggctgtcggaaccaagtatcattctgccgcatcctgccatcatctccctcatgtactgatgaatgaccgcaatatgcggaggaacatagatgcccccatatttcttagccgcagacaggccgaacatgtggtcatcctcattgatggtccctcccaccgcgcacagagtattgtggcaatttgtcaatacataaggaatcgggaacgtctccatgcccgaagccttggctgtctgtacaatacccacgaaggtgatgtcatgggatgccatgctgtcaaaccgcagcttcagatgttccatgtcgccggatgtgttgtgggcctccagaatggagtaggcaatggtccctttcctggcggatgcctggtcagcatccctgccggtcagtttctttacctttccgctctctgattccggtacgatttcagtgccgttaaccagataaataccgctgtcatacaatgataccatttcattacctcctggtgtctgattttatgaaaaagggctcggcttggatttttgcctgcccccttacattcgttggttattactataaaacaaaaaaattgatttgtccagtatttttattgtagttaccacagcttttaaattgtggttcgtattaagtctgacatatcttttactgtcacatgctaatactttatcacatcaaagcactcgtgtaaatcaccaatttaatataaacaaaccgcagcatatgacaaaatagacaatcatccccacattcaaaaacgctgtctgaaaagctctcccctttctcaggggccactgtcccggctgaaaggtaatctggcgccggtacataatgataagagtaatggctgcaatgagacaggccagcatgaaaaacagatatgccagtatcatgatggaggaaaacgctgtcaccagccaccccatgtcaactcccaaaatagattcaatctgccggatcatccacggtccctctgccagtccctgggccccctttgacagttccacggtgatgacgccgcccaacaggttgaacagcatatgaaaccctatggtgtatctcaccttccctgtctttgcatacacgtaggcccagagaattcctatgccaaaggcataaaagaactgggaaaaattaccgtgggccatgccgaacataatgccggatatgatgattgccgttttctgtccatatcccagcagccggtccatgaccagcttcctgaaaaaaagctcctccaccacaggggccataatgaccgttgtcagcagattgacccacaggctggaatttctgataagctggtccaattcagcggaatcagggcctgatggctgtaaaagccctaccagcctgcccagaatatttcctgccagcccgattcccactgcaatgacaaagaaggacgcgaatttccagaatccccactgctccttctggggcgccccgcactttggcacaagctggagcagtcctgccaccgccggaaaggccaccaggtacatgggcagggacgacataagcatacgccccgaaaatccatagaaatcaataaaatcacccagcagagaattaagcagctccaccaggaccatgaccactacctgggctgccagggtaagcagcatgaaggccgcagcagccagccccacatgtgagaactgcttcctctggcgcctctccatggcagctgcctgccgcgggtcctgcggcgaatcaggctgcgggctatgctgcgggtcctgctgcgaatcaggctgggggctgtgctgcgaagcctgcatctgcggggcaggctcccaggcccttccccggttttcattatcgtatatcataggccacatccagtctccttcatcaaacttatcatacatcgcggctctggttctgtatgtcacaccgcactgtatgggaactgccaaaagacagtccttttttagtgttgcaattgcaacaaaaaagtattatgatattagatatcataccataaaagatagcagggtaaaagaaacatgacagaatattttcagaaaaatctatttaaagacatttccattgatgagtataaaaaactgctctcctgcctggacggaagaacaaaacagtttaaggctggcgagaccatatgcgattacgatgaaggctttcatgaaatcggcatcatcggcaaaggcactgcctccgttgtccgctatgaatacaacggagccagaaccatcctggaacgcctgggtccccaggacatcttcggccatctgctttcctacgagggcagcgaacatgccggtatcagcgttgtctgtgacagcccctgtgacattctcttcatccactacgccaccatcggttctccctgtaccaggtcctgcgcccaccatcaccagctgacccaaaatctgctggacctgatttcggagcgggccttaaacttaagccgcagggtggaggttctgtcccagcgcaccatccgcgaaaagctcatatgttacttcatgcagctggccgctcaggccaaagcctcttccttcagccttccctttaccatggttgacctggccgattacctttccattgaccgcagcgccatgacaagggagctgaaacgaatgaaggaggaagggctgattgagatggacaagcgctgtgtccgcctattcctttaatctgtcttcaaactgccgggcgctcatagggcgcccgaaataatatccctgtatatattccattcccaattcccttacagcctcatactcctctttcgtctccacgccctccaggcataccttcctgcccacatcatggcacaagtcggtgatggatcggataaaggtagcattaaagaggtctgaggtgatccccttcacaaatcccctgtctatcttcaccacatccacggggatacttttcagtgaaaacaaagacgaataccccaccccgaaatcatccatggcaatttttaccccaagttccttcatctgtgcaatcaggcgcagggtgtcctcctctgcctttgccaggtatgtctcggtcagttccataatgagtctggacggcgccaggctgttttcctccagcaccgtcctgaggaaggaaataaaattcccctgggtaagctggatataagacagattcacactaatctggaaatccggctttgaccggctccattccaggcactgggccatactatgactcagtatccactgtccaaaaggaatgattaagccgctctgctccatcaaagggataaactcgccgggagaaacatccccgtatttgctgcagtgccatctggcaagagcctcagctccgcagagcctgcccgacaatgtgtctacctggggctgataatggatggtgaatcctgcaaagccgcgctccacgctctcccgcaaaagctccatcagctccagccgccgctccctgtcagccaggatatccctggaaaacacggtcatccggttctttcccatcattttggagtattccagagaatagttggcgctcttaaggagctccagataattactcccatcctcaggataaccagcataccccgccgacagggtacagaagtatttccttcccccgtactcctgctgcctgcagaaattctgctgaagcttaccatatatgcgggcagcttcttttgcatccccttccaggaggaggatgccgaattcatccccatccagccgatagagcatggcattgggcggaagcatggatgccgccttctgggccgtaatccgcaggacctcatccccaaaagaacggtcgtacagatcattgatatttttaaaggaatccatgtccagcaccataaggccgatggaatccatacttttgcggcctgccaggtatttcttgatatttccctcaaattcgtatttgttgtacaggccggtcatatggtcaatctggttttttttgcccagattactaatcatgccggcaaacagctccggctgcccgtccttatctctgagcatcttcccccggcaccgcagccatatccattcccctctcacattcctggcccggtattctatattatgataatcctctcttccgtccgctatactctgattgctctccagaaaataggcttcatcatgaggatgaatcagctgcccccaaaatgcggctgcctccctgaccgtctgccccggcagtccgaattcctccaccatggcctggggatagcggaacaccccggttttcatatttcccacaaaaatataatcatccgtgctggctgacagcgcttcatagaggcttccgccggcataatcaaaagtctcatccccgctctcaggtttctcttcaagcctgcgcttggcacgatctatatgatatcctctcttctgtatatacatctgctcatccgcccgggatatgatgtcctccaccgatcccatttcccccggatagacctctgcgattccgtagctgaaagagacatcatactccttgagcaggcgttctcgttcctgacctgccctggttaagagccgcttcatgctttcgtctgccgcgttcatatcacgcccataaaataccatgacaaactcatcaccgctgagacggtacatgaaatccagccttccaaggcactccttggctatggatgccacgtactgaagaagcttgtccccctcgctgtgtccataccggtcattgaccgatttcagctcattgatatcatacagtaccacggtcactatctggttctcacggctcccctgctccagggcccgtataaggcgttcgctgcctcccctgcggtttagcatgcgcgtcagctcatcggtgcgggctgtctctgaaatctggtcatattccgtcatatccacagaattctgtatgtggtaaagcttccccttccactgaatcaggctgtcataattcctgtattttctgccggtcacagaattggtctcgcgccagacacagattttattgtcctccatctgttccagctgcctgattttacagtaagggcaccggcccttcatgtccttttgcagcacctgccaacagacacagccttccggccttataagcccgaaggtttctttcatggttttattcatataaaggatttcatctgtttctacatccgttatatagaaattggtgtccatctggtccaaaacagctgccaggaatgaatccttaaatgagttttgctgttcttccatctcaaaaaatcctctttactatatttcaaagctctctctttattgtaaactctttccagattatgtacaaggggggaaatcaaataaaaagacgcctccttccaggttttatccggaaagaggcgccagcgcacaccttattcttcaacaacagagaacatatcttttccaaccccgcagagaggacatacccaatcatccggaatatcctcaaatgcagttcccggctcgattccgccgtccggatcgcctacctcagggtcatatatccatccacatggatcacatacatattttttcattatcatttcctccttaaattattatatcatttatcttggttttgaatcatttcctttgatgtcattactatatcataaacattcctatttttctgtgacatttgcaacataaaaatgattttttgatataatatttaatttgccacatattccggaaaacatgcatggaaaaacagctgcccaaacttactccgggcagctgtggcatttacttttattcgccgtccttagctgcagcccttgcctctatctcacgtttctgtacatcgccgggagcctgctcataacggctgaattcataggaataatcgcccagaccgcctgtcatggagcgaaggtctgtattatatccaaaaagttcagacataggaatatccgcctcaatgacctgcttgccgttgtgattggaattcatgcccagcacgcgtcctcttctgcggtttaaatcgcccatgacatcgcctgtaaacttatccggaacagttaccttaagggaggcaatgggttcaaggagcacgggatttgcttccataaagccctgcttaaaggcaaggatggtggccatcttaaatgccatctccgaggaatccaccgggtgataagaaccatccaaaagagtggcctttaagcccacaaccggatatcctgccacaggtccctttaatacgcattcctgcagtcccttctcaacagccgggaagtagttccttggcacggaaccgccgaataccttttcctcaaatacatacggtgtctccaaatcgccggatggctcaaattccatgatgacatcgccatactgtccgtgtccgccggactgtttcttatgcttgccctgtacctttactttcttgcgcagggtctcgcggaatgcaaacttaggctggcttaaggtcacatccaccttatagcggctctgcagcttgctgattaccacatccagctgctgatcgcctatgccgtataacagggcctgacggttctcagcgtcgttgaccaccttaagggttaaatcttcttccatcatcttagccagagccgtggataccttgtcatcctcgcccttgttcacagccttatatgccatgtatgtgtatggtgtggaggtctggggcttatggtatacaatgggtgccgtgcgcacagccatggtatcgccggtctgggtcacagtcagctttgcaacagctccgatgtcgcctgctttcagctcctgcacctcaatctgatccttgccacgcaggatatagagtttgccgatcttttcctcagtatccttattcacattgtacaccaccgtgtcgcccttaagggtaccggtacaaattttcatcagtgagtacttgccgatgaatgggtccacaatggtcttgaataccctggcggacagggatacatcgtcgttgtacttggctgtaaagcgctcgcccgtggaaacatccacgccgatacactcaaaatggtcaggtgacgggaagtatttgtcaatggcctgcagcaggaccttaaagccctggcagttaatgccggaccccatcatgacaggaacgatgtccccttcaataacatgggtcctcagcgcggtggaaatctcctcctgggtaaactcttctccaaggaaataacgctccatatattcttcactggtctcggcaacggcttcaatgagggcgtccctggcaatggtcaggtttttctggacataatcaggaatctcacactcctcataatcacttaaatgagtgaaacggcgtccgcccatctttaccacattgacgaaacctacgaacttttcattttcacggattggcagctggaacggggcaatcttacgtccgaacttagtctccagcttaaccacaagctcacgatagctggcatggtcatcgtccatatttgtgacgaaaatcagcctgggcaggttgtacttctcgcacatctcccatgccctctctgttccaggctcaatacctgccttacagttgacaacgataatggctgcatcggcaacactgattgcctcctcaacctctcctacaaaatcaaaaaatcccggcgtatccagaaggttaatcttaattggcccgtcctcgccctcatattccagaggaatcagagtagtggagatagaaaactgtctcttgatttcttccttgtcataatcgctgatggtgtttccgtccggcaccttgcccatacgttttgtaacaccagtcagtagcgccaatgcttccgcaacggttgtcttaccagcgcctccatgtccaagtaatacaacgttgcggatttgttcagttccatatacgttcataaacttccctcctgttcattaaatttaagcctatgcgtatattttactaaatttttcagaatttttcaagcattttatatgatttgcacaacattcttttaagagctgattgcatgtaccgcattcacgcatgggaaccgctgaattcccaatgtataagttcattattctttttcttttttgccagataaagcgcctgatccgcttgggctaaaagcgcttcatatgaagtgtctgcattggaagtaaaagcaacccctgcactgattgatacctggtcatgtatatgcagtgccttttgccgttcctcccagtctgtcataagtgataaaaagaaatcttcaacctctcccctttgtctaataccggataagtatagtgtaaactcatctcctcccatacgggcggctaaggaggccggagatataaccgatttcaggctttctgaaaatgaaattaatgtcttgtccccaataggatggccatactgatcattaatctttttgaaccagtcgatgtccatcattaaaaatgcaccattatctccatctgcctgaaaacgttcacaagtttctttaaaatacagacggtttaataatccggtcaaagagtcatgcctcagattataaacaatctgtgtatgagttttttccaccatatgatgagggaaaaactcatcactcatttgatttggatcggcaacagactgatgaatatgtactactttccacccgttctctgacttttccaacacgaccgtaaacctaaaacacatatcgtatagaataccttcttccgaatcctccctgacaaccagctcccccattacaagcgaatgggaatcggatagttctgttgtctgataccattgatcccggatcacaaaatgcccggtccattcatggctctcttctgtaaacttggcaatgaattcatgtaaatttctctcaatctcatgagctcccgtccctataacgctaattttatcagagacaaactcatttacaagatcataccgccgatcctctagatagctcttccaaatgtagcggcaaaaatcatttgcacttatattctctcccatatttacaccccaatacgtttaattttgctgataattcatctccgttttcacttctatcatacaatttacttttttctaaatgcgttctcccttttaatcctgttcttttcattgtctgcagttacaggtgtttccaaataacccgacgcttccgcaaagctattataccatacatagtgtcattttcactatggtaaaatacatttgtccttctgactgcccttttcctgttactttaatctataataaaaatgcctgatagccaattgaactatcaagcattacatatgtgcatattctgttgagaatatatcaacgattttggccttctgttttcctatcagcttttccaattctatcgctgataacagtccccttagatacacttggaccaattccagctgattcgggccgatggctgccaccagttccaattttgtaatatcattcacctcctcacattcattccgtttaactgtatgataacacaatccatcccgtcctgctctaaatcgccgtaaaaacattgtatgttccatgtaaacttaaactcccaaaaggctgcctttatagtatgtctgcccgcaaaaagcagccttcattcagactgctttctgcaacgatacagataaaactgccgtttcatgacagcacaatatcgtttcaccctgttaccagttacgtacaccctgtatgtgtatgaaacggaccttttcatagatataggaatccaggggccgcatatatgcatcataactgtgggcagccaccaaaatattatttcccgccacatcaacaaccacaggactgtggtaatatccgttcttatttcccagctgtacaatatcgcccggctccacgcccttttcgttggtttccgccccatagggacctgcggatttatttcctgtgagaaaattataaagatacacgaccccggtccagctgggacttctgttggatccgctgctgtaataccatcccatggtcggcgtgtagttcatgaccccgcttccggcataaatacactgggatgcaaaattggtgcagtccccgcccatatgttcaaaatccagataccgcggattcctccccttagcccatcgtttcgcgtattccaggacagcttccctctgatatccaatctccttcaatattccatgattcctgttctgtctcaacctttgttactattatatgaccatggatatctaatttatatcatgcctaatttatatcatgctttattatgtgaatgaaacccctctgaacaccatgctgcacggttttggaaatccgggtccgcaggagtatattcagaatatggaaatgactgtggggatgtggtaaaatgaatgaatccaacaggattttcgtggcctgcagcggcagacgtatttacataacaggagggttcaaatgaaattttatattgcttccggacttcaaaatcatgagcaggtgcgcagtcttgccaaactgcttaaaaactccggctggacacatacctatgactggacgtctctcctttatgaccggacatcccatgtctcagagaaaacaacagatatcgaaacactcaggcatattggcgaacaagaatataatggggtaaagcaggctgatgttgtcattatattgactcctcagggaagaggaactcatacagaatttggaatggccctcgccctcggcaaaataatctatttgtgtcataaggacgatacgtatttcaagtgtgatgataatacatcggcgttttattggcttccgcaagtaaagcatcttattgggaatacagattatattgccgcccagctgcttaatgcctgctttcatcctcacttaaaagcgtaaaagtttaaagtgataaagtattgactttttttacagagtcgcttacactattactgcatatgaatcattctgaagaatatatactatggtccatacaatctgcatatttataaatttgcataaggagtactgaattatgattatcattatgaaacccaatgcttctgatgaagcggtcaaaaaggtaacaaacctcattgaatccaagggactcacagcccatctgtccaagggctcccaggttaccatcgtaggcgtggttggcgacaagaccaagcttttggacaccaacattgaaatcagcgaaggcgttgacaaggtagtggctgtcacggaatcctataaactggtcaataaaaaattccatcctgaggactcggtgattccggttggcaacacccacatcggtccgggcaccatgaccgtgatggccggtccctgcgccattgaatcccaggaccagcttatggagaccgcatatgcggtaaaaaaggcaggagccaccttcctgcgcggcggcgcctacaagccccgcacatccccctactccttccagggacttgaggaggagggccttaaatacatgaaggaagccagggaagccacgggcctcaatgtaatctgcgaagtcaccagcgcccatgccattgagtcggctgtgaaatatgtagatatgctgcagattggcgccagaaacatgcagaactttgaactgttaaaggaggctggcaaatccggtactcccgtattgttaaaacgcggattgtgtgctaccattgacgaatggctcaatgccgccgagtacatcatttccgagggcaatcctaatattgtgctgtgtgagcgcggcatccgcacatacgaaacttccaccagaaacaccctggatatcagcgctgttccggtcatccgccagaagagccaccttcccatcatagtggatcccagccatgccacaggtgtcagagcctatgtggagcccctggcaaaggcagccattgcagtgggcgcggacggccttatgattgaagtccacccctgtcctgcaagggcactgtctgacggcccccagtccctgacatttgatgcctttgaacagctgatgaaggatctggctccctatgcagagctgtccggacggacctttaaggcacagtaacagaactttacggcactctcacttcagggagtgcttttacatatgcccggtgcgcggcctctgcccttacggcatcccttttcatacatttaatccggcgcatccggttcccgcatttacaggaggagataccaattatggaaaaaacgaccatgaccgattccaccatcgcattcatcggactggggcttataggcggctccattgcccgcgccatccgaaaaacacggccggatattcgtatcatggcctatatgcgttcccgctcccgtctggagcaagcccggaaagagggaatcgtggatgtgattttggatggaattgatgagaacctgcgcgaatgtgacctgatattcctctgcacaccggtggagtacaacgcaggttatctttccgccatacggccctacctgaaacagggagcactgattacagacgtgggcagcacaaaatgcggcatccatgaggaaatcaggcgccagggcctggaatactgctttgtgggcggccatcccatggccggatcggaaaagaccggctatgagaattccacagaccatcttctggaaaacgcctactatatcgtcacgcctcccgagggaaagaacagctcccgcccgcaggctttgagcctcaatgcagaacgcattgtggcggttgcaaagaccattggagccattccccttgttctggattacagggaacacgacaaggtggtggctgccatcagccatctcccccatcttgtggcttccagccttgtgaatctgattaaggatcacgacacagcagacggcaccatgaagcaggtggccgcgggcggttttaaggatatcacccggattgcctcttcctcccccgagatgtgggaacagatatgcatgaccaatgtagcccccatatcggacatcctggaagcatacatcgcatctttaaacaaagtgctggaggaaatcaaagaacataagggacaggatatctacaggctgtttgagacctcccgtgattaccgcaattccattacagacaaggccaagggatccgtggagccatcctatgagttcactgtggatgtaagcgatgaggtgggcgccatctccaccatatccgttatcctggctgccaagggcatcagcattaagaatatcggcatcaacaacaaccgcgaacggggtgagggagcgcttaagattgccttctatgacgaggcttccatggaggctgcatggcagaggctggacaaatacaaatacgagatgttccgcatgtaatccaagagaaaggttaggtaacagattatggaatttaaaagagcatcccatttcaagggcgaaatcagggttcccggagataaatccatctcccaccgggccgtcatgttcggctccatcgcacaggggcttacagagatacacaattttctccagggagcggactgcctgtctaccattgaatgttttgagaaaatgggaattgatatagaaaacaagggcgggaaggtgctggtccatggccgtggcctgcacggactgaacgcgccacgggaagtcctggactgcggaaacagcggcaccaccacgcgcctcatatccggaatcctctgcggccagaactttgacgtcacgctcacaggagacgaatccatctgtaagcggcccatgaagcgtattatggagccccttgccatgatgggagcccgcatcaccagcataaaagacaatggctgtgctcccctgctcatcaagggaggtcctgtccacggcatccactatgactccagggtagcttccgcccaggtgaaatccgccattatgctggctggtttatatgcagacagccccaccagcgtgaccgaaccatatgtgtccaggaatcactctgagctgatgctgcggctttttggcgcccaggtgtccaccgagggaaccacggcagtcataaagcctgccaacgaactccatggcaatcaggtcatggtgccgggagatatctcttctgccgcctatttcattgccggaggccttatggtgcccggctcacaagttctgatacgcaatgtgggaatcaatcctaccagggacggtatcctgcgtgtatgccgtgatatgggagcgcatattgagcttctgaatgtaagcggcggaacaggcgaaccaaccgccgatatccttgtacgccacggcagccttcatggaaccgtcataggcggctccctcatacctaccctgattgatgagcttcctgtcatcgcagccatggcctgctttgcagagggtgagactgtcatccgggatgccggagagttaaaggtaaaggagtccaaccggattgcagtcatggtccagggactggctgccatgggcgctgacgtgacagagacagaggatggaatgattatccggggaggcgctcctctccacggagctgtcatcgacagccgcaaagaccaccgtattgccatgacatttgccgtcactgccctgtgtgcggacggcattacagagataagggacgctgactgtgtcaatatatcctatccaggcttttacagcgatttaaagaaactggcacagggataagcaaaaaccgcatccactccggctttattccggatatggatgcggttctgtttttgtggtattctctctttttatggtgtttcttttgccgctgccgaatcccaatacgtcctaccccagcgccacatccagtatcatcatgaccacaaaaccaacggcaaatccaatggttgccacattggaatgctctccttcagctgattccggaatcagttcctccactaccacgtatatcatggcgcctgctgcaaaggacaggaagtatggaagaaccggacctaaaaactcggccagcgccagcataagcagggcgcctatgggctccactacgcccgaaagcgttccataaatgaatgctttccctttcccggctgcctccttaagcggcagggatatgatggctccctccgggaaattctgtatggcaatacccacagacaaagccagggcgcctgccatggtgattgtcccgttctgggacagaagtcccgcaaacgcaacgcccactgccattccctccggtatattgtggagggtcactgccagcaccagcatggtactcttcttccagtcgctctttggaccttccggctgctctgtatcaatatgcagatgaggtataatctcatccaacaggagcaggaaaccaattcccaaaagaaagcccacggaagcaggaatgaaagccagcttgcccatatgtccgctcatgtccatggacggaatcaaaagggaccagacagaagccgccaccattacccctgacgcaaatcccagaaatgccttctggacactgggttttaatgcgtttttcagaaaaaacacgcaggctgctcctgccgtggtcccgataaagggaatcatgatccccgcaaatatactgctcatctcaatccacctctgtcatttcctgagccccaatcctcccttctacaggaatcctttgagcttcagatagtcttttatcagttgaatcatctggtcgtaatcaatccggctggcattgatgggaaggtcataattttccatatccatccactccctgccggtaaaatagcggtgatactccgttctctccttgtcaatccgtctcattctgcgaagcgcttccgcctcatccaccttatccacatccataaccctgcggattctggtgaccgtatctgcatacacaaagatgcgcaccagattatccatctggtcctggagcacataattgccgcagcggcctacaataatacatgtctcggaggctgccagcctgcggatgaccgatgactggaaccggaacaggttctccggcgaggtaatgttggggccgtccttatccggttccgtcagctccggcttcatgctggtcacaatacggtatagcatgttatttccagccctttcatcagccagcctgaagtactgttcccctatggcgctggtctcagatgtcatcttaagtatctcttcatcataaaaatgaatgccaagctcctcagccaggcgtttgcctgtcaggcggccgccgcttccgtactggcgttcaatggtaattacaaaatgtttgtcattcatattgagtatcccccttattcctaatccacagccctgcccgtgacagggccgtggtctctttcatgtctatacaatgtctatatggcacattcccatagcgctgagggcattgtgatggctctggggagtcacgcccgcgcagcaggacccgtccacctgtatggatgtgtcaggaactgctgccttaatcagcatggcgttggatatgacacagatatccgtgcacaggccggccagctccacaaagtcatactgtcccctggctgcgtagtcagccagctccctgcttccaaaggtatgcttctcaaaacgggttcccggaactgccctgagctccggtaccagttcccaccccggcgttcccttgacacagtggaccaccggaagtttcttaccttccatcgtatccatataatcagcaaaatgggtgtccagggtaaacaccacctcatccccggcatcctggtacgccttaaccttatccagcacattagggacaatggcccgggcctcagggctgcccaaagctccatccacaaaatccttctgcatatccaccactacaagtaaccggctcatggaactttcctccttgttgtgaacgttttttatttgtgaacacgtttattccggttccaaagtgttcctttccatacctacagtctaccacatttcatcaatcaataaaagttcttttatacttttgtgtgacattgcgtgactttatatgaatttttaaaacactcttgacaaatccactttattgtattaagatacggattaataaattaaaccgtagagaaagaggagtaagctatcaaagctttaacacagagagccgcaggcggtgggattgcggtatggggctggtagctgaatggacttttgagggcggtcttgaaggattgttttatctgtagggaccgacggattccgcaaccgttatacatgcggcgcatatgttggtatgtgtaaagtggactttttagtcaatttgagtggcaccgcggatttcattcgtctcaatcgtagcataagctatggttgggactttttttattccggctttgtccaaagggcagccctgtcatgaagtcccttatccaacggcattttttatcatccaaatatagttcaaaaacaggaggaaacaaaattatgaaaaaaacaatcgcaatgcttttaactgcagctttaagcgcatccctcttatcaggctgcgtatccacatcccagggcacttcagcggcccagtccgctgaaacctccgccgaaaccgggtctgaaaacgggtctgtccagaacgctgagagctcagcctccggcgtgtcggccgctgatacatcatccgctgacaagaccggtgagtccaaggcagaatcatccagcaattcctacaccatcggcgtgggacagtttgcggaacacggctccctggacaactgccgcgaaggcttcatggccggcctggcagaggaaggcatcgaggaaggcgtgaacctgaccgtgctctatgataattcccaggccgacggcggcacggccagccagattgcaaccaatttcgcaggcaagggcgtggacctgatgtgcggcatcgcaactcccatggcacaggcagagtacggtgtggctaagaagtcagacattcctgtcattttcactgctgtaaccgaccccgtagccgcagagctggccaatgcggacggcactccggtaggcgagattacaggcaccagcgataaactccctgtggaagcccagcttaagatgatccgccagattcttccggaagcaaaaaacatcggcatcatgtacaccaccagcgaggtgaattctgaatccgccattgcagagtacaagaagctggctccccagtatggttttgaaatcgtggacacaggcatctcctcttccgctgatattgccctggctgccgacacccttataaacaaggtggactgcatcaccaacctgaccgacaacacggtagttgcctcccttcccgttatcctggataaggctgccgccaagaatatccctgtattcggcagcgaaattgagcaggtgaaaattggatgcctggctgccatgggactggactacatcgaactgggcaagcagacaggaaagatggctgcacaggtactgcgcggcgagaaaaaagccagtgaaatgaattacgaaaccatcaaggaagccgccttctacggcaacacacaggtggccgggaatctgggcatcacactgccggaggatttgactggaaatgcagctgagctgttcactgagatttcccagtaaagctctatcattattatctggaggaacatcatgacaacgattattttaggtatctttgaagaaggcctggtgtacgccatcatggccctgggcgtatacatcacataccggattctggattttccggatctgtctgtggacggaaccttccctttgggagctgcttttaccgctaccggcatagccggaggtttcatccatccggctgcggcccttcccctctcctttctcttgggagccatggtgggctgcgtcaccggacttatccatgtcaagttaaaggtacgggacctgctgtcgggaatcattgtcatgaccgccctctactccatcaacttaagggttgcaggaaagtccaacctgcctatcttcagcaaggacacgattttcagcaacccatggctggaacgcaccattccccaggccttaaagccctatacagtaaccatcatccttctggttatcgtccttatctgcaagctgctcctggacgcttacctgaaaacccgttccggctatcttctcagggccgtgggtgacaatgatgtgctggtgacctccctggccaaggataagggcatggtgaaaatcatcggcctggccattgccaacggatttgcagccctggccggcagcgtgtactgtcagcagaagggattctttgagatttccaccggcacgggaaccattgtcatcggtctggccaatgtcatcataggcacccagctgttcaaacggttcggcttcgtcaagtccaccacggctgttatcatcggctccatcatctacaaggcctgtgtatccctggccctgcttctgggggacttgacgcttacctttggaaacattactgtctccatcccggtgacagcctctgacttaaagctgattacatccattttgttccttattatcctggtggcaagctcctccaggggaaagaaggtgaaaagccatgcttgaactgaagcacatcaataaatactacaatgccggtacagtcaatgaaatgtgcctgttcgaggacttcagcctgaccataaaggaccatcagtttgtgtccgtggtgggaagcaacggctccggcaaaacctcccttttaaacatcatctgcggcagcattcctctggatgagggacgaatcataatcagcggaaaggacatcacccggattcccgaatacaagcgccagcgccgcattgggcgggtttatcagaatccggccatgggcacatgtccgaccatgaccatactggaaaacatgtccctggcagacaataagggaaaggcctttaacctcaggccgggaaccaaccggctgagactggagtattaccgcgaatccctccgctccctggggctgggactggaggataagatggatgtgaaggtgggagtcctttccggcggccagcgccaggccatggcccttctcatgtccaccatgactcccattgaattcctgattttagatgaacacacagctgccctggaccccaagactgccgagaccatcatggagctgaccggaaagattgtaaaggaaaaaaatctgaccactatcatggttacccacaatctgcgctatgcggtagaatatggggaccgtctcctgatgatgcaccagggccgcgccgtggtagacaaagaggcgggggaaaagcaggcgctctgcattgacgacattctggaaaaattcaatgaaatcagcattgaatgcggcaattaaattaaaaagcagactgaaagaggaccccaaaccgcaggacagcggtttccgggtcctcttctgttttcttttattcctgctccttaaaatactttttccggtaccgtatggaccgcttcagcgcctggaccatatcagccataatccgaatctccacctcgtcgcagtcatccacagcctccataaccgcatttttaaaaatgtgctttccatatcgtatgttatcacaaagcagcacatccggagtaatctccagggcattggctatggcaatcagggatttaaggctcacctgggtacttcctgtttccacattggaaatatggggattggataatcccgtaagctccgccagtttttcctgggtcatttctctttgtattctctgtatcttgattcgttttcctattgccttatagtccagttccatattgtatatacaacttcctctgcttattatttacttgactattgtaatctttgtattagtatattataataaactggtcattttatactttgtaatgcaatactaaaaactccttttatttacagctaatagggaggaagtacagccgttcggtaataggtattaagtaatcaaaaagagtgttgaaatattgtaattcactttttctctgccttttatggacgtctttcatacaggggggttattcatatggttgaaaccaagaaaacattgcgccgggaagccgttacagggggtatctttgaatgcagatatgataaatccctgaccctgacgcaggcagacaacagtctgttccggctgctgggcatgaacgcaggcagtcttaagtcaggtactcccatctcctttctggaccggatatgcgcggaagaccgcccgattttcctggaaaaaatacggtaccagctgtcccgcagccgtgtattcatgtctgagctgcacattgtgaccagtgaaggacagctgcggtggattcatgtatgcggggagctccttaacgcggaacaggaaattccctgcctccactgtatcttccatgatgtgacagatgccagggacagacaggaacggcttgccatagaaagccagatctacgacatcatattatcccagacccaggatatcatatttgaattggactgtcttacccgggatatctactattctcccacctttgagaagaaattcggttaccagattccagtcaagggattccctgactctatgtttgccactgacatcatccatgagaaggacaagatacttcttcgacgctgttttcagtccatcctggcaggccagaaccagatgcagtgcgaataccgtttaaagcacaggaacggccgttatctctgggtcagcgtgaatgccacggccatccgggatttaaggggccggctcctcaaaatcgttggcatcatctcggatatcaatgagcagaaggaggagatactccgggcaaaaaaggacgccctgctggatccccttaccagccttctaaaccgcagggaatgcatccggcggatcgaagcctacacaaggaccgaggaagagatgggagcgctgattctgattgacatagataatttcaagtccatcaatgatacaaacggccatcttttcggtgacaaggtcctggtggacctggccgcggccctccgtttggccttccgcagaaatgatatcacagcgcggattggaggcgatgaattcattgcattcatgcctcacatacatgtccgcggggatgtggtgcccaagcttgaaaccattctctattccctgtcccggtgcgcagagacggacgggaaggcagatgctgcaccggagtcagacagcgcggttaccttcagcatcggggtcagcttttatcctgatcatggaagggatttttcctccctctatgaaaaggctgacgcagccatgtaccacgccaaacgaagaggtaaaaaccaatattacatatataaggaagatgcaccggaggcataagattcctgacctgccgggaataaagttgatgggcgcaccctaaaagggctgatatccggcttagttcatgccgtatatcagcccttctcctgtcctgcaaaatcccttgtcaggattccgattattctgcaaataacataatcttggaagctgtgttctcatcatctgaccagaccacacatttctttccctgtgtcaggtcatccagagtcacgatgtttctggtgagatacgggaagatgttgcagtcctctgccagtgtgaactcggttccgtccgcagctgtcagcacggatttggatgtgcctgcatccgtaaccatggacttgacctccacataatcaggcgccttggcgtctgccggaaggttggtgaaaatcatgaccgcattggtcataggcggaaggctcatggtcatggccggtcctatgtaggcataaatggtatccccgtctttcacatcctccagagctaccgggagacctgtcatggcgtccaggatataagtcatatcgtcagccacattcaggatgatttcaccgctggtgctcatgcccgactgattgtcaatggaaagcctgccgtcctccatctttgtcacaggcccgtaaatccggacggactggggaacctcgggctggctctcttccatgctctcaatggctccggtcaccgactccactacggtggtgtcactcacggtggtctcttctgtattctcttctgctgtcacggagctgccggacattgtctcggcgttggcaccggctgagcaccctgctgctcccagggcaatggctgcacagattcctactgcatataaatgatattttctcaatataatcttctccttttcatctgcctcccgggaaaccgtgggcctgccggaggcacttgttatgtctgtatgagaagtatatatcatttactgtccatatccaataaagtatttcttaagaattctgaatttagaatgaaccttacgacaaatgttacaaaatgtttacacaaatacggtctgcctttaccgggccatctcgctctgaggtcctgcctgattgtgggcatggatgatggtctcgatttcttccaggttggaagacggcaggtctccgggaatggtgttcttgacagcagccgtggcattgccgaaggcaacggccctggcacagtcaccgtctgtactgagcagcccgtaaagcgctccggatatataggcgtcgccgctgccgatccggtccaccacctcaatatcccggtacggctcctcctcatagtactcatccctggctgcatcgtatatcacagagccaaaggtatgccgcttgggactgtggacgattctctgggtggaggccacaatggagatagggaattcctcggtaaagctcttcatcatctccctggcagtgcctgtctttaaaaaggtgagcctggcagtgtcctcggaacagaagaaaatgtccacatagggaaggattctcaggatacactccctggcctggtcccctgtccacagatttcccctgaagttaacatcaaaggataccagggtacctgctgctttgaaccgcttaatcatctctatggtggtctcgcggatgtcctcgttcagggccagggtgatgcctgtggtgtggaaacatttggaagccgtgtacacctcctccggtatctcgtcaatatccagggagaaaaaagagctgtggttgcggtcgtaaatcactttcggctttctgggataagcgccgttctcataatagtaaatgccgaccctggctgcgggggactggtcatacataaagaaatcatcgctgaccccgaaggaacgaatcttgcctttcatgaagcttcctatatcatgggccggaagcttggatataacgcctgtgtgaagacccagaagagccgcgcccactgccacattcagctctgcgcctcccacctgcttgacaaaggtatcgcctctggacagacgctcgttatccgggggcgacagccgaagaagcacctgtcctaatgtaagaaggtcaaaattcctgccgtttgtttctaccatatcatatctccttttcaaataaaaacatataagaaaccatataagaaacggctaatacctctgaaaggattagccgtctctgattgtctgattgtcaatatcctgatttatctctgaacacggcctgaaccgtcgccgccggccagattctcaacatcagccctggttaccaggttgaagtcgcctggaatggtgtgctttaatgcggatgcagctactgcatactccagggccgccttcatatccttgccatccaccagaccgcagatcaggcctgctgcaaaggaatcgccgccgcctacacggtcaacgataggtgtgatgtggtactttctggagtggtagaactcacgtgtctttccatccatgatgcaggcagaccagccgttatcggaagcgctgtggctctcgcgcagggagctgatgatatacttgaagccgaacttatcagccatctggttgaagatgtcaacgtatcctgccagttccagctcgccggaggtaacatcggtgttgcccggcttaaagcccagaaccttctctgcatcttcttcattgccgatgcagacatcaacgtactgcatcaggttggtcatgaccttctgagccttctcagaggaccacagtttcttacggaagtttaagtcaacggacactgtaacgttgtgtgccttggctgcctttaacgctgcctcggtgagctcgatggccgcatcgctgacagctggtgtgattccggtaaagtggaaccagtcagcatctgcaaaaatctcgtcaaagttgaactgatccgcagttgcagtggagatggagctgtgggcacggtcatagaccacgttggaagctctcatggcagagcctgtctccaggaagtagatgcccagtctctcgccgcttctggcaatgtgctttgtacctacattatactttctcagtgcagccactgcgcactcgccaatgggattagccggaactgcagtaatgaattcagcttcatggccgtagtttgcaagggaaactgccacatttgcctcgccgccgccgtaattgatgtcaaactcgtctgcctggatgaacttctcattgtttggggtagataatcttaacatgatttcgcccatggtaacaatctttgccattgtatgattctcctttaatctcttcttataatctctttttaattatatttggaatgatgcttactgtaaggtaacatctatgctcttgccgctgcaacagctgccacgaactcctgagccttagctgtaacggctgcgaagtcgcctgtcttggcgccctttgtcaggctgcttcctgttcccactgcgtaagcgccggccttgatccacttgtcaacattatccacgtctacgccgccggacggcatgaactcgccctgtggaagggggcccttgaaggagctgatggctgctggtcccacgatgttgcctgggaaaatcttaatgatatcacagccggcttccatagcggtaatggcctcggatggagtcataacgcctggcagcatgggcactctgtaacggttgcacagacggatggtgtccacgttcaggcccgggcttacgatgtagttagctccggccaggatgcaggcccttgcggtctcaggatccagtacggtaccggcgccaattacaatcttgtcattgcctttatacttctcagccatcagtttgatgaagccaaccggatctccgtcatccatggtcatggtaagctcgatgaaattgatgccgcctgcgataatggcgtcaactaccttctcaccctgctcatagttctttgcgcgaacaacagcaaccagacagtcttctttcattcttgctaaaacttgttctttcttcatcttcattctccttctctttaaattcgcatatgcgaatcactttcacaattacgatttgtatacctaaattctaatcgctgtcacatgatttgtcaacagcaaaacaggtaaaaatataagtttattttcctatgcatgcccgatgtaacccaacagccgtgacagctgggctcccttatcgcttaccaggcgtcccagggcgtcataatcctcggtgggtttatacaggctggagacgctgatggctcccatcacattaccatcctgcccaaatacgggagctcctacgcattccatgtgctcttccagctccctggcgtcaaaggcatatcccttttcacgcaccgatttaagttccctctcaaattcttccctggtgcagatggttctatccgtgtgcttcttaaagctgatgcgtgataatacgccgtcccggtcctcatcctccgtgtaggccatgattgccttgccgagggatgtgcagtaaatgggattttttgttcccacagtggccgtggtgatgatgggattctctggttcaaacttgcagatatacacaatggaatcatctgagcgtatcccgaagaacacggttttccccacctccctggaaaaggccttgagcaccgggtcaatggtgcttataaagtccagattatttgtatagttaattccaatccggtaggctgtcaggccgatggtatatctctgcttctgttcccttgccacatgaatcataccggtctgcaccagtgtggtcacgatatcgtaagcgctggtcttaggcatgtccagctttgcacatatctcatccagggtaatgccgtccggtttttttgacaccagctttaatatttctacggtgcgcagcgtggttctgtttagtttcatggacacctcccgctcaattattcgtatatacatcttttatccgtatatacgatatctgttattcagtatacctcagtccgccaggagatgcaagaagaaattacaattaatactgccataaataatactgccataaaaaccgttttttctacagggtcactccctgtttaaagatagccatatcatggaatcctgcttcctctgacttgaccttcctgccggatgcaacagccaggacgtaattcagcagctcctttgccagttcttcctttgtcatgtcctccaccatgcggcctgcgttaaagtctatccagttgtccttatggcctgccagcctggagttgctggatatcttgaccgttgggaccggggaggcaaacggggttcctcttcccgttgtaaagagcaccatatgggcgccggatacagccagggccgtggaggccaccaggtcattgccgggagcgcttaacaggttcagacccttcaccttcaccggttcgccgtattccagcacaccccttacaagagcgcttcccgatttctgggtacaccctaaggacttgtcctccagggtggaaatgccgccctttttattgcctggggacgggttctcgtagatggtctggttgtggctggtaaaatagttcttaaaatgattgatcaggtccacggtcttgtcaaacagctccggagaggcgcagcggttcatgagaagtgtctctgccccgaacatttcaggcacttccgtaaggatggtggttccgcccttgctcaccagcagatcggaaaacgcgcccaccaccggattggccgtgatgccggacagtccgtcagatccgccgcacttcatgccgatgaccagctcggcggcatctatcttctccctggaaaatgcgcctgcgtaagctgccagctccttaagaagccccatggcagtctccatctcatcctccacatcctggcactgaaggaacttcacgcgatcctcgtcgtacgctccgatatagtccatgagcacgggaatgttgctgttctcacaccccagtcccagcaccagaacacctcccgcattggggtggcggatcatatctgccagcacctttctggtattctcctggtcatcacccatctgggaacatccgtaagggtggggaaatgcaatcacgtcctccacatttccaacagccagtgactttgcctggttctcaagggccttggcaatggagttgacacagcctaccgtggggataatccatatctcgttgcggattcccgccttgccgtccggcctgcggtatccctcaaaatacacatgctctgtaggggccacatcgttttcctggggaacatagtcataggtaagcacatcgccaagggcagtcctcacattgtgcacatgaacccacgcccccgcctctatgtcctcctttgcatatccaatcctgaagccgtacttcaccacttcctctgcggcttttatgaaccttaaggcaaacttgtgtccctggggtatgtcctctaaaaggctgacctttacgcctgccacatccagggtctcaccctttgcaaggggacgcagcgcaaccgccacattgtcattttcatgaatttttacaatatcctgcatggccattcattctcctatcatcttgttttctttgattttgtgtgcctgttccttgtttgctgtttcatgacttatttttgtaagtgcttacaattattctactcattatcaggtcagaagtcaataaaaaaatagaaaagtattgcattacttactgggaatatgtataatatacttagcttgtaagcgcttacagaatgtgaggttagtttatgaatatatatgatgtttctgaacatgcgggggtgtccatcgccaccgtatccagggtacttaacggaaatcccaatgtcagtgaaaagaccagagaaaaggtcttgaaagttatggacgagttgggttatactcctaatgtgttcgccagaggcctggggttaaataccatgaaaaccatcggaatcatgtgttccgattcgtccgatccgtatctggcaggcgccatctactatctggagcggggactgcgcgcccacggctatgacgccattctctgctgcaccggctatgacctggacgccaaacagaagtattttgatttgcttcgttccaaacgggtggatgccatcatactggccggttccaagttcgtggagatgcgtgccaaagataatgcctatatcatcgaggctgcttccgaccttcccatcatgctggtcaacggcttcctggaaggcgagaatatatacagcactgtctgcgacgatcacgcggcggtgtacggcgccgccagccagctgctctcctccggacgcaggcgcatcctgtatgtatacaccagctattcctacagcggggtcaataagctggaaggatacaaagacgccctcaaggcaaagggcatcacgccatctgacgaactcatccgccagtgtcccaaagacatagaggctgccagggagctgctgctgtcccttcacagggaaggattggaatttgacgctgtcatcacctccgacgactcactggccgtgggagctgtgaagtatgcccatatagcggatatctccattccccgcgatctgagcatcatcggctataacaattccctgctggcccggtgtacggacccggagattacatccattgacagtaaggtggaagcgctctgcaccaccacgatcaacactctaatgggggttttcagcggcgtgaatgtgcccagcaggaccacaatcgcttctgatttaataaaaaggaaaaccacaaatttttaattcttaaggaggaatatcacacatgaaacaatttatggacaaggatttcttattatcaactgatatggccaagacgctgtatcatgattttgcagagaatatgccgatacttgactatcactgccacatcaatcctcaggaaatctatgaggaccgcaagtttgacaccatcacacaggtatggctgggcggcgaccattacaagtggcgccagatgcgttccaacggcgtggacgagaagtatgtgaccggcgacagcacggacagggagaagttccaggcctgggcagagaccatgccaaagctcatcggcaacccgctgtaccactggagccacctggagctgaggaagtacttcggataccagggctatttaaacggcgataccgccgaggaggtatggaacctgtgtaatatgaggctccaggaggactccatgacggtccgcaacctgattaaacagtcaggcgtgacactgatctgcaccaccgacgacccggtagactccctggaatggcataagaagattgcagaggacgacacctttgatgtacaggtacttccggcatggagaccggacaaggccatgaacgttgaaaagccaaccttcggcgcttatatggctcagctttcccaggtcagcggtgtacagattacggattttgcatccttaaaggaagcgctcaaaaagcgtatggcattcttcgcatccatgggatgctgtgtatccgaccatgccctggagtatgtaatgtatgcgcctgctgctgactccgaggtagatgccatacttgccaagggcttaaagggcgaggcggtatccaaggaagaggagctgaagttcaagacagccttcatgctgtttgtggcccgggagtataatgccatgggatggattatgcagattcactacggctgcaagagggacaacaacggctacatgttcgagaagctgggtgccgataccggatttgactgcattaataactatgctccaagcgcgcagatggctgactttttaaatgccctgagcaccaataacgagattccaaagaccatcctgtactccctgaatccaaatgataatgcttccatcggaaccatcatcggctgtttccaggagaaattccccggtaagatccagcagggctccgcatggtggttcaacgaccacaagaccggcatgactgagcagatgacatccctggccaacttaggatgcctgggcaacttcatcggcatgctgacagactccagaagctttctgtcctacaccagacatgagtacttccgccgcatcctctgcaatctgattggcggctgggtagaaaacggcgagtatccggccgatatgaaggcactggaggaaatcgtaaagggtatctgctacaataactctgtgaaatactttggatttaagctggatgaagtaaagtaaactgaaacagcacaaggggactgcctgattgggcaatccccttttttgctctatacctctattgtcctcacgttcacaccggggaggcggattttccccttctcgcaaactgcaggaaggcggttgccagcccgcttatgcaaagcattgcgtaaaagctgattcccctgcttaaaagcatcacggaaaagctctggcctgcccctaaaagggtgcggtacagcacgagaaagcttccctctgaggctcccacggaaccgggaaggggtactgcggtgactgccagactcaaaatggcctgaagggccaggaaatcttttgccgatgcggatatgcccagggcacggcaggcccagtaaggaaccagatagagagcagtcagctgaacagcactatggatgaagattctcaccgccgccaggggatactgcctcagataggctcctcccctgctgtactcattaatcagtccctccaccttccggatggcgcgtttcctgttttttatgattccggccctgctcagtccgcctgcaatgcacagcattattttctccgccaaaagaccatggaagatgattagcaggataaggccggaacagaatccatttaccagtactccgaaaaccaggagcagccgtatgattctgccctgccccatgacaaaggacagattggcgcccaccataacgcacccgtaaaccagcaccgtcatctgatacaccgcggctgtggccagaagggaaaatgaactgtgggctgccccaaagccgtccctgaccatataataaagctgcatgggctgccctcccgtggcggaaggagtgatggcgctgaagtaaaaatccgtgaacgcataggaaagagagcgccagtagggtacctttttgccaaaggtccccatcaaaagcctgatattggccgcctcgcagttgacgaacagaaacatgcaggcaaaccctgtggctacaaacctgatatccgccctcataaaggtactgcccagggtctggacggaatggctgcccaaaagcacatggaatgtgaaccaggccagcaaagccaccaggcagagcccaatggacatctccttccagttcatctttttctgtttcatccctttcgccccctttccctgccttttttctgtttaagctgtgtctattataccgtccatttcttaaaaacttatgattattttctgaatgtttttgtattttttatcacgttctgatggtcagagatcaaaaaaagccgccgcgcaatcaggattcgtctccttttgcgcagcggtcctgccgctgtggtccagactgcccatcctctatttgaggcgcaccacatgctggcagtatatgtacatattcttgatttttttggcctgctgtccgtcgtctcccagcacgatgggctgtgttcccgtaggggttatgtagagcttaaaggcgatggcatcctgcccaatcttcatggaccttaccggcgcgtactgaaaattgccctgttggattcccagatattcatacatgctgtgctccaaatcaggattggcgtacacccgcaccacatctgcttctcctttcatgtcgatgattgccctggcttcctcaaatttgatgttcgtaaaacggtaatccccattaccgatgatataggccagcgtaccattatccagtaacagcaaaggatccatctgtgccatgtaaatacccccttttcaaaaatcattcttaatatgtttcaccttaatcataaagcctgctgagaggaatgtcaatataatcagaaaattatcaatattgtttgtcaattaactatcaatttaagtgtttttccgaatactattactcccggaaactgcctccgccgctttccggtacagtccggcccatgggcacccgaaacgcaaaaaagattacaggattcatcccataatcttctctttccttatatcatatcaaaaaatgtatgtgagcaggacgataagccgggttatgtcgttgaatggccatctatctaggactgccgtcgccggcagcctcaagcaacctacccggaagctgacgggcagccatatgcttcctgttcggtcttgcttcgagtggggtttacatgtgccccgcctgttaccagacgggcggtagtctcttacactgcccttccacccttacctttaaggccgcagccaaaaaggcggtacatttctgttgcactgtccctggagtcgcctccgccagacgttatctggcaccctgccctgtgaagcccggactttcctctcccgcggccttgcggtatcgcggcagcggccacctgtcctactcacaacgtgtattagtctatcacagaatcatgggtttgtccagagaaaccatgttgcttttccctacacctttccctgcaaaccatgctgcttttccctgtattccgacggcggacagcctgtgtatttcttaaaggcagtgctgaaataaggaatgttgctgtaaccggtcatcatggcaatctcgtaaatcttacggttgggatcgcgcatcagatccttcgccttttccatgcgcagcttcagaagataatcggtaaaggtcaccccggtctcactcttaaaggatgtgctgaacctggcactgctgagtcccgcggcaacagccgtgtcctccatggacaggtcagggctgctgtaattttcctccatataggcaagtgccttcaccaccggcctggaataaacgccggatttctggctgcccacatactcgcagatacgcttcaggttttcccccagcacgccgatggcctttccaatggtctcgcatccaatcagcttcttatattcttccaccggattctcaaacaccagatccgcacatattcccgcatctcccagctccttaaggaccgtgctgtaaaggctgccgaccatgaactgcatatagatataagaatccatccctgcctgcttaagcagcttctccagctctcccatacgctttttgagaagctggacattgccgcttttcaccggggtgataaggtcgatatccagaatgggagacggatcgctctccttttcatcccccttgatatcctggaaacgcagattctggttgtcgcctctgatgtattttaatttaagggcctcatgtgcctcctgataacactggtccagcagccggatgccccactgcacattgctctgcgcgcaggtcaggctcatcccctgttctgagaacaactgcctggtatggcttaaaaaaaggcttgcgcgcatttccactgtcatcctggtgggcgcaatgactgcaatctcacagaggttctccctctgcaccagcacataggccccctgttccctcatatggccggcggcttccgccatgagccagccgctgtccgcggattcaaagataaggaccatacagtagtcatgctccatctccgttatcaggccgctgtcgtttacctcatacatgagaagcttgcgcagcaaatcctccctgtcctcaaaggagtcctttctggcctcgtcgaaccgcctgacgcagtctgaagccagataggtcagctcatccatgttaatgggtttggtgagataatcctgaacccccagcttaagggcccttctggcatattcaaaatcatcataaccgctgaacacaatggccataagccccggattcagcttctttccctcctctatgagctgcagtccatccacatggggcatacggatgtctgtcatgagaagctccggccgctgttcctttaagagcgccaggccttcctttccgtttccggccgttcccaccagctctatgcccagggatgcccagtcaatgacgctgcacagcccctttaaaattatctcatcgtcatcacagataatcgctctcatcggatgtctcccccttttttcctatccgcagggtcaccacggtcccctcacccatggcggactctatggtcaccccatacctgctgccatatacaatttttatcttgtcgtttacattgcgcaccccgtaaccggtgccctgctgatccgaggatatggtatccagctccctgtttaagcgcctgcatgtgtcctcatccatccccatgcctgtatcctgcacctgcagaatgacatcgccttcctggggaaagatatggatataaatatatcccttctcctccatgggcttgattccgtgatagatggcattctccaccaccggctgtaatatgagtttgggcgtcctgcatgataaaatggacggatccacatggatgtcatagtcaaatttctcctggtaacgccggtgctggatgctcagatagcttttgatgtgctttacctcttcctctatggtgatgatatcccgtcccttgctgagacttatcttgaaaaagtctgtcagggctgtcagcatctctatgctctcctccacctgacgcattctcagcgaccagatgatggagtccagggtattgtacaggaaatggggattaatctgggcctgcagggcttttaattcctccctccgcaacttctcctgttcccggtatatggtgtcaatcaggtttctcatctctcctgtcatatggttgaaggaatcatacagcacccctatttcgtccccgcgctctgtttcaaccgatgtttccagattgccggcgcagacctgctccattgcctttaccagagtaaataagggcctggtaacggagtcagccactatttcggacagtatcatggatatgaccacggccagcgccaggagcataatcatgagcaccttgatatactccacggaccgggtaatggatgccttgggtatgacgcccacgattttccagtccgtctgattcagggtctggtagaccaccagctgtcctttgtccttcagcacatgggatacgccgtattccggtatttcacttaaattttcctccaccatgcggcgcgccttctcaaccccatccctgtccttccacggtccttctcccgctgtcagattcatgatccggttccgttcatccatcagaaacacgtcccctgcgccgctgaccgccctggccgcaatgtcagacagcttatcggaatcaatatccgccaggaccacccccttggtccggcccgtggccttatcaataaaaggaattcccatggatacataagaggtatagggggtgctgaccacataggaattctcatggggcggaaaccattgggcctgtcccgtggcgtggatgattcggtaccagtccgtgtccctgggatccgacaccagaaaggatgaggaattgctcttatagcgccccccattatcccccagcacatatacgccaaagatgtcccggttataggagggaagcaccatcatctccatgcttccctccaaatcatgggaatacatctcctttatggagctaaactgacgtcttatgagcttctgcatgctgatattgtcattcatggcggaacatacctgaaaggtctggagaaacagttcattgatatcctggcatgcattgcccaccatctggacggtggtggcctccgcttcctcaaggattctggatgcggtcatataatagtggagggcgccggtcagcaccacaatgccggttgatgcggcagcaaaggaaagaatcatcttttcctttagcataaggcgcgcacccaggttccggcaggccttaaagcatgtccgcttattcagatacgccttcatgatttccttaatatgcatcttcaaacaactcctccgcgttatccatggtatattcccggtgtttcaccatggtctgccggtccgggttttcccccctctggtgcctgtttatgatatcaaataccgcatccccgtattccggactgctctttaccgtggccagatactcccgggcaatgatggccttaaacacatcctgtatgccgcctatggacacaataaccacatcctcacccggttccatacccgccagcttaagggcctggaggacccccagcccatcctcgtcgctttgggcaaataccgcgttaaaatcaatatcctggtccgcaatcacggactctgtcaccttctgggccgtgaggcggtttccgctgctctccacacgcttggaaacatataggttggagtgctcccttacgccgtgcatgaatcccatgtaccgctcccaatccatggccgaggacttttccccctgtatcaccatggtatggcagggctcaatgccgaaatgacgggcaaggatgtccgcacacagctctccctccgcataatagtccgaggcaacatagcccagtatgtaatcctcccggtcatactccggctccatctccacatcctgttctgccagtatcaccggcactcccctctgcctggcctccagaagtacctggtcatagccgtttctggcgctgggaatcaggataagataatcaatacccgcatccagaagaccgtatatatcctcgatctgccactccaggctctcctcctctggtgcatggtaaatcagctgcgcccctcttcttctggccgcctccttaaagctcttaatctgagctgttttccagggcgtcagaggttccgcctgggataaccccactctcagtccctcatgttctgtctcctgtgcggccggaagggaccatctgtcctttgccagccataaaaggcatgcaagcatcactgcaaggcataccgcaatgattttctttctcatatgtcaatgcccctgtctcaattgaatcctattttgaatcctattataccagaaaagcacgcaaatagacagacaagataaaacccaaggctgccggagaataacccctccggcagccttccttttgcatattctcttgcttttaatagaacaggttcaccagtccggtggagaacaacggaacataggccatcagcagcatacagataaacagcatgacatagaacggaatggattccttgataaacgcctttatcttacacctggtgatgccgcaggtgacaaatatcagggcacccatgggaggcgtcacgccgccgcaggccattgtgaatatatataccatggcaaagtggatggggtcgatgccgtaagcctcagccaccggagccagaaggggaaccagaacgataagggctgcatttccctcaatgaacatgcccaccacaatgaggaacaggataatgacaaagaggaacaggtatttattgtggatggttcccagcaccagcgacgtaaactgctgtggaatctgctccctggtcagaatccaggcaaaggcagaggcgccgccaacaatcagcatgatggatgccgtggtagccacggtctccttaagacccgtgccgatgtccttaagcttcagttccttatatactatgcccagcaccagggagtagacaatggccaccgcccctgcctccgtgggggtaaagattcccaaacggataccgccgatgatgatgacaggaaggcacagaggaaggaaggcgctggcaatctcaggagctgcctgtttcatggtcagacgctctgtgcgcatgggcttatatcctctttttttggagataaagtgcaccagtatcatcatggcaacgcacagaagcacgcccggtccgatgcctgctataaacagctttccgatggaaatattggcaatggagccgtaaagaatcatggcaatccccggaggtatcaggggtgtaatcatggatgacatggctgtgaccacagtggagaactgcttggaatagccgtggcgctccatctcaggcaccagcatttttgcctccatggcagcgtcagccagattgcttcccgacagaccgcccatcagagtggacaacagcacatttacctgggccaggccgccggtcatgcgcccggtcatcacattacagaatcccataacccgcttggttacgcctgaataattcataaacacgcctgcacagataaaaaacggaatcgccagcagaggtatgctctctacgcctgccagaactctctggcccaatatctttgtaaagggacctcctgtcaggtaaaaatatgccatggaaccggaaagaatggagatgaacaccggaaccttcaggaacagcagcaccagaagaaccaccgtcgatatcaaaataatacttgtctccattatttacacttcctccccttttcctgttaaatccctgtatgtattcagacatacctgtaccgccatggtaagacatcctatgggcagcggcgcgtagataaggctgtagggaatcttaagaatgtttgtcacacggtcgtagcgcaccatctgcatgatataccggactccctgatatcccacatagcagaggatgatgactgccgcagctgcaatcagcacgctcagtattttctgaagcttttccgggaacatctcaacaatcacgtcgatagccgcatggttcccgcacacaaatgcatacctgcctcccagaaataccacccatatgataagggccagctgcacttcctcctgccatacaaagggatctcccaggcaatagcgcatgatgaccccgaagaatgtgactcccaccagaagtaccagggccccgcaggctgccagcacatccgcgttgcggagcagattcccaatcttgttatctgatttcataaatatttacccctttcccggtaccttaatcctgtctgccgatgatggtcttcatctcttcgataagtccctcggaccacatggccttaatctgcggatcctcgtaaaatgcctggcctgccgccttgaaatcctccggcgtcagttcgcttaccgtcacacccgcatcctttaaagcttccagcgcttcctcatccgccttttccagctgctggctgttgaatacgccggcctgatctccgcactccatcagaatattctgctgctcctctgtcagtgtatggaagtaatccgcccccataatccagcaggtcatatcatatgtatgggcatccagcaccaggtttttggccacctcctggtatgcgccgtttaagataaccggaagagggttctctgccccgtctatggttccctgctgcagggccgtgtagatatcgctcatagccatcggtgtgggcgttgctcccagggactcaaacactttaatcagtatggtctggttgggaacacggatttttttgccctttaagtcgctgaccccattcaccggctttttagtgatggtgtggcggattccgtatctccatgtggtcagtatcttcagtcccacattctgttccagctcctctgccttgccctcaaaccaatcgctgtccaccaccttttccaggtcctcccatccctcaaacagatacggggcaaagagaacgccaaagtcctggattcccctgtcctggaaaaaagggccgttggccagggtgaccacgcagtccccgttcacagcctggtcgatgatattgtccttgcttcccagctggctggaaggatacaggtccactctcatggtgcctccgcttttctcctccaccagtctcttccattcatggcaggccaggtcaatgggttcccccggattgttctcatagccaatcatgatgcggaccttcttaccgctgccctctgctgtctgaccgctgtccgtctggctgctgcatcctgccagggataaggccaatgtgcagcttaccagtaatgccagtaccttcttcattacttcccctcctgaattcttattccccgcggccgggccgccggatttatgtttcctcgtctttaatgcccttattatatcgttgggacaggtgttttgtacattcactctcattcctttttcttttaaaatctttccctcacagaattaaactaaaataagcgcaaaacaggcgcaaaaaaagaccgtatcctgtaccgtgattgtaaggaaacggtctgtcttatctcagtgcctgtccgcggacatcacacgttcaggcagctcccgccgataaactccctgagaatggaattttttggaatatcctcgctgctgacgccgataaagtagtccaggaatttaaggagccgtttggcctccagccactcctcactgtcctttggaatggcaaagagcaggggctgggcgtactgcttcagcactgccagctcatagaccagggcagaattgaacatggcgtccgcctcctcctggaaggggaagatattctcctcctcacccctgcgcacagaaggccacatgcggatggtctcccgggccgaggagcctcttgtcctggcatcccgcaccattcttctcagaagccgcccgtccgtggtgggaatgcggttgtgctcgtcgatgttaagctgggtcagggcgctgatgtaaattttaaatttgctgtctgccggaagggtgtaggaaagcctgtcgttcagacagtggatcccctctatgaccaggatatccccctctcccagctggagaaaattccccttgtactccctgactccctttttaaagttataatagggaagctccacctgctttccctccaaaaggcctgtcatgtcacggttaaacagctctacatccagacattccagaatctcataattgtaattgccgtgttcatccctggggctgtccacacggtttacaaaataattgtccactgcaatgggatggggctttaaaccgatggcctccagctggaccgacagacgatgggaaaatgtggtcttgcccgatgaggacggacccgcgatcatgacaaagcgggcattcttcctggctgctatctgagccgctatctcagcaatcttcttttcctgaagggcttcctgtatcaaaatcaggtgggacatatccccctttgcaatcctgtcattcagggcgcccactgtctccagatccatccgccttccccactccgtggattcagacagggtggcgaacagcttatcgctgggcgtaaaccggtggaggacgtccggcgttttcctgtcaggcatcaccatcacaaacccgtagtggtagggaatcaggtcaaaatgcttgatgtagcctgtattctgcaccatatacccgtaataatagtcctcaaagccgtcaatgctgtagatattgacccgggataccatgcggtaacggaacagcctggccttgtcatacatccccagcttctcaaaaagctcaatggcatcgtccgtggatacgctgcgcttcataataggaatcttccgctccacgtactccctcatcttagcctttaccgcatccaggaattcctggttcaggacaaagtttccccgggcctccacaaagaatccccggccgatggaaaaatcgatcatcagcttttccacattgccggctcccgccacgctgtagaatgccttcagcatcataagggatgcactcctctgataggcggacattcccggcttatcctttgccgtgacaaaggacagctcgcagtcctttacctgtttatgcagctcctggagctttccatttacccgtaccagcagaatgtcatattcatactccttctggtgctcacgggccacctccatccatgtggtgccctccgggtattcctttgtgataccgtgtatcttaaccagtgccattccacttacctccctcattttactgaaaccggttctcctgtcacacaatcatggctggccactggggcggcgcctgctccagctcaacctggcttcccagattcttcctgagaaattcagccatataggggatgaagatatgctccaggccatagtggcctccgtcgatgatggccatgcccctggctgccgcgtctatcccctgatggtggctgatatcccctgtcacaaggacctgggccccccaggccagggccccctctatttcgcttccccctgctcctgggcatacggatatacgggaaaccttctgctccataagttcgtccccgtatacaagggcaaagggaaggccgaatacatcctttacacggaccgccagctcccttacagtcatttcctcctttaagaatccgcttttgccgatgccgtaggaaacagcaccctccgggccgctcatctcccccagtgcctccagaggaacgcagccagccaggcccagccgttctgcggccaaatcagccatacagcccggggcggcatcaaagttggtgtgcatggcataataggaaatgtctgcctgtatcagtttcaccagccttctggtaatgaagttctggtcatttaccttcttgatggccttgaatatcaggggatggtgggtcaaaagcatatccgcccccaaagcctgtgcagcctccactaccttgtccgtggcatccagggcaatgtatatcttttttacttccttgtcgcttctgcccgccagaaggccgggattatcccagtcacaggcgcagtcctccggcgccagtttcctgcatacgtccataatctcactgcatttcatcttgtgcctccttaatccaggacagttccttctgcctgcttattctggcctctgccctggtctctgtgtcggtaatcccatctttctcctgaaggctaaccaggattttctcaattctgagcatctccctgcccagatattccctcaggatcacatcctttttatcaatcagaatctttccgtaaaggtaatgggcctggctctcatactccatgaagccccttttcacgctcatcaccgtataatattttccctcgtcctttaccatggcttcatcctcaatggcaaaaccatgggcggccagataacgccttaccttatccaagtccgactgcggcgacaggacgtactgttttacgctgtcccacacatggcggccctcatccaggatttttataatcagctcaccgcccatgcctgcaatgataaccgtgtccgcctcacccggtttaagctcctttaaaccgtcactgagccttaaatgaatgggaaccgcccaaacatcctgcctgcgcgccctctcccgctcctcatattcccttacatgggcctgagccctctccagggggccggatcttacgtccatggccagggcagaggcaatacgccctgtctgggccaggtatacgggtatataaccgtggtccgtacccacatcggcaatacggcttccctgccttacaaaaccggctacggtcaaaaggcgggctgacagttttatggtccccgcctgttttcttttatctcttgtctctaacttgtcactattcatccagataatcctttaactttttacttctgctgggatggcgcagcttgcgcagggcctttgcctcaatctggcgtatcctctcccttgtcacattaaactgctttcccacttcctccagggtcctgggacgtccgtcgtccaggccgaaccgcaggcgcagcaccttttgttcccgctctgtcagggtcagcagcacttccatcagctgttcatgaagaagggtaaaggctgccgcgtcctggggcaccagcacattgtcgtcctgtatgaagtctcccaggtggctgtcctcctcttccccgatgggggtctccagggacaccggctcctgggacatcttcatgatttcagatacccgctccaccggcaggtccagcctggccgcaatctcctccgtggttggctccctgcccaactcctgcaaaagctggcgggaggtgcgcaccaggcggttgatggtttccaccatatggaccggaatccgtatggtcctggcctggtccgcaatagccctggtaatggcctggcggatccaccatgtggcataggtgctgaacttataccccttggtataatcaaatttctccactgccttgataagccccaggtttccttcctggatcaggtctaaaaactgcatccccctgcccacataccgcttggcaatgctgaccaccaggcgcaggttggactctgccagccgtttcctggcttccgggtcgcccagctccatcttcttggccagctccacctcgtcctccatgcccaggagaggaatctttccaatctccttcagatacatgcgcacagggtcctccaggctgacgccttcgggaaccgacaggtccaggtgttccacatcaatttcttcctcttcatccagttccatttcctcctcgatgaaaaggtccgggtccagctcatcctctgttcccatgcggatgacatccaccttattctggtccaggaactcaaacagcctgtccaactggttggagacagggggctcctgaccgaaatagttcatgacctcctggtattccaatacatttttctttttcttggcttcctccagaagtcctgccagtttctcctcaaacacgtccgtcccttccataacttggtccatccttcctatgaaatgctgtcaatccagggagatgtgcagctgctttaaggctgcctgctgcctgataatctcctgtaactgggttatatcctttgcattgcggctggccacatccaggctgttctttctgaccttcatcacagtctccgaaaatgccttcttttgttcttcattgttcagggattcctttaaactggcgttaaacagggccgccacctccttgtactggtcctcatcattgataaaccggctgagtatggctgctgggtttaaattaccctccctgtgtccgtcaaataccatctgcgccacctgatgatacaaattctccacaaaatcatctgctgttatgatgccctctatcttctcaaacagggccggggtctctatgagccaggtgagaagcagtctctgggaacggcggattccatcctccttatccggccgcctgggtttacggctgccggaaagtccgctgccgccagattcctcctcctgtgtctcctggggcaccacacggccggaatggttcaggctttcacctgccttaagccccatggacatgcccatgcggtttaccaggcctctcagctcctcggccggaatcatctgctccctggccactgcctggaggtaattctcacgctccagggcctctccaaactggagaagcttcctggccgtctcctggtagaacctggtcttctgctccggatcatccatctcatatccccgccgcagtacatccacttcaaagagaaagctgtttttggcttccttgatccgctgccggaaagcctctgcccccatgttcttgatgaactcgtccgggtccttatagggcttcatgttcagtaccttgatggacatacccacttcctttaaaatgggaatggccctcagcgccgccttcaccccggccccgtcgctgtcataggtaaggattacctggtccgtgtaccgtttcagcacattggcgtgctggctggtaaaggcagtgcctaaggacgccactgcgttggtaaaacctgcctggtgcagggatatgacgtccaggtacccttcacaaatcagtagatatccttccctggaaagcctggcataattcaggccgtaaagattgcggctcttgtcaaaaagttttgtttccggggaattcaggtatttcggctccccgtcccccataacacggccgccgaaaccaatgacacggttgttcacatccatgatggggaacatgacgcggttccagaacttgtcccttccgccccgttcctccagcgtcaccaggcctgtatccttaagaaagctgtcctcatacccctttcccttcaggtagcggtacaaatcatcactggtcttattagaataccccagtccgaaatggacgatggtctcatccgccagccccctcttaagatggaaataatcataggctgccttgccctggggctgcttcatctgataatagaaatagtttgccgccagcttgttcacttccagaagcctggccctcagatccgcctgctccctggcctcgcggctgtactccattttcggcaggttcacgccggccctgtcagccagggatgaaagggcctcctggaaggtataattttcatattccatcagaaaggtgatgacgttaccccctgccccgcagccaaagcaataatacatctgcttccccggcgatacggaaaaggacggggatttctcattgtggaaggggcacaggccgaaatagttggccccctttttctgcagtttcacatatcctgaaatcacgtccacgatgtcattcttcattctcacttcttctatgacttcatcgggatagtacatgcaataatctcccttctgtatcttttaatgccggctgtctatatacagccggattgtcagtacacgttccaccgctttggaacgaataattcctcaaactggtcaatggcatagatatcgctcatgccggcaatgtagtcgcacaccacccgggacttcttctcccccttgttgaccataagaagcacatactccaccggcagcttatccacatgccccatataatactcatagagctgggtaatcatgttctgggcctttccctcctccgccttgggtatatcgttcttgtatacattatcaaacatccatttgcgcaggccctgcatggcctcctccatcccctccgacatggtaatggcaggtttgtccatgctgttcagtatgatgtcgtgaatcatgttgttgaggcgttcccggacactgtggcccagcacatcggtataacccctgggcagctcatgctccgtgaacatcctggcccggatggcgtcgtctatatcgtggttgatataggctatcttatctgacagacggacaatggcgccctccagggtggagggatgaccggaggtcctgtggttgcgtatgccgtcccgcacctcccaggtcaggttcaatcctctcccgtccttttccagcacctccacaatgcgcacgctctgctcatagtgggtgaatccgtcctcgcatatcttattcagtatgtattcgccggaatggccgaagggcgtgtgccccagatcatggcccagcgcaatggcctctgtcaggctctcattgagccgcagggtcttggctatggtacgggctatctgggatacctccagggtatgggtgagcctggtcctgtaatggtccccctcaggcgccagaaacacctgtgtcttgtgcttcagccgtctaaatgccttggagtgaaggatgcggtccctgtcccgctggtactcaggccgcatatcgcacagctgctccggcttgtcccgtcccctggtcctgctgctaagggacgcataggggctcatgtacgattcttccaatgcttccagtgactccctgatattcatccatccactccctatctctattattatattgtcggattcctgtttttactacaaaaatttcaaatattgcgtaagcaaaagagcatcaggccggtaaacagctgcctaatgctcacattatatcataaattctaactatttcctagaggcagactgtccctcacacaaagggttccataccccagcctctcattgggccacacatcataccccggcaggtgcctggcccctctggtaaaatacgcctttaccttctcgccgtaaagaaagggatcgtttccctgcaatattccccactgcatcagcagggctgcgctgcctgtgacaaagggggctgcaaaggaggttcccgtcactgcctcgtatccgcctccccgcctggctgtgacaatatccaccccgggagctgccagatccggttttacctggcctgtctggcgtgtgaaaccgcggccggaaaaatccgcgtaagcgcggtaagagtcatcgtaagctcccacggatatcacattggcagccgtggagggaatggtcagggtggtctccggaaccggccttaaaaagcgggtggacgggtttaaaatccccctggacggcagccacatatcgtaccgtccggtgacaatccgctccggcgtcagacggaaggtccagataccgctgtccagataatccctcacaggcagaaagtcaaaatatacctcctgggccctgctgaagggactgggcttgccgtaataaatcaggatctgcgttcccccgtatcgcagggtctggggacccagccggctgtggatgggcccgataatctcccctgacggcgtaaccaggcggatggaaaactggtccacataggacttccacagctgtactcccatccctgtctcataaggcgcaatggacagctgcgcattttcctcctgtcccataaccaggcttcctgccctgtgtccggccccggttccctcgttgcccgtgccggccacgatgacattcctcccaatgcctgacatgtcattgatgaaggtttccagcagactggtcccgtcatgggagccgtaggtatttccaaagcttatgttcacagccaggggccggttcatatcctgtgcccgccggaccaccaggtccagggccttcatcagctgggtggtacgcggaaagctgtccgtcaggggtgtccccagctttaccaccataagttcgctctcataggcaacaccgcggtaaacaccgtttccctccctgccgttgccggctgcaatggcagccaccgctgtcccgtgtccgctggggtctgtggaaggcacaagggccagggccgatgtccggcttccggtttccagggcggcgttgatctcctccctggtataaatccggtccctgtcctggtctgccagcagcccgatgcgggtggttccgtcgggatttctgaaatccggatgaaagtagtcaatgcctgagtcaatgacagccaccagaacgccctttcccgtgagaccggattccaggctgcttatgacgccggcccccgctccccctgtacccgcgcctccggcccctgccccgctgctggtctgaatcgtgcttagacaggaggctgcccttgccatgttgctggcaaagaacagcctctttggtttctcgatgtatacaatttgctccatggtgctgacctgttctatccggctctccggcaccaccagaaccgcatatccggctgccagctcatccacccggatgccttcatcacgaagggattcgagtgagccgttgtacctgactataagctcccaggtcttttccccggggtcataccccacattcaggtttactgatttcagccgttcctcctccgtggcatccagggccaggttcagcagattttcccgtttctgattatccatatgggcgcacctcctctacccatatgtgtattcctatccccgcacaatagaataaatactggcaaatcccgtcaatgtaactgccgccaccagaatcggggtgagaaaacggatacagaatatccacagctttttaagcctgaaggtgacgccgtttttctccacctcgtccaccagataccggggattccatttccagccgataaaatagcacatggccaggccgccaaatggaaggagtatgttgtctgtcaccattcccacaaagtcaaagacgctgtaattgaggatagtcacattccccagggtgccgaaggacagggcgctgggaactcctgtcaggaaaatcaggagtcccaggatgaccgtagcctttttcctggtccacttaaggctgtccactgcaaaggagaccaccacctctaacagggcaatggcactggtcacagcagcaaacagcaccagcgcaaaaaacaggattgcaaagaccgaccctcctttaatggaggcaaacacctttggcagggtgccgaatataagccccggtccctgtcccggctccagcccaaaggaaaacactgccggaaagatggcgatacctgccatcactgcaatgatggtatccagtcccgccacgctggcacagcttctgggtatattttccttatctcccagataacttccgtaggtgatggtaattcccatacagaggctcagcgaataaaatacctgtcccagggctgcgctgaccgccttcatattaaaggctgcgctgctgggaataaagatgaatttaaggcccagaaccgcgtccggcagggtcacgcttctcacgataattacaatcagcagcacaaaaagcaggggcatcatgatcctgctgacattctcgataccgctgataccgtgataacagacagccgtagtcataaagaggaacaggaaatgccagaacaccggctccgccggcgcgctgataaatgcctcaaaatcctccggtgcgtggaaggtggttccatagcttacaatatacttgatgatccagcctccaatgacactgtagtaggacagaatcaggaatgccgccgccactccgaatactccagcaatcctggcattggggtggatatccccgtatgcctgcacgggatcgtggcgtgtctttctgcccagcgacatctccagcatcatcaccggtacacccagaatgcagataaagaataaatataccaccaggaaggacgccccgccgtttcgtcccatgaggtaaggaaacttccacaggtttcccagtcctatggcagcccctgcggttgccatgataaatccaagtttactcgcccattgattcttagtcttcataccagtacctttccgtgtctctttttaatgaatatgaataacagtccgctgactcccatgaagatgggataaaagcagtagggaatgatttcaaagggagtcaggcctgtcaggctggctgccgccagaagctgggccccgtagggaatcagtccctgtcccatggagctgaacatgtccaaaagggacgcggagcgcctgggcgtcacgccgaagtcatcgctgatctcctttgcgataggaccagccatgacgatggccactgtgttattggccgtacacatgtctaccagcagagccagggcagcgattccaagctctcctccccgttccccgttaattctctttttgatgaaggaaagaatgaaggcaatccctccgtactcctttaccagggcaacgatgcaggccacaatcacggatatcactgtgatatcatacatccccgtgattcccgctcccacatgggtgaacatttcccccaccccaaaggcacctgtggccactccggctatcaggctcagcacagtaccggtcatgagaaccagaaatacgttcacacctgccagggcacctgcaagcaccaccatataaggcaccacccgcagcaggctgtagtcaaggctgccctgtatacggaacgaagcgtcctttcccaggaccagaaacaaaaggattgtgacaatagctgccggcaatacgatgagaaagttctctctgaacttatccttcatctcgcagccctgtgtctttaccgcagctatggttgtgtcggatatcatggacaggttgtccccgaacatggcgcctcccaccacggcgcctgcgcagaccgccatggaaaacccggttttctggctgattcccaccgcaatgggcgccagggccgtgatggtacccaccgaggttcccatggatatggatatgaaacacccaatgagaaacagtcctgccacagccacgttggagggcaggatggacagccccagactgaccgtggaatccacgcctccggcagccttcacagcgcctgtaaaggcgcctgctgccagaaatataagacacatggtgatgatgttttcatcccccacgccttgtgcggccagcttaatcttttccgcaaagcccagctccctgttctgcacaaaggcagccagaagcgcaatcaaaaaggccacaatggccggcatactgtaaaaatccccggtaatgaacccggatcccaaaaaaatcagcagaaatatcagaataggaagaagggccgctgcccttccctcacgattttcccccatgtttttgtccccctgtatcaaatgctggcgtatctcccgtatcatatcccccggtacatacgcaagctgcggcctgttgggccgcagcagctttatccttgttcaattgttccatatactattttaagaagccgttgacaatctgggcttccgcctcttcctctgtaagacccagggtcatgagcttcacgatctgctctccagcaatcttgcctatggctgcctcatgaatcagggccgcgtcaatgttgttggctatcagtcccggaatggcaaaaatcctggcatcgtccatgatgatagcgtcacattccgtgtggccgctgcactttgcattgcccacgattttggaattgaaggtctgcttcgatgtatccttggcaacggagcgtgataccacatccgcgctggaatcctctccgttcagattcacaatgtaagtactctccgcattctggctgccgtgggtcagcagacgttccctcactatcagcttggctcccgcggccagctctgcacagttggtcctgttggtggaatccactccctcaatctggaccatctccatctccatgtagctgttttcctccatgtagacttccgtgcccggattcaggatacgctttccgttgccgtcgccctccccgtaatgcttttccacatattttactttggcattctttcccacaaagaaacggtggattccgtcatgctccgaatcctggtctccgcagttatgaataccgcagcctgccacgatgaccacatccgagtcctcaccgatgaagaaatcgttatagaccatctcctttaatccgctggcactgaccaccacgggaatgtgtacgctttcgttcctggtgccgggcttgatgcggatgtcgattcccggtttgtctgtctttgtggcaatgtctatattggccgtggtattgcggccggctgtctggccgttggcccttatattataggcccctgccggaacaccgtgaaggtcggccacttcctctaatattctctcctggatgctgtctgccatatcgctcactcctcccctcactgcgctgtctcataaaatttactgcaggcgtccactgcggacgcagtgcccatgatctggggcatgatttcatccctggtgccctggttcactacctttccgtccgcaatcaccacaatctcatccgcaatgttgaggatccgctcctgatgggatatgatcaggatggaaccgttggtgttctgcctcatgcgctcaaacacctgaatcaggttctggaagctccacagatcaatgcctgcctcaggctcgtcaaacacggaaagcttggaagccctggcaataacagtggcaatctcgattctcttgagctcaccgccggacaggctggcgttgacctcgcggttgatgtagtccttggcgcaaagccccacctctgccaggtattgacaggcttctgataccgtcagcttcttcctggcggccaggcggagcaaatcaatgacctgcacgcccttaaagcggacaggctgctggaacgcaaagctgattcccaggttggccctgtctgtaatactcatatctgttatatcctgcccgtcaaagaggatgcgtcctcctgtgggccgctcaattcccatgattagtttagccgtggtggactttccgccgccgttggggcctgttatgaccacaaacttaccgtcgtccactgtaaagcttatatctttgatgatacctatttctcctttttcatcattcacatcaaaggagagattctctaaagtaagcatgatgttccttcctctcttcttttctttcacacactgtactgcttattttaagccacaacttacagtatataccatttcctactaaattactatcaaaactttacctcttatggtggaatttgtctgttgcaaatacatcagaaaccaccggattccaaaaaaataccgggaacgcaaaaacaggaagccattcagcttcctgttccatgaaccagtgcagaagatgggagtcgaacccacaaggtattactaccacacggacctgaaccgtgcgcgtctgccaattccgccacttctgcgttacgctgctctcgcaagcaacgtaggttattataaaggatgatttatgatttgtcaatcacttttcggcaaaatttttcaaaaaatacattcattggaagcggccgggaaaaatagtaaccctggcccagctcgcatcccatttcccggagcatcttaagctcctgggcggtctcgattccctcgcacagagaagtgaatcccattttgttggtcatctggatgagctggcccagaaattcccgtcctcttcctgtcttggtacaggactggacaaagccgcagtccagcttaatcacatccgtgggaatgtcggccatcatgttcataatggaataccctgacccaaaatcatctatggacgtgatgaacccttcctcctggagggtcttcatcacatggaaggttcgggcggaatcactgagaaaggcagtctctgtcaattcaaattccaggtattggtggtccaggccgcaggcccgggtaatctccaggatttgaggtatgagctgctctgacgcaatgtccacgcttgaaagattgacagatatgggaaggggctcccctccctgttccatccactggctcagctggctgcagaccgtcccgaacacataggtatccacctgggtgataaaaccatttttttcaaacagcgggatgaaatccctcggcggaacgattcttccgtcctcatgctgccagcgcaccagggcctctgcaccgacgatccccaaaccatccagtcccaccttgggctgtagatagaccttgaactcaccgtgtttcagcgcgtactccatgcggtttatgatttcattttcccggtaactgctgtcaaaggggccgtcattgaataccacggaggtggatcggataatatagtccactgatttcctggcaatagtggccctgtccaccgcggtctctatctcccggcagtccttttcaataaaatagatgccggaacggatcatcagatttatattggagtaaatttcattctccatccggcagaattcattgttcaggccctggaccatattcacaaaatcattgcggtccatcccgcacaccccgaagcttaagaactggtccgcactgacacgggtatagcagttggtctccagaccgttctgggtcagcatgtccccgaacatgcgcaggatattatctccctgggtataaccaatggcctcgttaatgaatttaaatcccttgatatcactggccaccagcacatactcttctttgccttcatccatcagcatctggcatgattccttaaaccggtcatacctcataagccccgtaagcgcatcgtgattccggtaatactccgcctcctgttttgcttcaatcagcatggatgtattcttgatgccggaggcgacgatacgggccatctcagaaacagcctcacactcagcacggctccactcacgttccgtttccgtgttcaccagaagtatcatgccgctgtacctgccctctataaatatacctgcagacagcatggtatgggcccctgccctgtccagaatccgcttcagccccgcattgtatgactcgtactccctgcgcctcaggaccgcaatcccgttcccgtcatagagatggtagaagatgtaaaactcctccctccggaagctgtccgtaggatcatacaataaagcggtcctgtcatccacccactgataagcggattgtttcccatggcctccctctccgttcatgtagagaacaatccggttcaggcggaaccggttgcccacaaatcccatcaggatatggattgcctcgtcaacggtggcggatttctcaaacacctccagggccacggccgtagtggtcttgtcatccaggctgctctgctcccggcgttttgcctccctggcctgtttcagataatcataggaaatgctgccattctccttgtcctccaccgcttcgtagaaaaggattcctccctttccggatttcttaacctgcaaaagggcctgatttgcctttacaatgatatcggaaaagttcctctctccctcaccagccaggcgaacgcccatactgcagctgatccgctcttttttgctgcccgtatccgacagtattccgcctatctccttctgaatggttctgcccgccgcagacgcgtcttccctgttggtattctttaaaagcacaagaaactcatccccgccgaagcgggcaatcaaatcaccttcccggcaggcctgcttcaggctgttggcaacattcatgagaaccacattgccaaaaagctttcccttctcctcattgattcttttaaaatcatccatgtccaggataaacagggccgtggtgtagggcgctggtcccgtttcaaggtattgctccgtctgctcctggaatgcccctgccgtcagcagattggtcagggcatcgaaggctcccttgctgctgcctcttacctttccagacgtctcctccagcacgttctccagtgttgcaagcctttgctccagtattctatgggccctgtcctttgtcaggaaaattcctataaccctggccacataggtcagcacctcaatctgttccctgctccactgccggttttcccggcactcgtcaaagcccacaaagcccaccatctgaccggagtcatagatgccgcactgcagcagggaacggaccccctgaggctctaatacctccctctggttcctgggaaggtggtcgatatccatgcaaaagaatacgccgtcctccccaaaattctccctgtatccatacgcgctccactcatatgacatatgctgcagcttatccttctggggttctatgccttcattacaccattcaaaggtattatccatagccagcccgtccaggcagtcctcaaaaatataagccctgctcacattaaactggagtccgataattttaaggatggtgttgatagcctcccgcaggtccgtggattcatataatgctttgaacacatagtggattaccttgtttgctacaaaataacggccattttcagaatctatcatagtgccgtccgtaaatcttcccggagcatgttttccgctgtccgcaggccttagggatggatcgtaaacaacgcagcggcccttaccccagttttttcctgcatagagagccatatccgctttcaggaacagctgctcgtatgtgctgccgtccgccggatacaccgctgccccgatgctgcagctcagcttgcttccgctctttttcacagaaggaaggctggcaatgtcttctatgagctgcctcccgcgtttcataatttcttccctgcctgaaagctgttttgaaaataccaggaactcgtcaccgccaatccttcccaccatatcctggctgtcaaaaacgccggcaatgcacctggctgcctctgtcagtacgctgtctccaaagagatggcctttggtgtcgttaatctccttaaaattatccagatcaatgaccatcagtgttccgtccggcgctttgtccccatcctgcatataccggttgacagactgtacggcagcatccctgttaaacagtcctgtcagcgaatcccgcatggacttttcccagtactcctgcttctggttctgagcctctgtgtcatctatcatcacggcatggacccagttatttcccctttcgtcctccacaacgcggccgcggaagtccacccaacagatgcctccgttcctggatcggattctgaactgggcctttataatttccttaccctgatgcagctgctccagcacctcatccagaaccctggcatgatccctgacatccagcattcccttcagagtccctccggtcaattcttccagttcttttgtgtccgtgcagccaaaaagactcagaagttcatggttaactatgtccagccttctgtcttcgcccgcgcagcaacggaaaaaacctgccggcatggaatcattcagcaagataatctgttcattcatatatatgaggtccatcctttgtctctctgtcttcatacactccgcgcccctgattgtgcgcgttaaaggtatatgccttgattatacttcactttccggggacttacaatataaagaaacaccataaaacttacaaccataaaactcagcaaaaaacaactgccggcaggtccaattcatcctgccggcagtcattcgcacatacacgattcaattatatcagctgtcttaagccctgagctcgattcccagcccgccaagtccgttgagtatcttgttcatcacagatgtgacttccttttcctccagggtgtggtccttggcccggaaggtaatggaatatgccaccgacttgtggcctgccagtacctgggctccctcgtacacatcaaagagcttgtagctttccaggacctttcctcccctctgctcaatcacatcctcaatctgtcccaccaggatatcctttggcaccaccatactgatgtccctggtcacagccgggaacctggctataccggtatacttgcggtcaaaggtggtgaaatccatgatggacggcatatcaatgacggcaatgtaagccctgtcgccaattttatagttatcagccacatccggatgtacctcgcccaggaagcctactactgcgccgtcatacaggatgtcggcctttcttccgggatgaaggtaaggatgctctgcactcggatcataatggggctttttatgcattccggccttttcaaagaattcttccaccacgcccttcatggtaaagaaatcgccgtccccgtacattcccagggtgaactgcatacgctcgtcaggaagctctgtgagaggcagtgacttgggacggtacacattggccagctcgtacaggcgcacgtccttgttgcggcggttatagttggttgacagggaggtcagcatgccgtttaaggaagtggtgcgcatgacgctgaaatcctctcccaggggattggaaatctccactgttttcctcagagcgctgtcctcaggaatcagcattctgtcaaataccttggggctttcaaaggaataggtcatgccctgggaaaaaccgcagaactccgctatctccctggccacctcctctatctgaagcttgtaggaaagctttcctgtggtggcttcgccggaaggcagtgtggtggggatcttgtcatagccgtagaacctggccacttcctcagccaaatcagccatgcgctccaggtcctggcgccaggtaggagcaatcacctcttttgtctcagggtcatagtccagttcaatggtcttaaagtaggaaagcatggtctcctcaggaatgtccgtgcctaaaagcctgtttatcttaacagcgtcaaaggggatccgcttactggtcctcttctcaggataaaggtcgatgatgccgcccacaacctctccagcccccagctcctcaatgagctggcaggccctgtttaccgcttcctccgctgtgttggggtccagccccttctcgtattttccggaagcatccgtgcgcagtcccaccttcttggcagacagacggatattggtgccgttgaagcaggctgactcaaataccatggtctgtacattatccgtgattttggaattctctccgcccatgatgcctgcgattcccacttccttttccccgtcattgatcatgaggatggtggaatccagctttctctcctgtccgtccagggtctggaatacatccccgtccttagcgcatttcaccacgatttcgcggcctgccagctggtcgtagtcaaaggcgtgcatgggctgtccgtactcttccatgacatagttggtgatgtccacaatattgttgatgggacggatgccgtttcccgccaaacggcgctgcatccactggggagaaggcgcaagctttatatttttaaccatcctggcgcagtaacggggacacagctcgctgttctccacccgcacattcagatagtcgtggatatcctcgccgttgcctgttggtgtgaccaccggggcatggaatgccttgccaaaggtggccgcggcctctctggctatgccaatcacactgtagcagtccacacggttggatgtaatttcatattcgaacaccacgtcccgcagtcccatgatttccactgcgtcggatccgggcacgctgtcccccggaaggatgtagataccgctctccggggcatccgggtacatatccctgctggctcccagttcctccacggaacacatcatgccgcaggactccacgcctcttagcttgccctgcttaatcctgattccttcctcaggaagggcgcctccgtcgtggcctcccgccacgcggcctccgtccagcaccacaggcaccttctcacctatggatttctccgtgatattgggggcgcctgtgacaatctgcaccggctcttccgctcccacgttgacctggcataccaccagtttatctgcatccggatggcccttgacctcaagaatctctccgacaacgattttttccaggttcttatccagacatgtataaccttctacctttgttcctgtgagcgtcatggcatccgtgtaatcctgggccgtgacatccaaatcagggacatatgcttttatccatgataatgctgtgttcatgtgttctctctccttctatgctgtgaatgtttatcagggcgcatgatcttagaactgtttcaggaaacggatatcgttttcatacagcagacgcatgtcgtcaatttcatatttaagcaaagcaatacgctccagtcccactccaaatgcgaatccagaatactcatccgggtcaataccgcacatctccagtacatgggggtgtaccataccgcatcccagaatctctatccagcccgaacccttgcagaaccggcagcccgaaccgccgcatttgaaacaggtcacatccacctcggcgctgggctcggtaaatgggaagtggtgggggcggaacttcacctttgtctcaggcccgaacagctctctggcgaattcagccagcgttcccttcaggtccgcaaaggtaatattcctgtcaatcacaaggccctcaatctgatggaaggagggggaatgggtggcatccacctcatcggaacggaacacgcggcccggcgcaatcatgcggatgggaagcctgcccttctccatggtacgcacctgtaccggtgatgtctggctgcgcagcagaatgttttcattgatgtagaaggtatcctgctcgtccctggccgggtggcccttgggaatgttcagcttctcaaagttatacctgtcatattccacctcaggaccttccactacctcatatcccattcccacgaaaatacgctccacctcttccagggcaatggtattcggatggctgtggcccacattgttcttcctggccggaagggtgacgtcgatgacctccctttttaactgctcctctctggctttcctggccagggcagtcttagcttcctccagtcttccctcgataagcccccttacatcattgaccatctggcccacctttggccggtcctccggggcaacatccttcatgctctttaacaggttcgtcagttctcccttcttacccagataagatacacggatgtcattcagtctctccagcgcttcggaagattcaatctgccttaacgcctcttctttgattttctctaactgctctttcatggcttctccttttctttgtaaccagatagaatcctgctcccgggattgtccgtccgcgtcaggcattcctgaagctgcaatccccggggaacatttttgcttcatgggatccgcgttccaggaaacaaaaaagccccgtctcttcatcactgaagggacgagactgtaaactcgcggtaccaccctgcttcctgtatcaccccagaacctataactggagtatacagacacttgatgcacgtaacgtgtgcctgcgtcacagactaccggaatcctttcacgaattggcgaaagcatccttttgcccgtacagctccggcgggaatttcaaccgtctatctgaacccgggcaggctttcagccggtggcctcccctctctgatggaaaataaacgtctactatgcaccttcatcgcttttgattatcaaatctaacctacattctagtcacattttctgaaaatgtcaagcggaaagccagaaaaacacatttgactttgaaaaaaagaaggggtaaagttatattcaggggccattttgtggcggtccttccaaaatacattacaaaagaaaggcatacccatatgattcatcgttatgaaactccctgtatggacctgcagcagattcatcagtccggccaatgtttccgcatggttcccctgccggaacatacatacccttcagtggcaaagaacggctaccggctcatcagcggcctccgcgtcctgcgcgcgtggcaggccggccctttcgtctgcctggactgtccccatgaggacctttccttctggctgtcctatctggacatggaccgggattaccaggctgtcatcgcctccattgaccaggaaaatacctacctgagggcagctgccatgagcgggacaggcatacgcatcctgcgccaggacccatgggagatgatcattaccttcgtgatctcccagcaaaagaccattcccaacatacgtcagctggtggaagccctcagcagccggtacggcacccttctggaagatggacagaaccgtgggaacggtgaggtccgggagaaagaaggggcccggagggaaggtgctgccctggaagaaagtctcccgccggccttctcctttcctgcccccagccagctctgtcttgcttccctggaagatttaaaggggcttaagctgggctaccgggccaagtacatccacaggctctgccaggacgcggtttcaggcaggctggacctttcccatctggctgcccttaactatgaggaagccatggaatatctcaccggattttacggaatcggaaaaaaggtagccaactgtgtgtgtcttttcggcctccaccacatagacgcgtttccggtagatacatggatcgaaaaaatcctgatggagcagtattttgacagaaaaaaataccgccgcatccccaaaaaccgtctctgcgaaacaatcgtagaagatgtgttcgggcgatacagcggctgtgccggcatcatgcagcaatatattttttattacgagcgcagcgtcaggcagggaagggaatgagctgtgtcactccataagccgccccatagacgggcgcaggcgtccggccaccgtcactgcaagaatgcagagtatataatccggaatcatggtgggcaggcagtataccgcaaagatggcgccccatcccactgtgtcgggagtcaccaccacaaaatgggtgatgaagtaaaagtaaaggattcccattccgtaataaatcacataacccaccgtggcgctaaacaggcaggccccgggctttgaggcgtgcatccactccactatcttacccatcacataggctgccagagcaaatcccagcagaaacccaaaggtggggcgaatcagataagaaggtcccccgccccgcgcaaatacaggaattcccaccagtccaatcagcagataggtggacacactgaggaaggcccttctggagccaagcaaaaggcctgccagaagcacaaagaaccactgaagggtaaaattcatggtgtccgctcccaccggtatgacaatcttaataaaggcccccactgctgtcaacgccgtaaacagcccgcataccgtcaggtcccttgcaattccgtgccgctgcaccattgtacggcttcctgtgctgcttccctgtctcattcactccactccttctgtctcatcaaaatctgcctgccggacaaatcacatcatgcccagctcaaatatcttccatcgctcccgcagccctgcttccctgcccaccgcaaaatccctggtgaacgctccgtccccccactgaggggctttctgcagggccttgggagaccatttctgcgagaaagagacccgtaccaccttgtactccttatatccgtaggaggccgccagctggtcgtaacgggctttctggtcctcatattcctcctgggacagggtcttaaacccgtggacaatgtactcctgtatataatatccgtctttaaaatcccggtcctcctgttcaaaattcagggcttccagctgatcttgcggaaacagcctgctgcacatgtcgaactggcccagacccttatacttataaaaccaggcagctgtcatctgaggcatgtccgcgggcatggattcaaatttaacatgcctgggaagcacatcgtcctgcaccgtatattcacttaccagcttttctccgccctttgccttgttggctgcagccaccccgaacatgatggccagacaaagcagtgtcagaccgcagattctgacggcctggggcgatatgttgcgtctgttcatattatgcaatcctttcatagccttttaacagctggcccgggacatttccctgtgttccatacagcacttgcgtattccctcggaagtattaaagaaccgtattccataggattttatcttgtccgtatccatggtcagatttctgggacaggaggcaaacctctcatcattgcgttttaatataccgccggaatcgcttcctgctaattccctgaggaacagcctggccgtgtcaaaggtgttgtaccggttctcacttccaaagttataaacacctccgggaagccccatggcctcctccagatggcgcaccacttcccacacataggtgattcccctgtaatcatggacaggaaactccacctcccgcctatcctttaacgcgtccgccagcttctgcaacagcccctggcccgccgctcttcccctggacggagcgtcatacatccaagtaagcctgagggccactgcatccggcaggtatgtgagcatggcttcctccgcccgtttcttgtctcttccatacacatttcccggctttccctcgctgccctcacggttgggctccagggaatgggatgtgttgtaaatctggtcggaactggtaaatatcatacggctgccggcgttcctgcatgccttggccaggttgatggttccccttacattgaccttctctgagaggaccggatttctttcacatgtacctgtgtttgaaattgccgcacagtgcaggacataatccggccggatagcctttataaaggcggaaaccgccacaaaatcctcaatatccagttccctgtgcgtcacccccactgcctcatatccgtccctgttactataatattcacaaatccgggaaccgagaaatcccccggcccctgttatcaataagcgtctgttcattctgtttttatgcctttctacagatatgataacattatagcccactaattcttacaattctttacggatttcttaatattttaacaggctcttctttaatatattatatcttccagggaaatcatctcatattccgtgctgtattcctcttgtgcaagacttctgtccctgtattccgcctcccctgtctgattgtcatagggatcgtttctcaaatgatccatgggcggctcaaactcatatccgaactctctggctgccggaagacggaagggatccagatttccaaagtaaaaatcccaccgctctgtctccccctcccggaaggccgctcctccgaaggaacagtccgcatagcgccagccatgggatgcggtataaaactgcgcccagtcatggcagctgatttcaaggggtgatgtatagagtcctgcctgccatctggccggaatgcctgccgcacggcacagggtgataaacaaaagcgcctgtatgccgcagtctcccttcatggatgaggccgcatactgcacaatgtcagtcagggtaaaataactccgcacaaatgaatacatcacatgggtggtgatatagtcatatatccttctggccttctttaaggggtccttttcctcccccacaatgtcagacgccagttcccgtatcaggggagtaaaccggatatggggcggctgctgcgccagccaggcatccatgggctctgcaaaaccatttgctccggttctctctttgatgcgttccgggccgctgtgttccaggctgccatgggagaagtccttgtatgcttcccggttttcaaaggaaaactccaccgaatatttctgccccttcctatgttttgtatggaagcagatggtgcgctgaaaggcatccgggcgcgcaatggtatactcctgtgcttcggcttccctttccccgattcttacgctgtggattttcacattctttacctgggcgtattcaatcggcagaggaagatagaccttgatatcttcgccgtcccgctccgcttcctccagaatcccaagtgtgccgcggatacaaaacctgcatccggcgcctccccgttctttcatggacgcaatggttctgttaagaagcgcgaagttttccgccttagaccggaccagttccaggtccattgcccggttctcatattctttcctggtcttcaagacatttttcaggaagctgctccggaagcgcacctctccgtccacgtaaatccagtccgctgcatcctcctcccacagggtttccagctcacagtccttaaaatcccttacattgtcccgcagtatgccaagggcctctgcccatgtataggggtactgtcccggcatccgcttaagaatctccttttcaatcataaggcgctttctcaaagcctggggaatatccttttccagcctgctgtcaatcctgcggacagccctgtcaaactcccctctccactttaacttttctatatcctccggcagcacaaccgccagagaatcaaaataactgttatccatctgaatctcccctttcattttccctgatgtggcttttccctgttacggcctcttttcccgccatagcctattccctatcataccctttttttgcctattgtacaataccattgcaccataccgggaatggacgcaaaaagcccggacaggctctctgtgccgtctgtccgggcttatacttttccgttctatttgaatatgcccttcttcttaggcttctcttcctccggtgatgcaacgccgttcatcgcgtcgtcaaaccgccttaaggcctctttctgcgcctggttcatacgctccggcacctgaaccaccaaagtaacatagtggtcgcccctgacactgcggctgcgcagcgagggaacaccttttccctttaagcgcaccttggtatctgtctgggtgcccggccttacatcgtactccacttcgccgtccactgtttttatgcggatagggcctcccagggctgcccgggcaaaggatatgggcaccgtggaataaatactggtatcctggcgcttgaatatgggatgctgggaaacaactgcctccaccagcaaatcaccgcgctcaccgccgccagtgccgggctcgccgccccctgccagacgcacgcactggccgttgtcaatgcctgccggaatggataccttgaatttcttgcgcactgttttataacctgtaccataacagtcaggacacttttccttgataacctgtccggtaccattacagtcaggacatgtctgcacattctgtacagtaccgaaaaaggactgctgggtgtacatgattttaccctttccattacacttggaacaggtctgaggggaagtgcctgccttagcgcctgtgccgtgacagctggcacaggtttctttaaagttaatctcgatctctttatcacagccaaatacagcttcctcaaatgtaatcctaacagaagtctttatgttggcgccccgtgatggtccgcttctggccctcccggacctgccgccgccaaaaatatcaccaaaaatatcaccgaagatatcgcccatatccccgccaaaatcaaagccgccgaagccgccaccaaagccgcctgcccctgcgcctccctgttcaaatgcagcatggccgaactggtcgtactgctgacgtttctgagggtcgcttaacacgctgtatgcctcggaagcttctttaaacttggcctctgcctctttatcgcctgggttggcatcggggtggtatttcttggcaagtttcctgtatgcttttttcaatgcatcctcatctgcatctttgggaacgcccagaacttcatagtaatctctcttactctctgccatgttgtttacctcttaatctatctgaacgccgcaaaactggccctgacaggcagtttcaaaagcactctttatcagccacaaagggggtagtggccggtttcccggctcctaagccccctgtttgttttatccggatttatttcctggatttattttacttccctggatttatacttccttgaaatctgcgtccacaacgtcatcgccgcctgctgcgtttccggcgccgcccatgtcaggacctgcctggcctgctgcaccggaggcctgagcctgctcataaacctttgcaaacagcttctgagcgctgttcatcagcttctctctgccggccttgatgtcctctacctgtgcgtctgtcatctcctcaaccggagcgcggttgatggcttccttcagtgaattaaggtcagcttccacttctgccttgtcgccgggagcaatcttatccccaacctcttccagggccttctcggtctggaataccatggagtccgcatcgttccttgcgtcaatggcttccttgcgcttcttgtcctgtgcctcgtactcagctgcttctttcactgccttatcaatatcatcgtctgacatattggaaccggaggtaatggtgatgtgctgctccttacctgttcccagatcctttgcggatacgtttacaataccgttggcatcaatgtcaaaggtaacctcaatctgcggaattcctcttcttgcaggcggaattccatccaggcggaactgtcccagtgtcttgttatcccttgcaaactggcgctcgccctgtaccacatggatatccacggctgtctggttgtcggcagcggttgagaatatctggctcttcttggtaggaatggtggtattcctctcaatcagtctggtagccacgccgcccatggtctcgatggacagggagagaggcgttacatccagaagaaggatgtctcctgcacctgcatcgccggccagcttgccgccctgaatggcagcgccgatggccacgcactcatccgggttcagggtcttgctgggttccttgcctgtcagctgtttaaccttttcctgtgcagctatcatacgtgtggaaccgcctaccaacagcaccttgcctaactcagaagcagtgatgcctgcatccttaagcgcgttctgtaccgggatagcagtgcgctctaccaggtcgtgggtcagttcgtcaaacttagccctggtcaggttcatatccagatgctttggtccctcggcagttgcagtgataaagggaaggttgatattggttgtggtagctgtggacagctccttctttgccttctcagctgcttccttcagtctctggagagccatcttgtcattggacagatccacgccctcagctttcttgaactcggaaatcatccagtttgtaattgcgttgtcaaagtcatcgccgcccagacgggtatcgccgttggtagacagaacctcaattacgccgtcgccgatttcgataatggaaacatcaaaggtaccgccgcctaagtcgtataccatgatcttctgttctttttcattgtcaagtccgtaagccagggctgctgccgtaggctcgttgatgatacgctttacatccaggcctgcaatcttgcctgcatccttggtagcctggcgctgggcatcattaaaatatgccggaaccgtgataactgcctctgtcacagtctcacccagatagctctctgcgtcagctttcagcttctgcagaatcatggcggaaatctcctgtggagtgtacttctttccgtcgatgtctaccctgtagtccgtgcccatgtggcgcttgatggaagagatggtcttatctgcgttggtaactgcctgacgctttgcaggctcgccaatcagcctctctcctgtctttgtgaatgccacaacggatggtgttgtccttacgccttccgcgttggcaataacagttggttttccgccttccataacagccacacagctgtttgtcgtacctaagtcaatacctataatcttgctcatagtcttttcctcctgattattttatgagaatttaagtaaatatccaatgtcaatttgccacttttaccatactgtgtctgaccacgctgtccctgtacatataacccttctgcaattcctccgccactatgttctctcccaggctttcatcatccacatgcatcactgcgttgtggtagttggggtcaaactcctggcctactgcttcaatggctttcacgccggcttcctccagtgttttccggaactgcttatatatcttctccataccctctgcaaggggtgttccctttgcatcctcaggcacggttgccaggcctctctcaaagttatcaatgacgggaaggattctctctatgatgtccttggctcccatctcatacatggcggacttttccttgtctgtccgcttgcggaaattctcaaattccgccatctgacgtttcacccggtcggtgagatcttctatcttttcatccctggggtctttcttcttcttaaaaaatccctttttttcttccttttcagctgcaggcgcctgctctgtatcttcctctgcgccttccggcacatcttctgccgtctctccggtctcagcggcagcctctgtattccctgcctccccggatccggcctcagaagtctgttctgttcccgcttcctgctctgtattcagggcctcgtcttccttttttaacgcttcgtctttcatatcttcactcacagcttatcacctttcatcttttttaaatgctgtatccagctgattcatcagattgcgcagagtcccaagaaccttttcataatccattcgcttgggccctataataccgatggttccccgaaggcctcctcccaaatcataattggcagtgaccacactgcagtccttcatggactgcaccgggctctcatcaccgatataaacctgaatgcctgcttcttcctctgtaccggaattgacttccgccacaaattcctgcagcacttctttatgttccagtgtatcaatgagccggctggccttgtcgccgtccgaaagctcagggtacttgaaaatgttggtggctccgctggtataaatctgcaggtcctcttcccctgccttgatggcctccgccacctcgttaagtaccagatccaccacctggctgtggatgcctgcatcgccctttagcttgctgataacatccagattgatatcctctatggtcagcccgttcaggctgctgttaagcaggatgttcaggttaaggagctcctcgtcgctgagattatcctcaatatcaatcatggtgttcttaatgatattgccttccaccaccacaaccaccagaagcttatgcttctccatcttggaaagctggatgaacttaagctttgtcttgtgataactggggccgctgatcatggtcgcatagttggtattagctgccagcacctgagccatcttctttaggaccagttccagcttatcaaccttttggaccatcatctccttgaactcggttacctcgctctccttatccagcataatctggtccacgtagaaccggtaccctttgtcggaaggaatacgtcccgctgaggtatggggctgaacgatataccccatctcttccaggtctgacatctcatttcggatggtggcagagctgagcttaaggtctgaatacttggaaatggtcctggagcccaccggctctccggtttccaggtatgtcttgatgatggcctttaatatagtcaccttcctgtcgtccaggagtgcatccaatggcatctgctcaccttcctttcttttattattagcactcaacgttcgggagtgctaacatctacattccataatatattccttctggagtcatttgtcaagagataaatccaaattcttttcatattatttaag

SEQ ID NO: 3367 - DNA, 4077 bp, Unknown
  gut microbiota DNA sequence
aagagcaagaactttaccctgacaaacggcagcgagggcggggatgtggccctgtcaggcgtgggtgtgaccattctttccaacggtatcatcgaggcaacccacccggaccttggcaagattcagatagggcgtattgatctggttacgtttgataacccctatggtctggagggcgtgggcaattcctacttcaagacaacggccaactccggcgatcccaagctgtgccaggcaggagagaacggcacaggcgcattaaagacctcgtccctggaaatgtccaatgtggatatctccacggaatttgcggatatgatagtcacacagagaggattccaggccaactccagaatcatcacagtatcggattccatcctggaagagcttgtaaaccttaagagataagataacgggagggtggtatcatgattatccttaaaaagctgaacggcgaagagtttgtgttaaacagcgaattgatcgaaaccattatggagacgcctgacaccaccatactcctgaccaacggaaagcatctgattgtcagggagtccaaggaagaagtggtaaagaaggtagtggaattccgcagagatgctttccgcggcattctggaacagattaaaggctgatgcagtaagataaaagttgaggaaaaggatgtaagggtatggatgtcttgtcaattttaggttttatattagcagttggactggtgatgtttggtatgacatttgaccaggagtctatgaggattgtgtaccataaccttaaggcttttctggatattcccagtatggccattaccattggaggtactcttggggttatgatgatttcattcccggcaggggcctttaaaaagattggaagccatctgaaaatcattgtcaaaccatatcagtacagccccacggattcagtggaccagatagtgaatctggccacagaggcccgcatgaaagggcttctgtccctggaggataagctgaacgagattgacgagccctttctgcacaacagcctgatgctggtggtggattccgtggattcggagaaggtgcgaaaggccatggagactgagctggaacagctggatgaacgccatgccctggaccggcgcttctatgagaaggcggccagctttgcgcctgcctttggtatgattggtacactggtaggactgattctcatgctgggaaatatgtcggatgtggacgctctggcaaagggcatggcagtggcgcttataaccactttatacggttcactgctggccaacgtggtctgcctgcccatggcaagcaagctgaaagcgcggcacgacgaggaatttctgtgcaaacagctggtcatggagggagtcctggcgattcaggagggggaaaatcccaagttcattgaagaaaagctgtacaagcttcttccggccagctataaaaaaccggcggataagggcgaaaagcaggacggaaataacgacggcaaaaagaacagcaaaaagaagggcataggaaaacgccgcaggtggaacaagaaagagattgaggaatagaaggagtaaaccatggcaaaggcagagggaggccaggatgtcaccgcaatgacagacgggcagatgtttgaagaacttataaagattcacgcacagtcggcaggggaggccatatcctccatcctgagggcagacatagagataggcgcacccagacttcaggagatgacaataaaggatgtggagtacggcatcctggaaccagccatctttgtaaagagctgcctgacctcccaggtggcaggcaacattgtcctggttcttcgccagagggatatgcaggtgttcttaaatgagctcatgggtgtggatgaccttccggatccggactttgtctttgacgatgtggccatgagtgcggcaggggagctgatgaaccagatgtcccatgcctccgcctcgtccatggctgagtatctgggcgacaccatggatttgtcagactgccagctggtgctctctgacggaagccaggacctggctcttgtcatcggggagccaaaggacgcaaaggttatggttgtcagctacaccatgaagattaaggatatggtggagtcagagtttatagaatgcatctcgtccactgccatggacagtctgacagaggagatacaggccagaagagcggcctgtgaaaaagcccgccaggaagaggaggaggcccaaaagcgcgcccttatcatggagcagaattccgtcatagggcaggacaggccctccggcacaggcgggggacagagccccgcagatgcagggacgcagaaatccgcatattcaggcgctgtccggggcaccacggcttccggcggcagatttatgggaatgccgggatccatgctgcaaaaccagtccatgaacggaaacctgagccttatcatggatgtgcccttaaacgtgtccgtggagatcggcaagacaaggcgccggttaaaggatgtgctgaatttcagcaacggcaccgtggtggagctggataagcagtcagacgcccctgtggacatcattgtcaacggacagctcattgcccggggagaagtggttgtgattgatgataactttggtgtgcgtatcagcgaaatagtaaatacgagaagcattattggaaatggtgaataaatttgaaacggtttaatatccttgtaacagcgggaatcatcggtatcatattcctgatactgataccccttcccacgcccatactggactttttatttatactgaacatatcattgtctttattgattcttgtgatgtccatgtatatcagagagacgctggaattttccgtgtttccttccctgctgctgatcacaaccctgttcaggctgggacttaacatatcatccacaagaaaaatcctgtttgacaatggatacgcgggacaggtggtcaagaccttcggtcagtttgttatccgcggaaacgcggttatcggttttattatattcctgattattgtgctggttcagtttatcgttatcacaaagggttccgagcgtgtggctgaggttgccgcaaggtttaccctggatgccatgcccggcaaacagatggccattgacgctgatttaaacagcggccttatcgacgaacagcaggcaagggaacgccggtctaaaatccagagggaagctgacttcttcggctccatggacggtgccaccaagtttgtaaagggcgatgccattatctccattatcatcacctttatcaactttgtgggcggccttattgtgggaatcatgaacagccagggaagcatacaggatatcatgcagatttacaccacctccaccattggcgacggcctggtgtcccagataccggccctgctcatatcggttgccaccggtatggtggtgaccaggtccgcttcggagaacagcctcagcgaggacctgacaaagcagttcctggcccagccaagggtgcttatgacggcgggaggcgcggccgcgtgcctgtgccttatacccggcttccctgttcttcagatactgattatatccgcaggcatggttgggggcggttattatctgtaccggcaccagaagagcctggtggaggagactgcggaagaactggtggagacagaggttaccagcgaggcgtcctattataagaatattgaaaatgtatacggtctgctgaacgtggagcagattgaaatggagtttggctacagcctgattcccctggccgatgaaggcaacggcgggaattttattgacagggtggttatgttccgcaaacagatggccctggatatgggatttgtaattccctctgtccgtatcaaggacagcggacagctcaatcccaaccagtacagcatcctccttaaaggggaggaggtggccaggggggacatactcatggaccattacctggccctgcctcccggcacggatgcagacgatgtgcctggaatagataccattgacccggctttccatataccggcaaaatggataagcggggacaggaagatacaggccgagctggccggttatacc

SEQ ID NO: 3368 - DNA, 205 bp, Unknown
  gut microbiota DNA sequence
tgtggtcaatgttcatatggtttttgaacagggtaagaagaatatgacttactataccactccctatggaaccattgaaatggggattgcggcgacgaatctgaatctgcaggagagtgatggcggtcttgatatgaaagtggattatgcgcttgatatgaaccaggagcatgtggcagactgttatcttgcgattaaggcacag

SEQ ID NO: 3369 - DNA, 311 bp, Unknown
  gut microbiota DNA sequence
acagacgaagagaccggccagaccattatctccggtatgggcgagcttcatctggatattatcgtagaccgtctgctgcgtgagttcaacgtagaggctaacgtaggcgctcctcaggttgcttacaaggagacctttaccaaggccgttgacgttgacagcaagtatgcaaagcagtctggtggtcgtggacagtacggtcactgtaaggttcacttcacaccaatggaagcaaacgcagaagagaccttcaagtttacttcatccgttgttggcggtgctattcctaaggagtacatcccggcagtcgg

SEQ ID NO: 3370 - DNA, 156 bp, Unknown
  gut microbiota DNA sequence
ggagcagataggcacgaccaaggaggagcagaagcagataggcacatccaaggaagaacagaagcagataggcacttccaggaagaagctggagcagataggcacgaccaaggaggagcagaagcagataggcacatccaaggaagaacagaagca

SEQ ID NO: 3371 - DNA, 256 bp, Unknown
  gut microbiota DNA sequence
ctccttacaggtctgctccttggatatcatgcctgcaatctgtccggccataacggttccgccgtttacatcgccttccataaccgctttgcgcagggttcccagagtcaggtactccagctcctcaaaggacttgccttcctgctccagtttgatgtattccctggtcatctggttcctgagtcctcttacaggatggccgtggctgcgtcctgtgaccgtggaatcaatatccttggccttgataatgcgctgc

SEQ ID NO: 3372 - DNA, 344 bp, Unknown
  gut microbiota DNA sequence
cccaggcagagaaaatcctggctgagaagggagagaatgtcctggaagagggaaagcgcaagagtaccctgcgggtatttttggagcagttctgcgacctgctggtggttatcctgattattgcagcccttatttccatggtgtcaggcaatgtggagagcacggtagtcatcctggctgttattatcctcaacgccatcttgggcacggtacagcatgcaaaggctgagaaatccctggacagccttaaatccctgtcatcccccaacgccaaggtgttaagggacggacagaaggtggagattccgtctgccaaggtggttcccggagacatcctgtacctg

SEQ ID NO: 3373 - DNA, 1273 bp, Unknown
  gut microbiota DNA sequence
attatttgtaaattactggaaatatgcgatgtactgtgtccatgacagcaggaaaaattttgaaggaatacggttgcaggaataaaaacttcttgacttgaagttagctccagatgataggatgatgagagataacaaaatgagaggagatttacatatgagtaaacatgtattagtcatatcagcaagcccaaggaaaggcggaaattctgatacactctgcgatgagtttatccgtggggtacaggaatccggaaatcaggcggagaagatttttctggccagtagaaagattggatattgtatcggatgcggtgtctgtaacaccacccataagtgtgttcaaaaggatgagatggcagagatactggataaaatggtggatgcagatgtcattgtactggctacaccggtgtacttttacaccatggatgcacagatgaagacattgattgaccgcacagttcccagatataccgaaattcagaataaggatttctatttcatagtggctgctgcggatacagaacagaaaatgatggatcgcaccattgaaggattccggggatttacgcaggattgtctgacaggagccagggaaaagggaatcatttatggaacaggtgcctggcaggcaggagaaattaagggtacgccggctatgaagcaggcatatgagatgggaagaaatgtatagttgaaatataaaatgcatgatgggcctgagggtgtgtcatgcattttttcttttggacagctgcgattgcagggaatgaatgcaagaagggattaacgcaagaatgtgttgatgtgaacgcggcgggggagcttatagttaacgatttttcatttcgtgtggtataaaatatttatggagtaaagatatatgtgacttatagtccgttgctaaataagtcacatttcgttacgcttacctgtaagaggtgagggagatggagttttccggtgatataagaataaaagttggaaacaggatacgccaattaagaaaagaactattattaagtcaagagtccttggcgtttaaggcaggtctggaccggacctatattgcatctgtagaaaatggaaaacggaatttatcaattatgagtcttgaaaagattatagtggcattggactgttctatggctgaattttttgagacatttgaataaataaaggagattctatggggagggtgcaatatgaataaaaacttagaattatacagagatgaattagagatgcagggtaccaattttttcatact

SEQ ID NO: 3374 - DNA, 174 bp, Unknown
  gut microbiota DNA sequence
accggaagcatttgcgcctcatcaaatatgatgacgctgttggcaatattatgcagtttacggcattccgagcttctgcaggcatagagagattcaaaaaaacggacatttgtagtgaccaccaccggcttgtcccagttttctgcggccagctgctccatttttaattccttg

SEQ ID NO: 3375 - DNA, 1336 bp, Unknown
  gut microbiota DNA sequence
gcatacgctcaaacctatccccgtaatcctgaatcagcatggctatggagtagacctcctccccggtggaacatcctgcattccatatgctgcagccccccatcttccggttctcaaacagctccggcaatattttattattcaggatagaaaaatgggccggctccctcataaaataagtataattggtggtcaggcggttcaccatctcaccagccatctcaccggtcctgtcctttctcatctgctccatatactgggcaaaggaggtcaatccccttttttccagctccctggccatcctgcactcgatcagcacctgctttttttccagatttataccataattgtcccggatgtatcccacaatctcacagaactccctgtcattcaatcgtatcacattttttctcccatattcccggcatgacttccatcatcttctcgggttccccgctatcttcagctcccggttccccgatgactcctatcatagtcccgtccctgagtcccaggatgaatccacaggtacagccgccgctgtctcccagccggcagaacacaaccggagtcctttcatacagcatgattccgcagatatggtcaggcgcgccaggcacctgctgtatctgcggatgtatcaccacttgcttgataagatttttttccacatacacggtacagcttccgtcttttacggtcaccagctccatcattctgtctccttcacagcaccggccgtggtataagaagagacgggaccactataaacgccagttttcctttttcctcttccgcatccaatgccgccatgcgatccatatactggttccggctgcttctcaccgcctcaggaatggcatatatctgttcttcctccacctgtaccagaccagtcactacctctgcccttataccaatttccctgtcaccgcagtctgcaataatcagataggcctggtctgacaaatttccagcctccggcagctccaaaaagtcagccagggccatctccggctcccgttctttcatgtccgtcacccgctttacacaggaaagcggaagaaggaaatgagaacccgctgaaaaaaagagcaggtaggaattcacaccgtcagccatcctttttccctccccatgatttgagttattctgagcccttaacattttgtttatattctaccatatatgggagttatttactattggaaaattcaaaaaaggtccgggagcatatcccggaaccttttctagtccgtattaaaaaacagtttctttattttttctgaaaaatcaatccccagcttggcagcctcttctttcaggcgttccctgt

SEQ ID NO: 3376 - DNA, 10172 bp, Unknown
  gut microbiota DNA sequence
aattataaaaattttgaggcagtcatagaaattaccattggggaaaatgtggacgccgatgaactgaatattaatcttcaagattatatcatggaagagattatccccaatatagatgattatatgtggaatgagacacaggcaggtgataaatatcaatttaatgtaaaaatcattaataagtcccagcttgattatcaatacaaagctaatagttttgtttatacaattctcaatgacggcgaggattctggcttcgattcatataccggtcagatcattcctaaaggaactgtagtgtggaacatgggaaatacagctcttgcctctctgttcaactgcacagtagacagggttccttcctataacaaatggaatctggacaatttcaaatttacagattcaaaaggaatatcccatgactataccggagttgaggatttggtccggtattatcttgatttctacaatgacaaatatgatttgcaggtaaaacagcttgaccagtttccggattatgtgatagccgagatttttggatttaatcccacgcctaattgggatataggatttcagggccagaatgttggagcgcgtacaacggattatgaattagccgaagtggcttacaattatttttataattcatgtctgcggttatttgtaaatacagatagttatgatagggatgggctggaccggtattatttagagagtgtggatgcatcaacctattcacttggaagccatatgcgaagccgtaatgattatggcaccactatgatggaaccgtactttgcaggtgcattttccaacattcaatccggttcttcaaataaattggagaataatatagtcatggctttggatggtgactatacaactgatgcatatcaggtgaatcactttggtttcacatttggttttcagctggaaaagccggcgccagtatcaggaaccgttgtatttaatggtgaaaaggtattgactggacgtgatttttcggaggatgatgaatataccttttccttgaaaaagaatgattttgaagttgacaggattactataaagccgtttgaaaacaccaggtttaaactggcagacatgcttgccgctgacgagacaggaacacaggttgtgtattccatctctgaagtgggaggtggtaccactgtcaatgaggtgacttatgataataccgtatatcaggggatgtatgaaataatttttgatgaatcgaataacacattgattgccgtatatgctggcggaagtaatctggaacaaggcgtgatttttactaatgtatacagccatggtttcacaccagagactccaggcggaggcagcggcggcgggggcggcgggggcggagataattcaggcggacaccgtgccactccggatattaatggtcccggcataaccattaatccggaggaagtgccattggcttctcttcctgatgcgcctgttgttattgatgaagatgaagttcctctggcaccattgccgaaaaccggtcaggggactggcggaaccacatttactatgctgttgtctggtctgctccttgttctgacagccataagtaagaaaaagagggaagaatcctgatggttaattaaaacagggcttaaccaaccaatcaaaaacgctctccatgcaaaagaatccggagagcgtttttgactcattattcgtccatgtcagggccggttaaggaacacagatatcttatcggacagaatcataataacgatttttcaccaggctgttcataaaaccatcaacatccatttccgctccggtactgcaaatccttacagtagttaaaacaaaatcatttgactggaaaaagcagtgaacatttgaccagtgtttctgatagtccccaacataaccagtcaattggacatggctccatgggccagaacggtattctttagtatctcttaaaacaacagttgcttttaatgtggtttggaccgcatcagcatttccgtcctgaaaactggcatctgttgtgccctctgccgttctgaaatagtcggcttggtttctataatcgttaatgctgaagccaatcagccgggttccttgcgtatcctcaaaacgggcagaatttccatcaatccattgccatgtatgggccaaatatgtgccgtcgttgtttaaatacttccaatactccccttcctgctgtgtccagataggatgcggaaaatgtgttcacagtataggcgtccgtaatggcggccgcagaaatccataatggccgctgcataaatcctgtctttgacattttaagtttattttgatatagttacttattatagcgatgcaggcgtacctgcatgagctgagtaaaataggttgaacaggtctgctgctgatgtttctgcgtacagtttcatcgaaaaggcagttggcgggttcactgttttgttcggctctttttattttgggaggaaaacatatgaacgctgttatatgaaacgtattacagccccaaaactgccgtcagatggaaaacccatcaggatatattacattaaaacgaaaggtgaattaatatgaatctgaaaaataataatcaattacattttgaactggtaaatagtgagaaccgaatggaagccgaaaatctgtcggtcttttctgaacagtccggatttatcgaaagtgtaggcgaatgcttacaagaagcggacaacttaaatctatggcggcctgtttgtatctatgatggagaaatactggttggctttgcgatgtacggctattttccttccccttttccgggacggttatggctggatcggctgctgattgacaagagatatcagggaaaaggatatgggaggcaggccgtgcttgccttgcttgacagactccatgccgaatattcagacagcacggtatatctcagtgtgtatgaaaataatacaagggcaatccgcctttatgaacagattggtttctgctttaacggcgaatatgacacgaaaggcgaacatgtgatggtgtatctttgggagaaaggaagggagggaaaataaaatttttgttatgatataagatactttttaattccgtaaaaattaaggaaagatacatatataagtccgcctctttatgataaaattgcaatatataattgagcgatagatgtttggtaatacgaatggatggaagattagactgcacataccatgggaggagaattctatgaaacgttacgcacaacttgcatttttaaaagcactggtaattacggttggctttgatttgatttgtattatttacgggttgatatccggtaatccgtatagaatttcattgctgggtggcgtgctcctttttgcagtcctgttctctatcgggttaatagaatatttatggaagaaccgaaagaattaaggaggttacagatgaaaaaagtcacatggttaagaactttagtgactgtagtgttatcagtaacagttgtttcaatggtatatgtctttacaaaaggctggcctcttatgcgtcctcccaggatggaagatatcaaagaggtgacaatgacagatacagaatccggagttaaaaaagagtttgttgatgaagaaaataaagagctggctgttaaactaataaattttttaaattatgttcctttttccacggcatcggatacatatgaaccgcttataataatcacctatgttttggacgatggtactgaaataaaaatatccgcaaacaatacggaggttttctttaatggtaatggtcatcaattaaaggatgctgaaatctttggtaatttaacgaaggcagttttcttttcggaagagactgcaagagagagtgcgcaataaggagagggcaatgaaaaaaatagctttggcactaagtataatatttataatcttaacctttgccggagttgcctatgttctctataacagaggacaggtaaatgcaggatatgctgttgtacctatggtgttttcactgacttttacgtcttattacaggaataaaaagtaacatcctttggtgaattacgccgccattggaggcaatgagccgcgccccggaaacgccttgtattctcatggtttttccggattttcccgttttttttccagacttttccaggcatttctccaaggatgcatgacatttccccgctgctgtggtaaactgttggtatctcaacaaaaaggcggtgaagctatgtcaaagaagggctataccaaggtggagagggaacaggtggggcgggatttgctgacggtgggcctggaaatgctgtcccagcgagggctgaagggaaccactctccaggacatactccaggctgtaggcatctccaagccattcttttacggcaattattacacttccctggccgagctggtcatccatatcatcgactatgaaatttcacttttgctccgggaagtacggaacactgcgggaaataaggggatgagtctggaggagactatctatcattttttggatatggtggtccacagccgtcagcaccatttctttgtgatgacccaggaagaagaaatgtgggtttataaacatttaagcccggtagagtttgaggtttaccagcagggacaggcgcggttttatgaacaggtactggctctctggcagattccccaggaaaaatgcagtcccaaagagctgggcaacctgatcctctcagtggtactgatctataactcggcggcccggtcgctccctttcttctttccggaggagctggaacagacggccaaggcccaggcaaccgccctatcccgttatctggcctctctggccgatgcggacaaatgacaacaaacagcgcaccatttaagcggtgcgctgtttttctatgcgcaggtcttgctttttttccggctttcatgtataattcgcttaattactaattgaaaacaaaagtaattaaatgcatacatcgactggtcaggtaccggtgcagtgggatttgaaaggataataaagataagaattacagaaccgtttatcaggctgattttcatatggattttatataagccggatggaaaggagaaacacatgagcggcttatacactagatttatggaatggattatgccatttctggaagcaaactggcagctctttcttattatggcaggggcgttgttcttgctgggggcgatctgccgctggaaatgggtctgcgatcctcagggggaagatggattgggctttcgcgcttttgtctatcggaactttggagaaaaagggtatcgcatcctgcagggaatcggcggagctgtcattatcctgtgcagcgcggtgctgtgggtactgatgtaaaatcaatgatagaaaaggagaattatcatgggactgtttggatttggcccggtaaaagaggccggcggctgggaagctgccatgactgaggaagaaattgctgagatggagaaaaagggatatgatatgtcctctgtccgaggcaggcagacggagatggccgcgcaggaggaggcggacaaggccgcatttgcggaccggcggaaagctgccgccgtccctacggatttgaataagctgataccttaccgctccacaccccgcagtgcggaaagcagcttttttcgggatgtggccggaaaggcgcccctctttggcagggagaagtggcgggagaagtatgccaacgcccccatggtctacggtgcggtggtacaggccaacagcgacctttggctccccggtacaggagaatatcttcctgcggtttttgtatttgccctggacagcccccatatttacgatgtggaatggctgagggacacggcggagaaaatcagtgagatgaaagcaagcagcgccgtacccgccgactgtcaggagttcatccacatcctgcgggacgatcggagcgagttctgctttccgctgggggcttctctggctgacggcgcagacgcatggtgcgtcacctttaaattcgacaagcaggcgatcctgccgggaaaccgtctgccggaggatgggattgtgccgtttttgctggaagcgcggccgaaaaagcagatgcccattcagcttacaccaattcccggaaaatattatcaagcatgatagctgagaaagagcttcggaccgccatgaatccttccattcaaagactggattattagcactcaacaaaaatgagtgctaattttttattgacattttattcgtctcgtactaaaatgtattttgtgagtaaacattgcaaaacatgaagaactattattatataagaaagaggcggataaaagatggcaaagaaaggcagtttatcaattacaagcgagaacattttcccagtaatcaagaaatggctgtactctgaccatgacattttctacagggagctgattagcaatggcagcgatgccattaccaagcttaagaaactggagctcatgggcgagtacgagagaccggaggatttggagtacaaaatccaggtgtccgtgaatccaaatgacaagaccataaagatcacagacaatggacttggcatgaccgaggacgagattgacaagtatattaaccagattgcattttccggcgtccaggatttcatggagaagtacaaggacaaagccaatgaggaccagattatcggtcatttcggactgggcttctattctgcgtttatggtttccgacaaggtatccattgactccctgtcctaccagaaggatgccaaaccagtccactgggaatcagagggcggcattgactttgagatggaggaaggggataaggctgaggtgggaaccaccatcaccttatatctgaacgaggacagcaccgagttctgcaacgagtacagggccagggaagtgattgagaagtactgtgcattcatgcctgtggatatctttctggacaatgagacagcggagccacagtatgagaccattgagaaggacgagctgaccgacaaggataccgtggtggagaccgtaatcgagcctgccaggaccgaggagaaggaaaaggaagacggtaccaaggaaaccgtggaaatcgaaccttccagggaaaaatataaaatcaacaagcgccctgtggccttaaacgacaccaatcctctgtggaacaagcatcccaatgagtgcagcgaggaagattataagagcttctaccgcaaggtgttcagggattacaaggagccgctgttctggatacacctgaacatggattatccatttaatttaaagggcatcctgtacttcccgaaaatcaatatggagtatgacagcctggagggaaccatcaagctgtacaacagccaggtgttcattgcagataacatcaaggaagtgatcccggagttcctgatgcttttaaagggtgtcatcgactgtccggatctgcctcttaacgtgtccagaagcgctctgcaaaatgatggatttgtgaagaagatatccgattacattacaaagaaggtagcggacaagctgtccggcatgtgcaagacagacagggaaaattatgagaaatattgggacgacattgcaccctttatcaagttcggatatatcaaggatgagaagtttgccgaaaagatgggagatttcatcctgtacaagaacctggagggcaaatacctgacccttcaggactgcctggatgagaacaaggaaaagcatgagaataccattttctatgtgaccaatgaaaaggaacagagccagtacatcaacatgtttaaggaagagggcattgacgcggtgattatgcctgctgccatagacagcccgtttatctcacatgtggagcagaagaaggaaggccttaagttcctgcgcattgatacggaccttaacgcggcgttcaaggaagaagtaaaggaagacgatgaggagttcaagaaaacatccgaggagctgacggaatacttcaaaaaagccctgaacaatgacaagctggacatcaaggttgagaagatgaagaatgcgggagtggcttccatgattaccatatccgaggacacaagacgtatgcaggatatgatgaagatgtacagcatgggcggtatggatatgggcatgttcgggggtacgggagagactctggtgctcaatgccaaccatcctcttgtgcagtatgtactgggtcataaggaagatgccaatacatccaagatctgcgagcagctgtatgacctggcaagcttaagccacggccctctggctccggagcgcatgacagcatttgtaagccgcagcaatgaaatcatgatgattatggctggcgaaaaaacagattctgaaaaaatagagtaatcctgcataacacacggtattataacaagaaccattacaaaagtatgggaactggttgcaagagggaacttttgaaaccagttcctatttgcgttgcacgggcattctaaatcggttatactggaaatatcttatagtaggaaggagaggggttgtatgagaggtaaacgttttacggcagtgctgcttagcgcagtactgactgcggcaggcgcgatgactgcctgggcgcttcccacggggctcagcaccatcgcgggcagtacggtgagaagcagcatggctggatttgaggccacatttccggcaggttttgaggtgggaaggtatggaggtaacctgggattagattatctgtcctatatggaagaggacggggtgaagattgatttcattgccgctgccattgatgaggagaatgaaagctatcttgccatggccggcatagtggcagacctggaaggcgagagcctggagggagtcatgcaggagatgcttcagatgctgggccaggatgcatcctatggttcctatgtagccatgggaacggccggcatagcaggagctggctattactctgttaagattaattacggagccctgatggcgcagtatatgtctgcctggatgggaagttatgacatgaccccggaggaaaagcaggaatatgacgcctacatggaagaactgtccaaccgtatgttcctggatgtctacatgagggagattggcggaaactgctacatgctggtccagatctattccggtgaccaggcaggaaacgcagccctgcttttaagccagatgcagccatacgcaggaggcggctggagctatacggaggcaggcggatggcaatatctccacggggacggtaccttcggcaccaatgaatgggccttggacgagaacggccttacataccgtctggacggcaacggccaaatcatgtacaaagcgtggattgaagaaaacggaaggtggaaatatgtggatgaattcggccacatggtaacaaacctgaccaagaccatagacggcagccaatatacctttgacgcccagggctacatggtagaaggaagccagcggccggcccaggcctatgaaacaggtaccatatcgggaaagacctacagcaaccgctgggccaatctgtttatgaagttccctgaggcagcagaactgatgctgggcgatggaagctattacagctatcccttggaggctggtgagaatatgtactactggtacgacggaggaaccggctacctgcttaccatagactacaccgattccacccagcagctggaccgctacctggaatggctcattgattatgcgggctattatgattacacagttgacagcacaggtaccgtaaacatgggcggctacgaatacaagtatataaagacctccggccagaacagcgacggcaccacggagcatgaggacacctacttccgccagatagacggcaaacttatggaaatctccatcgaatacaccggcgaccgtcaagccaccattgaccagattttatcagccatagagcaggcccgctgagaagccggaatgatataaaaaaccggaatgaaatttcacacagacaataacattaataatcacaccagcatcagccgtattttttacctccccatttaatccttatgaatgggagcaggcggggcaggagaggcatgggtatctgcggggtaagaaggccaaaagccttcttaccccgcagccgtccaatcatccccagccgcccgtttccaccaacggggctatcaccccatccggtccttcttccaaaaaatc

SEQ ID NO: 3377 - DNA, 44960 bp, Unknown
  gut microbiota DNA sequence
taatgaatactacatgtgaaaagacatggataagaaaaaccggaggacataattatgacctataagattatcggggatagttgtcttgatttaacagaggatatgaagaaggatcccagatttcagatgattccgctgacactgcaggtaggcagtgcccaggtggtggatgatgagacatttgaccagaaacggtttatagagatggtaaaggcgtgtccggaatgcccaaagacagcgtgtccgtcaccggagacctttaaggctgcatttgaggaggcggaagcggaagcagtatttgtcatcactctgtccagccacctcagcggaagttataattcggcggcagtggcaaagaagctgtatgaggaggagatggcggaaaaaggtatggcggagcaggccaagaaggtggctgttattgactcgctttccgcatcctcaggggagttgaatattgccctctttatccaaaacctgtgcgattccggactggaatttgatgaggtggtggagaaaaccctggcatacagggacggcatgaatacttactttgtgctggagagcctggatacactccgcaagaacgggcgtctgtcgggcctgcaggctttttttgccacagccctcaacattaagcctgttatgggcgcggatacaggaaccatcatcaagctggaccaggccaggggaatgaacaaggcccttcagagaatgtgcgatattgcggtaaaggaagtggcggacgcggccggtaagattgcggttgtctgccatgtgaataaccctgagcgggctgaatacgtaaaggatgagctggctaagagggtgggattcaagaagattgtggttaccaacgcggcaggcgtggccactgtatatgccaatgatggagggattgtactggcagtctgatgtccgccaggagaggttttatgaagagaacaggatgtattgtggcagcagccttattattagggctgctgctggccggtattacgggatatttaatatggcactcagcacaggacaaatatgtcagggctgagatggtaggtgtctcgggaggcaccggcgtggctggcgtggaggcgccggaaccggaggaaggggacggggcagaaacaggcgccgccgcagattcggacggcgcccaaggaacagacggcctgcaaggaatggacggcgcccaaggaacagacggcccggatgcagcggatggcggtttatccgcccattcagacaatgctgaagcacaggggcccggaacaggaacatcggatgaggactctccgctaaaacttgtatttgcaggggatatccttctctcagaccacgtgctgggcgcataccggaaagcaggcaatataggcggagtggtggacagcggattccgccaggtgattgacggcagcgatatctttatggcaaatgaagaattccccttcagccgccgcggaacagctgctgctgataagcagtttaccttccggctgccgcctgaacatgtatcaatgtttcaggagctgggaatagatatcgtgaccctggccaacaatcacgctctggatttcggtacagatgccctgctggatacatgcagcaccctggatgatgccggaatcctgcgggtgggagccggagccaatctggaggaagccaaaaagccggtattcatggaggcaaagggccgcagaatcgggttcctgggcgcgtccagggtcataccggagggttcctggaacgccacttccaagggaccgggcatgctcaccacctatgatccgtccttgctgttggaggagatcaaaaaggccagggaagtctgcgattaccttgtggtatatgtgcactggggaattgaacgtgacgagcggccccaggagtaccagaggaccctgggacagcagtatatagacgcgggagccgaccttgtgataggcagccatccccatgtactgcaggggctggaatattataagggcaggcccatcgtgtacagcctgggtaattttgtgttcggcagcagcattccgaaaacagccctgctgaccgtggaatgggacggggaggacgcgctgctgcggctggtgccgggcacatcctctggaggatataccaggatgctggaggatgaaggagaaaaggcgggtttctaccagtatatcacatccatttcctatggcgtgacggttggggaggatggaattgtggcgccggtggaggaaagagcggcagagtaggaggaatccgggacatacctttttccctgccaggtgttcctctccttgaaacggcggtgcagggtgtttaataccagccgtttgttgccgctccacagaggggccaggagaagggattttggaccgtcccctgtcaggcggtgaatggtcagttcagggggaaggatttccacacagtctatgacaaaatcaatgtattcctccattgtgaacatgggaaagggattggtgcggcagtaatctgccaggccggtcccttttaaaatgtggagaagctggagcttgattccatctatggggctttgggccagataatgtacggtttccgccatcatgagcctggtctcgccgggcaggcccaatatgacatggacaatgacggtcaggccagctgccttaaggcgtctgagggcgtcctcaaacacaggaagtccgtaaccacggcggataaaggcggcggtggaatcatggatggtctggaggcccagctccacccataccggtttcacacggtttaaatcctttaacaggccgataacctcaggctccagacagtccggcctggtgccgatggacagggctgcgacggcaggatgggagactgcttccccaaacaattgcttcagatagggcaggggagcgtacgtattggtgtaggactggaaataggcaatataagaaccctgtgagccgtcaggcatctttctctttacctgagccatggcctgctcgatctgccgggagacagccgtctgtctggaagcggcaaaatcaccggagccgccttggctgcaaaagatacagccccctgttcccagagtgccgtcccggttgggacagctcatgcctccgtccagggacagcttatagattttccggccgaactgctgcctcagctcatagtccagggagtgatatggttttccgttccattccattgtaaatacctgctttcttacatgatactgttttaagagattataacagcaaagcatgtccggtgtcatccttatttaaaaaaacgtataaagacaggagaatattgtattgttgtttttgtgccatgtgtgataaactgaattcagaagtttcagaaaagataggagaggtaagtcatgaaggtaaacgagacagtgaaactgctggagagcggcgccgccaggactcttatggcgcagctctacggggaagacggggtagaggccaatgtaaagcgctatgaggatttgctggccgggtatgagaagatgtttggcggggaaggggatgtgaagctgttttcctcacccggcagaacggaaatcagcggcaatcatacagatcacaaccacggcaaggtgctggcaggcagcattaatctggactgtgtgggggcggccggaacgaatgaatccaatcaggtacatattgtcagcgagacatataaccaggattttaccattgatctgaaccatctggagcccagtgagaaaaaggcgggaaccgtggacctggtaaagggacttctccagggatttaaggattccggctaccgtgtgggcggattcaacgcgtatatcaccagcaatgtcataagcgcggcaggggtcagctcatcagcctcctttgagatgctgctgtgctccatgctcaacacattttttaatgaaggccgtatgagcaccgtggcatacgcccatatcggcaagttcgctgaaaacaactactgggacaaggcgtccggcctgctggaccagatggcatgtgctgtgggcggccttatcaccattgattttatagagccgctggtacctaaggtggaaaagatagactttgactttggttcccaggaccacagcctgataattgtacagaccggcaagggccatgctgacctgagcgcggattattcctcggttcccgcggagatgaaaaaggtggccaggtattttggaaaagaggtattgtcccagatttccgaggaacaggtgatagacaacctggcagaggtacggcagtttgccggggatcgatccgtgctgcgcgcactgcatttctttgaggaaaataaaagggtggaggcagaggtccttgcccttaaggagaaccgttttaaggatttcttaaacaatataacggcatccggcaattcctcatggaaatggctccagaactgctttaccaacagcgattaccaggagcagggaatcacggttaccctggcgcttacggagctgttcattgcagaaaagcagaagggggcctgcagggtccacggaggaggctttgccggcgttatcatggcagtgctgcccaatgaactggtggacgaattcatacactatattgaaaaatgcacaggagagggaagcgcttaccaaatgagcatccgcccatacggagccatctgctttaatgacctgatttagccgcgtactgcttttttcgacataaaacgccgtgatttacggggctcacgcttacagttcccgcggattcctgtggtaaggcggggggatttgcggtataatgatgtcagagtatgcgggtatcagacatgctctggagcaatcagaacaagaggaggactgagcgggtatgattggcgaaaaaacattggaactcctgaagcaggtattggctgaaagcagctatacggttgccatctgcggttccgggatgatggaagagggaggtattctgggacttaaacaggaaggacgggcttatgagattgaacagaaatattcggaatcaccggaggagctgtttcacatttcctgtctgtccagaaggccggaacgattctatgaattttaccgcgaggagatactgaaaaagattcctgacatgactccgtctgtcagggcgctggccaggttggaggaagaggacaagcttcagtgtattgttaccaccaatattttcgatttgccggaacaggtgggctgccggaatgtgatttaccttcacggaagcatatacaaaaacaggtgcccccactgcggcaggctgtattccatggaagagatcagggattccagacatgttccccattgtaagaactgcaaaaccatgatacgtcccggaacctctctctacggggagatggtggacagcagcatcatgagccgtaccacagaggagatagccagggccgacgtgctcctggtgctgggaaccagtctgcggtcagaggtatacagcaactacatacggtacttccagggcaggaagatggtaattatccaccgtatacccaggcccctggatgagaaagccgatatggtcatatacgaccttccccagaatgtccttccccttctggtggatggcgggatttgagggagccggaaatacctaccgggaacattgacagctgagtgggataagatgggaaattagtaaaggccggagatggttccggccttttgcacgtctatgtctgtttattttctgtggaaggaatccagcagctggttctttgtgtgccacagctcattggacaggtccacatggactgtgtgggggttgatgagacgcttggactcatcccacagggtatccagctcttttttacagtagacctggatatccattaccttcggagactggtacacgcacctgccgtccaggaaaatggggatcatcagttcccgcatggtatagctgtctggcgccagcatggtctttttccatgtctctaaggggtcgaagagaaggagggaattgcgggtgtcgaattcctcgcccaccagacaaatcaaatctgctatgattttgccggtggccttatcataaatcctctgtatggtcttgttgcccgggttggtgattttctccgcgttttcggacagcttgattttcggcacaaactggcctgtggccttgtccatcacagcagccagtttgtatacgcctccgaaggacggacagtctttggctgtaatcaggttggtgcccactccccaggaattgatggtggctccctgcattttcaaggagttgatcaggttctcgtccaggtcgttggaggcggagatcactgcgtccgggaatccggcctcgttgagcatctttttggcctttttggacaggtaggccaaatcaccgctgtccagacggatgccgtagaagttaagaggaataccggcttctctcatctccttaaatacctggatggcgttgggtacgccggaacctaaggtatcataggtatccaccagcagaatgcaggcggaaggatagagcttggcataggtgcggaaggcggtcagctcgtcgggaaagctcataatccagctgtgggcatgggttccctttaccgggacatcgaacattttcccgcagagtacattggaggtgccgatgcatccggcaatcatggctgcccttgctccgtaggtgccggcatccggtccctgggccctgcgcagtccgaattccatgacgccgtctcccttggccgcgtagacgatgcgctctgtcttggtggcaatgaggctctggtgattgatgatattgagcagcgctgtctcgatgagctgggcctgcataatgggggcaatgaccttgacaaggggttccctggggaaaaccacggttccctccggaatggcgtaaatattgcctgtaaagcggaattcgttgagatagctcagaaagtcctcctcaaacatatccaggcttctcaggtattcaatgtcgctgtcatcaaaatgcaggtcctcaatgtactcaatgacctgctgcaatccggcacagatggcaaagccgttgccgtggggattggtcctgtaaaacatgtcaaatacaacggtttcgttggcgtccttttctttgaaatacccctgcatcatggttagctcatacaggtctgtgagtaaggtaagatttctctgctccatataggttcctccctgggcgcagccggtgtgctgtacgcagggtatgcggtgcggcaggattttgacggctgtgcagtaatattggttagtagtataacacatattctggaaaaggcaaacgaaatgataaaaatttaacaatcagagacagaacaactgatatgtcaaaataaacgaaaatcagatacacggttgacattttacgcatgcattattataataaagaagttaaatgaaaaaggcatagatggagacagtaggcctgcaggaacgcctcagagagccggagatggtggaaaccggtgcaagtaatgcagaactgaagatcactccggagctgtccggctgaagggatgcgtcagcagcgcatgataggccgggacgcgtttcccgcgttaagggaactcatatgatggtatgcagtaataggtggttaaacgaagcggtttatggctttcgtcctgttcgggacggaagccttttttgcttcatggaaggatatacaatctttttcacataccagaatagaaatctatcatgaatggaacggaggaagacgttatgtatgacaaagtccccacagaccttaagtttgtggaacgggaaaaagaagtggagaagttctgggaagcagagcacatctttgagaaaagcattaaaatgagggagggctgcaagccctatgtattctatgacggaccgccaactgccaacggcaagcctcatatcggccatgtggagacccgtgtaatcaaggatatgattcccagataccgggccatgaaggggtatatggtgccgagaaaggccggatgggacacccacggcctgcctgtggagctggaagttgagaagaagctgggactggacggcaaggagcagattgagcagtatggtctggagccgtttatcaaagaatgtaaggaaagcgtctggaagtacaagggcatgtgggaggatttctccaacaccgttggcttctgggctgatatggacaatccttatgtaacctatgacaacagctttatcgagtctgagtggtgggctcttaagcagatttgggacaagggtcttttgtacaagggctttaaggtggttccctactgcccgcgctgcggcaccccgctgtcctcccatgaggtggcccagggttataaggatgtaaaggagcgttccgccattgcccgctttaaggccaagggagaagacgcatatatcctggcatggaccactacgccgtggacccttcccagcaacctggccctgtgtgtgaaccccaaggaagactatgtaaaagtaaagacaggcgacggctacacctactatatcgctcaggccctggcagataccgtgctgggtgaagactatgaggtgctggaaacttacaagggcaaggacctggagttcaaggaatatgagcccctctatgactgctccgtgcccctgtgcgagaagcagcacaagaaagcctactatgtggtctgtgctgactatgtaacactgacagacggtaccggcatcgtacacattgcacctgcctttggtgaggatgatgccaacgttggccgcaagtacgaccttccctttgtgcagctggtggacgccaagggcgatatgacggcggatacgccttttgcaggcacctttgtgaaggatgcggaccccctggtgttaaaggatctggagtccagagggctgcttttctcagcccccagcttcgagcacagttatccccactgctggcgctgcggaacccctctcatttactatgcaagggagtcctggttcatcaaaatgactgctgtgaaggatgacctgatccgcaacaacaataccattaactgggttccggattccatcggcaagggccgcttcggggactggctggagaatattcaggactggggtatttccagaaaccgttactggggcaccccgctcaatatctgggagtgcgagtgcggacaccagcattccatcggaagcatcgaggaattaaagagcttatccgacaactgccctgatgaaatcgagcttcaccgcccatatattgacgctgtaaacatcaagtgccccaagtgcaataagcccatgaagcgtgtgcctgaggtgattgactgctggtttgattccggagccatgccctttgcgcagcaccattatccctttgagaacaaggaactgttcgagtcgcagttcccggcccagtttatctccgaggcagtggaccagaccagaggatggttctattccctccttgctgagtccaccctgctgttcaacaaggcgccttatgaaaatgtagttgtcatggggcttgtgctggatgagaacggacagaagatgagcaagtccaagggcaatgcagtggatccctttgatactctggcagcccacggcgcagacgccatccgctggttcttctacacctgcagcgctccctggattccaaagcgttatcaggataaggcagtgaccgagggacagcgcaagttcatgggtaccctttggaacacctatgctttctgggtgctgtatgccaatattgacaattttgatcccaccagatataccctggaatacgacaagcttccggtcatggaccgctggatgctgtccaagatgaattccatggtaaagacagtggataacagcctgatgaattaccagattcctgaggcagccagatctctccaggagttcgtggatgacttaagcaactggtatgtgcgcagaagccgtgagcgcttctgggcaaagggaatggagcaggataagattaatgccttcatgaccctgtacacggcccttgtgaccgtggcaaaggcggctgctcccatgattccgtttatgacagagcagatttaccagaatatcgtgagaaaggtggacgggaacacgcctgaaagtgtacacctgtgcgacttcccggaggtgaatgagtcctggattgatgcggagctggaatccgacatggatgaagtgctgaaggtggttgtcatgggacgtgcggccaggaatgcggccaacatcaagaaccgccagcccattgcccggatgtatgtgaaggccgaccatgagctgtcaaggttctatgtgcagattattgaggaagaactgaatgtgaagcaggtgattttctccgatgatgtaagggaatttacctcctataccttcaagcctcagttaaagaccgtgggaccaaagtacggcaagctgttaaaccggattcgccagactctgaccgatatcgacggcagcgctgccatggataccctgaatgagaagggacagcttacctttgactatgacggccaggaagtggtgctgacaaaggacgacctgctgatcgatgtttcccagaaggacggctatgtgacagaggaagacaactatgtgaccgttgtgctggataccaacctgactcctgaactgattgaggagggctttgtgagagaactcataagcaagattcagaccatgcgcaaggaggccggatttgaggtcatggaccacatcagcgtattccaggatggaaatgaccggattgcagaactgattaaggcccatgcggacgagatcaaaacagaggtcatggcggaccatatcagcatcggcgccatgtccggctttgttaaagagtggaacattaacggcgaaaatgtaatgctcggtgttgaaaagaccatgaaataatggtaagattgtgaggcggggcccataaaaccccgccccgtctgataatttgggaatgatttacatacaatagttctgtaatagaagaggaacttaaagcaggaggataatggccgatgaataaaggatttgataaggaaacgttcaagcgcagtgtggtggacaacgtaaagaacatgttccgaaggaccattgatgaggcgactccccagcaggtatttcaggcagtggcctatgctgtgaaggatgttatcattgacgagtggattgccactcacaaggaatatgagaaaaaggacgttaagacagtatactacctgtccatggagttcctcatgggccgtgctctgggcaataatatcatcaatatctgcgccagggatgagattaaggaagccctggatgagatgggctttgatttaaatgtgattgaggaccaggagccggacgcagccctgggaaacggcggcctgggacgtctggcggcctgtttcctggattcgctggcaaccctgggatatccggcatatggctgcggcatccgttaccgctacggcatgttcaagcagaagattgagaacggttaccaggtggaggtgccggataactggttaaaggacggcaacccctttgagatccgcaggccggagtatgcttccgagattaaattcggaggttatgtgcgcattgagaaccagggcggagtgaaccatttcgtacaggacggataccagtctgtccgcgcggtgccctatgacctgccgattatcggatacggcaacaatgtggtgaataccctgcgtatctgggatgcagaacccatcaacacctttaatttggattcctttgacaggggagattaccagaaggcagtggagcaggagaatctggccaaaaccattgtggaggtcctttaccccaatgacaaccactacgcaggcaaggaactgcgcctgaagcagcagtatttctttatttccgccagcgtacagagggcggttaaaaagtataaagaaaagcacgatgacatcagaaaattctatgaaaaagtagtgttccagctgaacgacacccacccgacggttgccatccctgaattgatgcggattcttctggacgaggagggacttacatgggatgaggcgtgggaggtaaccaccaggacctgcgcttatacaaaccacaccatcatgtcagaggcgctggagaagtggcccattgagctgttttcacggcttctgcccagaatttaccagattgtggaggaaatcaaccgcaggttccagaaccagattcagaccatgtatccgggcaaccaggagaagctgcgcaaaatgtccattatttacgacggacaggtgaagatggcttacatggcgattgcagccagcttttccgtcaacggcgttgccaggcttcacacagaaatccttaagcaccaggagttaaaagacttctatgagatgatgccggagaagttcaacaacaagacaaacggcataacccagagacggttcctgcttcacggcaatccgctgctggcagactgggtcacctccaaaattggcgatgagtggattaccggccttccccacatcaagaagctggaactctttgcaggggatgagaagtgccagtttgagtttatgaacatcaagtatcagaataagctgcgccttgccagatatatcaaggagaataacggcattgacgtggacccgcgctctattttcgacgtgcaggtcaagaggcttcatgagtataagcgccagctgatgaacattctccatgtgatgtatctgtacaaccagctgaaggataatcctgatatggatatgattcccaggacctttatcttcggcgcgaaggcagctgcaggctataagcgggctaagctgaccatcaagcttatcaactcagtggcggatgtcatcaacaatgacaagtccattaacggcaagattaaggtggtgttcatcgaggattaccgtgtatccaacgcagagcttatatttgcggcggctgatgtcagcgagcagatatccacggccagcaaggaggcttccggcaccagcaacatgaagtttatgctcaacggggcccttaccctgggaaccatggacggagccaatgtggaaatcgtggaggaagtgggagcggacaatgcatttattttcggcatgtcctccgacgaggttattaactacgagaacaacggcggctattaccccatggatatctttaacaatgaccaggaaatccgccgtgtgctcatgcagctgattaacggatactatgcaccggataacccagagctgttcagggatatctataactctctcttaaataccaagagcagcgacagggctgatacctactttatcctcaaggacttccgttcctatgccgaggcgcaccagagggtggataaggcttacagggaccaggcgtggtgggctaaggcagccatccttaacacggccaactgcggaaagttcacatctgaccgtaccattgaggagtatgtgaaggatatctggcatctgaagaaagtgaccgtagaaatgtaaatgcttgctccggcaatcctgattattggggtgccggagcttttttggatgacgcatgaggaagggaaacagaaatgaaaatacgcgacatactggcagaaggaaagcccaccctctcctttgaggtgttccccccaaagacagaggatgcatatgattccgtggagaaggcagccgcggagattgcaaaattaaagccctcgtttatgagtgttacatacggggcaggagggggaaccagcgaatatacggttggaatcgcctccgccatcaaggaggaatatggagtgacgcccctggctcatctcacctgtgtttcatccaccagggaaaaggtgcaccatgtgctgggtgagttaagggagcgcggcattgaaaatgtactggccctgcgcggggatatcccccaggatggcagcacgccaaaggaataccactatgcttcagaactgatacgggaaatcaaaaaggcaggtgatttctgcatcggggcagcatgttacccggagggccatgtggaatcagccaacaagtctgtggacatagattacctgaagcagaaggtggaggccggatgcgattttgtcaccacccagatgttttttgacaacagcattctttacagctatctgtaccgcatccgtgaaaagggaatccaggtgcctgtgattgccggcatcatgcctgtgaccaacgcaaagcagatacggaggattacccagatgtcggggacctacctgccatccaggttcatgtccattgtggaccggttcggggacaatcccgcggccatgaagcaggccggaatagcctatgccacggaccagatcattgacctgattgccaacggagtcaacggtatccatgtgtattccatgaataagccggatgtggccatgaagataaaagaaaacctgtcggagattttatagggctgaatgcaacactggaaaaaaactcatgagaaaaaactcacgagaaaaaacctcatgactatatccgagagaataaaacttagaagaacgaataccagaagaacgaatgtcgggaaaacgaatatcagaagaacgaacatcgggagaaaagacatatggatatacaggacgtagacaggagggaggtcctccgctatctggggtacaggggtcaggaggctgacggggcagtggcggccatggtggagcagtccatggcagaattatgggaagctgccacacccaggcatctgtaccgggaatatcccttgtcactgggagaggattacagaattgacgggggatgtttcaacgccaggagcaggaacctgtgggggaatctgaaggactgcgatcagattattgtgtttgcggccacccttggctgcggggccgaccatctgattcagaagtacagccgtctccagatgagcagggccgtggtcatgcaggcagcggcagcggccatgattgaggagtactgcgaccaggtgtgtactgtgataaagtcggaatatgaggcaaaaggccgttatctgcgccccaggttcagccccggttacggagactttccgctggaatgccagggtatgctgttagaggccctggaggccggaaaacgcatcggcatcaagctgacggacagtcttctcatgatgccctccaaatctgtttcagcggtcatgggagccagcaggaaaccttaccgctgcgatgtaaaaggctgtgaagcctgtgccaagacggactgcccctaccggaggtgacagggaaaagccctttaaggcggcataaaaataaaataaaaaggggaattatattatgattcgttttaattgtgattacagcgaaggcgcccatgagcgcatacttaagaaactggctgagactaatctggagcagacgcccggatacggggaggaccattactgcgcagaggccgcaggcatcatccgcagcctatgcggacgggaagatgcagcggtccatttcctggtgggaggcacccaggccaatctgacggtcatagcatctgccctgcgttcccatcagggggcggtgggggctgtgacggcccacatcaatgtacatgagacaggctccatagaggccaccggacacaaggtgctggccctgccctctgaggacggcaagattacagcagagcaggtggaggagctgtaccaggcccatatccgggacgagagctttgagcacacggtgcagccaaagatggtatatatctccaaccccacggagctgggcactatttacaccagggctgagatggagaacttgtatggggtgtgcaggaagtacggcctgtacctgtttgtggacggcgcccgtctggcatacggcctggcggcggaggggaatgacctggaccttaagtccctggcagcttcctgcgacgtattctacattggaggaaccaaggtgggggctcttttcggggaggccgtggttatattgaacgatgagctgaaggcggatttccgctaccatatcaagcagcggggcggtatgctggccaagggccgccttctgggcatacagtttggagagcttttgcgggacggcctgtattttgagctgggagcccatgcggacaggctggcagacaagatacgctgcgcctgtgtcaaaaagggatatcccttcctggtggaaaacaccacaaaccaggtatttcccatcatgccggatgcccttctggagtcgtggaaggataagtacagttacaccaaccagggaagggtggatgaaagccatacggctatccgcctctgcaccagctggattaccagcggggagcaggtggacatcctggtaaacgacattttgaacagttaagaggacttgcggagaatgatgatgacaatattagaagagatgaaggtacgccgcctgttctgcgacggcggaatgggaagcctgctccaggcccagggcctgaaaccgggagagcttccggaaacgtggaacctgacccgccgggatgtgcttatatccatacaccggtcctatctggaggccggcgcagacatcatgaccaccaatacatttggcgccaacaggcttaaatttaaagatgatttggagtccatcgtgacagccgcagtggaaaatgccagaaccgcggtcagggaagcaggacacggatacgttgccctggacctgggacctacggggcgcctgttaaaacctttgggggatttggatttcgaggatgcggtgaagctttataaagaggtggtatccattggcgccagggcgggagcggacctggttcttatagagaccatgagcgacagctatgagctgaaggccgcggtgctggctgccagggaggcgggattcaggccggatacaggggaacgtctgcctgtgttcgcaaccgttatatttgatgaaaagggaaagcttctgaccggcggaaacgtggagtccaccgtggccctgttagagggattgagggtggatgccctgggaatcaactgcggtctgggacctgtgcagatgaagggtatcctggaggaaattctgagggtgtcctcccttcccgtgctggtaaaccccaatgcaggccttcccagaagcgagaacgggaagacggtgtacgacatagacgctgagggctttgcccttgtcatggaggaaatcgcggccatgggcgctgtggtggtgggagggtgctgcggcaccaccccggagcatatacgcctgatgacacagcggtgtaaggacatgcctgtggtgtggcccgagaaaaaacaccgcactgtggtgtcctcctatgcaaaggcagtgaccgccggccgtaagacaatcattatcggggagcgcataaaccccaccggcaagtccaagttcaagcaggccctgcgggaccacaacctggaatatatcctgaaggagggggtcagccagcaggacaacggggcggatgtgctggatgtgaacgtgggacttcctgaaatccatgagccgtccatgatggaggaggctgtgagggagcttcaggccatcatcgacctgcctcttcaaatcgacacctcggacatggaagccatggagcgcgccatgcgtatatacaacggaaaaccgctgattaactctgtcaacggcaaggaagagtccatgagccgcatatttccgctgatggcaaaatacggcggagtggcggtgggactctgcctggatgagtccggcattcccgatacggcagatggacgtctggccgtgggcaggaaaatcatagaacgggcagcggagtacggaatcgggccggaggatatcattctggacggactctgcatgacggtcagttccgacagcaaaggggcccttaccaccctggagaccctgcggcgcatccgggatgagctgggagtgggaaccgtgctgggggtatccaacatatccttcggactgccccagagggaaatcatcaatgccgcattctttaccatggccatggaatgcgggctgggagctgccatcataaaccctaactccgaggccatgatgcgggcttactatagctttaacgcgcttatggaccgggatccccagtgcggccagtatatcagcgtgtacagcgggcagagcgcgggcctgggccagaccattggaaagagcggcagccagaacgggataaaggcagacaatcattttggctcaggagaggatcaaggaggaggaagccaggggccggctctgacagcagccattgagagaggcctgaaagaagccgcccacaacgcggtgacggaactgttaaaggagagggagccgctggatattatcaacagtgagatgataccggccctggaccgtgtgggaaaagggtttgagaagggaaccgtgttcctgccccagcttcttatgagcgcggaggccgccaaggctgcgtttgaggtcatcaaggcagctatggatggaagcggacaggcccaggaaaagaaaggcaccatcatcctggcaacggtgaaaggcgacatccatgatatcggcaagaacatcgtgaaggtcctgctggaaaattacagttatgaggtcatcgacctgggaagggacgtgccgccggaggtcattgtaaaggaggccgtggaacggcaggttgccctggtgggcctgagcgccctcatgaccaccactgtgcccagcatggaggaaaccatccgccagctaagggctgcatccgtcactgtcaaggtgatggtgggaggcgctgtgctgacggaggattatgccaggaccataggcgctgacgcctattgcagggatgctatggcatcggtaaattatgcggagcaggtattcggcgcttagagcgccgggaagctcctgtgttttcatagactgatacgggaatccccatccacctgaggaactatctgccccagctgtttcagctgacgtgtaatgtggtagacagtgaacaggttgaggggatttttgtgttcgtcaataatcagtttgcctctgagcatgaaccacagccatgcaccgtccttcctgcgaatccgtatgatgcagctgcgtacggtgtcgtctgtggaaaatacggtcatggtctcctggaatgtatgggtgtcatctgggtgcagctgcctgaggaacgataaggagcctccggacaaaagcttgtattcggacagactgcagtagccaagggcgtgaagcagcctggaattcatatatatgacctccggggattctgcctggtagctggtcaggaggatgccgccgtttaccacctggttcagaagccccagctcattattgccgtacagctcaaaatagtgctggtccgttacatcctcaatgagacagccgcagtagccttcgtggaattgaaagcactctatcttaaggtacttgctgcgttccgggctgaaatcataaaacatctgccgcccgccgtgcatggctgtttcatagtaggcgggaaggcgtcgcgtatcggcgtccgggtaatggctcagaaagctttttcggtagaggatgtttctggaacggcattccaggcgggcacaggcttcatttacatatacataggaaaaatcacaggcctgtccgtcctttgcctgaatttgaatgatggcaaaggggaaggggatgctgtcatatataagttttgcgtgctccagtttgtcctccagggataggtcggagctgggagccggattcagttcccggaaggaaatcatattctttccgtggcttttggcgtagtaaagctcatcatccgctgcccgtaccagcttgtggtaatcatccatggaggcaaggactgtgctcacgacccctgcgctgatcgtcacaaagggggaggcgcttcggttggcagcgggaatctttaaatcagccacagatttcctcaagcggtctccaaccttgatggcgtcagaggggtggacatcacagagcagtatttgaaactcttcccctccaaaccggcagatcaggtcgttctcacggtggatgctgccggacagggctgcggctacctttttcaggcattcgtcgccctgtacatggccgtatgtatcattgtactgtttgaaatagtcaatatctatcatgatgacagccacaggtacatgaagccgtatgctatagggaatcagctcctccagccggagggaatagccgttgcggttgaaaagctgtgtcagcgggtccttgtcggcccgttcctgaagacaaacctgttcatccctggcctttcttaccatttgcaggttgctcacaataatgtggcagcgcatctgggacagaaacaggctgatgaagctgtaaaggaacaggttggaatacagggccggcggtacatggtgggccctgaaagccggaatcgcggccagggcggtagccagcactgaggccagcgcttctttaagggaatagatggggccggcggcaatgtaaatgtaaaacataaggacgctttctgctgtcaggcggctctgcaggcagatgtggttcactgcaatgcagtacagggcaaatatggcagtgaaaaagtatgtatggtgtttcagcctccgccttgtggaacaggtccgctgctgtttcaataagtatttgcagtatacaatattaaaggcgatgaacagaaggaacagcagcatggtaaagctgagcatggaagcagctctgcctgtaaagtctgtggccagatatacgattagactgaaggcttccataatgattaaaaggatggaataattcaaggtctggctgatgttcatggtctgcaccgtatcgtaaatttcgtccgcacacagacatcctttgccatggtcctgtgcgggaaagatacaggataaatttttctttacatattctaacatagtataatatacaacccctgtcttaatcgtgattgccatgcccgtacctgactggcctgtccgctgtacagcaggcatgcagcagttataagtaaaaccggcgctggtatcatgcgtattttttgtttgcgtcaattacataatactgataatatatgagggatattggggaaatattaccaaagaacatgaaaaatccgcaaaaaaagacaaaagtcgttgtttttccaataactcccagacacaggactcctaatatgtgataatatagttttgtaacagaaatgaaacagatttgtaatatctgtaagaaagaaagcgaggacatactatgttatcagtttcatctatggcacttgctgcaatgctgggttctgcatgcggcactaatatggcaaatataaatgactgcaacgcagcactttacaatacgggaaattgtccccaggcagtacagtaccagaagggcggacaggacctgaattccatgctgtcacagatgggagtcggcatgatgcctggaaattcccagtgcggcgttaattaagcgtattgatttaaatacattaattaaatacatcggatccatattccgtttcattatcacataatcatattcctcaaaaataaatcccggagaaaggcagaactgcctgtcctccgggattattttcatgtccggggcaataataagccgtacccggacataaatatatacagaaaattaattcacttttccggctgcatggggtagaatatcgttactgttgttccggaagggacgcgcgtgcagtaaggtcacagaaggtgaaaaggagtatttccagtgaatcgagataatgtgaaaatcattttaaaaggaatgtggataggggggaccatgacggtgcccggagtaagcggagggtccatggccatgattatgggggtttatgacagactcatttcatccatcagctcctttttcaaggaacctgcaggaagcatggccttcctgctcaaattcgtcctgggggcaggaaccggaatggtgctgttttcgcgctttatcagctacctgttcacaaccagggccgatgttccgctccggtttttcttcctgggagcggtggcaggaggtgttcccatgatatacagggaggcaggcgtgaaaaaactggacctgggagcggtggcctatcctgccataggcatcctgggggtggtgcttctggcgctgattccctccggactttttacaccggacggaagtttcgggcccgcggccctgctccttcagctggctgggggattcatcattgcggtggggctggtcctgcccggaatcagcgtgtctcagatgctctatatgctgggaatctatgaaaccattataggaaacatcagctcctttcatatccttcccctgataccgctgggagccggcgtgctgggcggcattttcctgaccaccaaggtgctggagcggctgatgtcccgtcatccccagcccacctatctgattatcctgggattcatgttcggttcactgccggaactttttccaggtatcccaacaggcgcggatctggcagcggcccttatagccggagctgcgggttttgcggctctgtatgtgatgtccatgaaagaacagagaacctaaagggccggagcgcggccggggcgcgtcagaaagcagttttcagacacactctacacggttctgccgtctccccagaaaaccaggcatacggtgccgggaccggtatgggagccgatgacagtgccgatatccacgatgaaaacctttccgtttaaatgagggaaagtttcctctaccaggctggccactgcctcggcatcttcggggcaggaggattgggacaggaagcattttccgttataggcatcgccctgttcagcatgttccttcatccgctccaccatttcccggataacgcgcttcttgccccggtacttgtcccggggaatcagtttgccttccgcattcacttccagcaggggacatatgttgagcatattgccaaagaaggcagctgaggcagagatgcgtcctccccgtcttaaatgggtcaaatcagaggtgaagaaccaatgatggaccctttttttattctcctcaatccaggatacaagttccctgtattctgcacctgcctgcatcatctcccaggccgtgtccaccagaagtccgtagcccgctgaggcgcagcaggagtcaatgacggcaatctgccggttcggataacgctccagcatctcatccctggcaatgactgccgaattataggtgccggatatgccggaggagagggtcatgtggatgatatcctttccttcttttaatatgggctcaaacatggcttcgtattgttccgggttcacctgggacgtggtgggcatggcgccctgcctgatgttctcgtaaaaatcctcaatgggaatggactttcccaggtcgtcgtcatattccatgccgttcatccggaaatgaaagcaggagtaggggatgcctctctctgtcagataagacgccggcagatcggctgtggaacagcaggtaatcatataggaattcgtcatggtttgctccttttaaagtgggaaaaattagctgtcttgtgttgaaaaaagtatagcatgccaggggtgcggtgtcaaatgcagtggaaaaacagatggaactgtgctatgatgtaggttgtgtcaagacagatttgcgtatagccatggaaaggaatggtaaccataatgtataaatgctgtatattcgacctggacgggacccttgtgaattcaatctatgccatccagaagtcagtgaatgataccctgagttattggaacatgcgtgaaatcagcgtggaggagagccggctctatgtgggggacggttataagaagctgctggagcggtcccttattgcctgcggggataaggagctgacccattatgaggaggcggtggagcggtatcaggacatttttcgggaatgctgtatgcaccgtgtggaggcatacgagggaatcggggagcttctggagtttttaaagtcgcagggcattttcattgcagtgctgtccaacaagccccatcccagaacactggataatgtgcagggagtgtttggaaaggggtattttgacctggtctacggagagcgggaggataagggaatcaagaagaagccttgccctgacggcgtatgggccatagcggaggaactgggactttcaaagagcgaaatcctctatctgggggataccaacacggacatggagaccggggacaatgcaaaggtggatacagtgggagtgacctggggatttaggaccagggaagagcttatggctttccatccggcgcttattgcggaccatccgtcccaggttgttcagtatataaaggatgtgaatggaattgaatgatagaatgcccctgagatacaggggaattacgtggcttatggccttgcttggtttcgtggtcatggccataagtatatggggatgcaacgccggacagaggccgcctgaatcaggaaaggtgcctgctgccggccaggagggaaaggatgaccgcatccttgtggtaaccaccatctttccctactatgattttgtgcgccagattgcaggggaccgggtgaagcttaagctggtggtgcccgcgggtatggacagccattcctttgaacctacgcctgctgatatgattgccatgcaggaggccgatgtgctgatctgcaacggcggcgagatggagcagtgggtggagaaagtgctgggctccctggacaccagccacatgaaggttctgaccatgatggactatgtggacgtggtggaggaagagcatgtggaaggcatggaggaggaggaagaacaccgccatgaggacggctttgagatgcacattgaatacgatgagcatatatggacctcccctgtcaatgcccgggccattgtaaaaataataagccagaccttgtcagaggcagctccccgggagaaaagccgttttgaggataatacccaggcatacctgaaggaacttaaggaactggacagccagttccgacaggtggtaaaccaggggcgtctccatatgattgtggtggcagacaagtttcccttccgctatttcgcggatgagtacggcctttcctaccgcgctgccttttccgggtgcagcggggacacggagcccagcgccaggaccattgcctatctgatagacaaggtaaaggaggaccggattccggctgtctattacctggagctttccagccacaggacagcggaaatcattcaggaggaaacaggagcaatgccccttcttctccattcctgccacaacgtgaccaggaagcagttcgacgagggcgtcacctatctccagcttatgaaacagaatgtggagaacctgcggtatgggctggaataacctgagccgggataatccgggctggaataaccaattgtaaaaggggtaaaatatgtcaccattaattcaatgccagcatgtggacttcggatacgataaccaggatgctgtgaccgatgtaaatatggaagtggaccccggggattatctgtgcatcgtgggtgagaacggatccggcaagagtacactgatgaaggggcttttgggcttaatcaggcctacgggcggaacgcttgtaacggcagatgagctaaagaggaccggtatcggctacctgccccagcagacggccgcccagaaggattttcctgccactgtctcagaggtggtcttaagcggctgcttaaatcgcaggggaatgcttccgttttattctaagaaagaaaaagagattgcggacaggaacatggagaagctggggatcacacccatcaggaagcagtgctacagggagctgtccggcgggcagcagcagcgggtacttatagccagggccctgtgcgccaccagctccctgctgatactggacgagcccatcactgggttagaccccacggccatccaggagttttacaccatgatccggaggttgaacagggaggacaaggtggctatactcatggtgtcccatgacctgagaaatgcggtggaggaggccaataagatccttcacctgcaaaagcgtgtcctgttctacgggcctgcccacgactatatgaacagccaggcagccggccatttcttccatgaaaaggaacagggcagatgcaagcccacagccggatgccacacggtgaagctgcacatgcacaaggaggataaatcatgaatctgatacgagaaatgctttcctacccatttctggtaagggctcttgcgggcggcatgatggtatccctgtgcgcgtccctgctgggagtgagcctggtgctcaggcggtacagcatgattggggacggcttgtcccatgtgtccttcggggccctttccattgccctggccatgggatggtccccccttaagatatccattccggtggtggtcctggctgcttttttcctgcttcggattacggagaacagccggattaaaagcgatgcggccattgccctcatatcagccagcgccctggcgctaggcatcatcgtcacttccctgaccacgggtatgaccacggatgtgagcagttatatgttcggaagcatcctggccatgagcagggaggatgtttggctcagcgtggtgctgtccctggtggtgctggggctgtttgtaatatgctacaaccgcatatttgcagtgacctttgacgagaattttgccaaggcaacaggggtcaatgtgggccgctacaatatcattatagctgttctcacggcagtgaccattgtgctgggaatgaggatgatgggggccatgcttatatccagccttgtgatatttccatgcctttcctccatgcgggtattcaaaagctttggaggcgtcatggtgtcctcgggccttctgtccctggcctgctttttcgcaggcatggtggcatcctaccagttttccataccggccggggccagcgtggtggtggtgaatctgtgcgctttccttttgttcatggcgtggcagtccctgggccgcctgagaggctgatgcctccggccggggccggctgttttatccgtgggctatatcctgttttgcagtagacagtccggggctaaagtgctaaaatgctctttatgcggagggatccgcggtaaaaataacttatgggatttaaaatgaggggaacatgaatgagaagctgtttggaaaaaaaccaaaacattaccgtttaaaaaaacatatatcacagacccagttcattgcctatgggtttttcctgattatcatgacaggaagcctgcttctgatgcttcccatagccagcagggacgggcagagcgagccattcctcaactgcctgtttacggcaaccagcgcttcctgcgtgacggggctggtggtggcagatacctggacccagtggagcctgttcggccagatggtgctgctggtgctgattcagctggggggattgggatttatcagcatcggcattttcctgtctattgttctgagaaggaaaatcggactcaaagagcgggggcttatgcaggaaagcgtcaacaccctgcagattggcggcatggtgaagctggccaagaaaatcatcatcggcacagctgtttttgagggagcaggcgctgttatactggcctgccggtttattccggagtacggtctggtccacggtacctggtatggaatatttcattctgtttcggccttttgtaatgccggctttgacctgatgggacacaccagccagtatagttctctttgtaattatgagggggactgggtggttataggaactatatccttcctgattattacaggcggtatcggattcattgtctgggacgatttgtccaggaagaagctggatttccgccactacatgcttcacaccaaaatcgtgctggttacaacggcagttcttctgattaccagcaccatactcttttatctgatggagcgcaataatattttagtgggaatgaatggttcggagtcctttctggcctgtttcttcagcgcggtcacacccaggacagccggatttaacaatgtagacacggcagccctgacagacgggagtaagtttttgtcagccatcctcatgtttatcggaggaagcccgggctccacggccggcggtatcaagaccagcaccctggcagtgcttctgctttacgtccattccaatatccgccagacatacggggtggagatattcgggagaaggctggaggacgagtccatcaggcagtctgcctgtattctgaccatcaacctgggtctgatgctggcagccaccatagccattatggtgtcccagaacctgcctatgtcggatgtgttctttgagacatgttccgctataggcacctcaggaatgagcacaggagttaccagaagcctgaattcattttcccggattgttattatactgcttatgtactgcggacgaatcggaagcttgtcctttgccctggcattcaccaggtccaaccgcaagccccatgtgcagctgccggcagagcggattaccataggatagagaggggtattagagatgaaatcaattcttgttatcggaatcggaaggtttggccagcacctgtgtgaaaacctggccaagcatgacaatcaaatcatggcagtggacatatcagaggagaagctggagcccgtccttccatatgtggtcagcgccaagattggagactgtaccaatgaggccgtgcttaagagcctgggaatcggcaacttcgatatctgttttatctgtatcggaaacaactttcagaacagtctggaggttaccagtctgattaaggagataggggcaaagtacgttgtcagcaaggcaaaccgcaatattcatgccaggctgctgctaaagaacggggcggacgaggtggtttatccggaccgggacgtggccgagaaggtagcggtgcgttacagcgccaacaatgtgtttgactatacggagctggcagacggcatttccatctatgaaatcaagccccttccccagtgggtgggaaagagcataaaggattccgatatccggcggctgtacggcatatcggttatcgcggtgaaaaacccggacggacacatgaggttcatgcccggtgccgaccatgtcatagcaggggataaccacctgatggtgattggaaaacaggaggatgcggagaagattgtgaagcatctgacgaaaaatgtataagaaggatgatgagtccaacggataatagggccggagaaatggctgcctgtgttgacaggctgctgtttctccggttgttttcgttctgcggtgtctgtaactgctgaagagggccagaggtgggggaggggaagtttgagtgttaaatgtaagacgaattttcaataagacgtcggaaacattattgccggtataaggtttttttagtataattatgctatgcaaatcctgtaaataacgctttaattggaagttatacataataaagaggaggtgcacactgtgaaagaactgtcaataggacagatggcccggcttaacgggctgtcagagcagacgctgaggctgtatgacaaggcaggcctgttttcacccatgtaccgggatgcggaaaacggctaccgttactatgatatccgccagagcgcccagctggatatgattcagcatatgaaggccctgggcatgtccttaaaggacatcagggagcagatgacccattttgagcttgatatgttcaagacaatcctgcaccggaacctggaggagctggagttgagatccagggagctgatgtaccagagaagggccatagagcggacccttgaaagctatgaatggtatgaaaacgcgccgccggacgggaccattgtgctggaatacataccccggagactgacgtatatgacggattcaggagtgaatttctatgattacgacattgatgtatatgaaaagatactgagggatttgaaggagaacctgattgccaaccagctctcccccatttatttttacaatgcaggcaccgtgatgcgcagggaacacctgatggaggggaggtactattccacggagatatttgtgctggtggaccggggctttgtaaaggacagcctgattacggagataccggccagcacatacctgtgcatttactgcaatggatttgaaagggaaaaggaatatatgggccgtctggtggaggaaatcaggacaaaggagtatcaggtgacaggcgactatatctgcgaggtggtggcggaggtgcccatggatatgcaggagagaggcatgttcctgcgccttcaggtgccggtatctttcaggaaaaataacccttgacctgataccgtgtataagctttatactattaacagaagctaataacacgtaacttattttcaggaaaggggtttaagaatcatgatgaattgcgagaaaatccgtgtggtacagtatggctgcggcaagatggccaagtacatcctgcgctatctttatgaaaagggcgctgagattgtaggggcaattgatgtgaatccggccgtggtaggaatggacgtaggtgattttgcagggcttggcacaaagctgggcgtggtgataagggaggacgctgatgcggtcctggatgagtgcgacgctgacattgccgtggttaccctgttcagcttcatgtcggatgtatatccctattttgagaaatgcgtgtccaggggaatcaatgtggtgaccacctgcgaggaggccatctatccatggaccacgtcctcagccgttaccaacaagctggataagctggctaaggaaaccggctgcaccatagtgggagccggtatgcaggatattttctggattaacatgattggctgtgtggcgggaggcgtacaccgcattgacaggattgagggagccaccagctataacgttgaagattacggtctggcactggcaaaggctcacggcgtggggcttacaccggaggagtttgaagctcagattgcccacccggagacactggagccctgttatgtatggaattccaatgaagcgctgtgcaataagatgggatggaccatcaagtcccagtcccagaagtgcgtgccatatttctatcccacggacctgtattcagagaccatgggaatgaccataccaaagggaaactgcatcggtatgagcgccgtggtcaccaccgagaccttccagggcccggttatagagacccagtgtatcggcaaggtatacggaccggatgacggtgatttgtgcgactggaaaatcataggcgaacccgacaccaccttctttgtacagaagccggccactgtggagcatacctgcgccaccattgtaaaccggatccccaccattttaaatgctccggcaggttacattacggtggagaagctggaggatgtggagtatctttcctatccgatgcatatgtatttggatatgtaagaggagatgtaagaggaaactggccggcagaatcatggacttaaccggctgagcacggcgaaagccggtcaggcagaacggagataaagaaaaaagaatgggcaagggcccgcggtaccgggacaacagccaggcaggcgagaaggtctgcctggctgtttgctgcattttttctcaaaaactcttgcctgaccctttggaacggttaaaatatggataaaatgaaagtgtgatacggcagaatagaaacagagcggtaatagaatagcaatagaatagggccatatgtcttgactttatccagtgaatgtgcaacaatattcaattgacaggctttacaaacagagctttgccaggacaggacggcggatggttttacttgcttactgggctggcagggcttcggatactgagaaagagggaaagaataaaatgacaaagattgatattatctccggattcctgggagcgggcaagactacgttcattaagaagctcctggaggaggccattgccggagaacaggttgtcctgattgaaaatgagtttggcgagattggaattgacggcggttttctgaaggattcaggcattgaaatccgggagatgaattcaggctgcatctgctgctctctggtaggtgattttggtacatccctggctgaggttctgacacagtacaagccggagcgcatcatcatcgaaccgtccggtgtgggcaagctgtcagatgtgatgaaggcagtcattgacgtatcagcagatatggatgtggagctaaacagcgctgtaaccattgtggatgcggcaaaatgcaaaatgtacatgaagaatttcggagagttcttcaataatcagatagagaatgcaggaaccatcgtactgagccgtacagacattacggatgcctctaaaatacagaaggatgtggacatgattcgcgagaagaatgcaaatgctgtcattatcaccactcctctggaccagcttggaggaagccagcttctggagattattgagaagaaggatactatgctggatgatctgctggcagaggtgcgggagagccgccatcatgacggtcatggcgaggagtgctgcggacaccaccacggccatgatgaggaatgccatgagcatcaccacgatcacgatgaggagtgccatgagcatcaccatgaccatgatgaggagtgccatgagcatcaccaccacggtcatgatgaggaatgccatgagcaccaccacggccatgacgaggaatgccatgagcatcatcaccacgatcatgatgaggaatgccatgagcaccaccacggccatgacgaggaatgccatgggcatcaccaccacgatcacgatgaggaatgccatgagcatcaccacggccatgacgaggaatgccatgggcatcatcaccatgatgtctgcggtcatgagcatcaccatcatcatgcagacgaggtgtttaccagctggggaatggaaaccattgttccggtgacccatgagcagctggaggatattctgaaacgtctctcctccaccagcgagtttggagatgtgttaagggccaagggaatgcttcccacagagaatcccggtgagtggctgtattttgatttggtgccggagcagtatgaaatccgccagggcagaccggattatacaggcaaggtatgtgtgattggcgccagcctgaaagaggaagagctgaacagcgtgttcggcagaggctgattggataaggggaaacagacatggcttatgagatagaagacgatattatgcctttgtttttaatcaatggctttctggaggccggcaagacccagtttctggattttaccatgcagcaggattactttaaaacagagggaaagacccttctcattgtgtgtgaggaaggcgatacggagtatgacgagaaaaagttaaagaagaataagacggcagtggtgtttgtggatgacatggagaagctgaccccccagtatctcaatgaactggaggttatctaccagccggaacgcgtgctgatggagtggaacggcatgtggaaccaggatgaattaaaactgccggatgactggaccatttatcagcagattaccattattgacggttctacctttgaactctatgtgcagaacatgaagccgcttctgggggccatgctgcggggatcggagctggttatcgtgaaccggtgcgacgggattggggatgacaagctgaccgcgtaccgcaggaccatacgggccatgagccgggaaagcgagattgtcctggaggacaaggaaggggaaatcgaacaggctgccctggaggaggatcttccctatgaccttggcgcggatgtgattgaaattaagcctgaggattacggtatttggtatattgactgtatggaccagccggagcgctataaggacagggtggtggaattcactgccatggttcttaaaactcctaaattccccaagggccagtttgtgcctggccgcatggccatgacatgctgtgaggcggatatgacgtttctgggctttatgtgcaaatggccggaagcggaggattacaagacaaaacagtgggtgaaggtccgggcaaaggtaggtattgaataccagaaggattatcacggcgaggggccggtcctttatgccgaacatgtggaacgggcggaagagataaaggatgttgtgcagttttaggaaagatagtttacagttatgggacatgccttagggcgctaaaaaacagcagcaaaacgtgttgccctgcatgggagggacgcggcgggctgctgtttttcgtataacatgcttcgtataacatctcattccattgccaaatccattgtcgatttcatcgccaattccatatgtggttctatatccattacgcaacctgtcagaaccctctggattttatcttgcaaaatccggaaaagtccattacaatatagagaaagggctttcacgaaaaaagcaggagcagagcaggggatgaaagcacagaagtgtaaaggaataaaaggggtgaagggatgaatatttatgacattgcagccgaggcagggacctctatctccactgtttcgcgggtgctcaacaataagggaaatgtgaatcccaagataagggacagggtggaggccgttcttaaaaagtatgactataagcccagcgccatagccaggggcatggtctccaaaaccatgaagaatattgctatcctgacagtggatgtgcgggtgacacattatgccaggatgatatatgtgattgaacaggagttcagcaatctgggatataatgtttcggtgtgtaatacaggcgggtccatacaggaatgcgaccggtatttcgagatactgtcagagaaacagacagacggaattgtgctcatcggctctgtattcaatgaactgataaattatcctgagattactgccaagataaaggatacacccgtagtcattgccaacggacaggtaaagctgcctaatttttattcagtcctggtggatgacacaaaggcaatccgcatggcttcggattatatgtttgaccatgggcgtatggacttattctatgtttttgatattgccacggacagcggcagggcaaaacgtcagggatttttagaagccatgaagctgagggatgtacctgacggaaacgaccgggtggtgattgtggatgaaagcagcctggaaggaggaagggatgccgccagaaagattcttgccgccggccggcctgtcaacggggtggtgtgcggcgaggacatcacggccatcggactcatgaaggaatttaaggaaaggggataccgggtgccggaggatatagccattactggctgcaataattcgccggattccagaatatgcgaacctgagctgactaccctggacaacaagccggagcttttgggcggaatgtgcgcttccctgctcagggacaggatggaaggaaaggagtcggccacaagcgtggccatccagccggagctggtggtgcgcggttccgcgttattttgaaagactgaataagacagcccgccattgtgccggtgcctgcggatatcaggcgccctgccggcgtatgccctggcggtatacggccgctccttggataagctgaggtgtgcatagggctgtgtataaaacaatagaaaagcgctttttttgaattggagttggaaaaacaaagatattttgttccggctccttttttgttttgcgaaatcaagaaaacgcttttatataaaaatggaagtgggattataatacacaaaaaacatgggattatatagtgcatattgtataaaattaagagattaaacacttttatattgacataaacctagttggtgttataatggtgtcatgagaaagcgctttctcgaaaagagagaaagctcatataaaaggagagagagccatgagagtaaagtatgaggatttattagagaagttccagaggattttagagagcagaggtttttcaggaaagcatgcaaaggacgcggccaccgtatttgcaaacaacagcctggacggcgtatattcccacggtgtgaaccgcttccccagggtggtggagtatctggataagggagagattgattccgccgccattgcaacctgtgaatcctccatgggagccattgagcggtggaacggacacaggggattcggccccctcaatgcaaagctggccatggaccgggctgtggagctggcaagggagtacggcgtgggcgtggtggcccttggaaataataaccactggatgcggggcggcagctacggctggcaggcagcggacaagggatgcatcggtatctgctggtccaacaccatgcccaacatgcctgcctggggcggaagggacagaaaaatcggaaacaatccatttatcatgtccatccccagaagcaacggaaaacacgctgtcattgactgcgccgtatcccagttttcctacggaaagatagaggaggcaaagcttaagggacagcagcttccggttcccggaggctatgatacaaagggcaacctgaccacggacccggctgagattgagaaaacatggagggtgcttcccatgggatactggaagggcagcggcatctccattgccctggacctgatagcgacggttctgacaaacggcaattccgtcagcaggattggcacctttggggacgaggtgggactgagccagattatgatagccattgaccccttaagattcaacacgccggaggaaacggactccatcgtggatgagattctggccgacatcaagtcctcagagccaatcagggaaggcggggatgtgtattatccgggagaactggaactcatcaccagagaaaccaatacaagagacggaattccggtcattgacgaggtgtgggaaacgcttaacagccttgagcgctgaagcacagagctaaaatagcaatatagaggggagatttaacttatggaatatatcataggaatactgattttagcatcgttctttggcctggccgtctacgcggccaggggcggaaacctgatgatgggaatgctgattatggccattctctggaccatccttcccatgacaggcaaccttctggcgtctaatcctgaatttatcgcagccaatggagacagcatacggattacatggatacaggcattttccaaggtgttccagagcggcccggagggctggggctcagtgctggtaaatgtagtgtttggggcatggttcggccgggtgctgttagagacaggcatcgcagccacccttatccgcaagaccacggagctgggcggcgacaagcccgccgtcacctgtatccttttgtgcattgttacggctgccatattttcctccctgttcggggccggtgcagtggtagctatcggcgttatcatccttcccatcttcatgtccctgggaattcccaaggtgctgtccgttgtatcctttatgctgagcatcggagcgggaatgtttttgaaccctgtactcttcggacagtacaccgcgttcttcctggacggggacggcaaggtcctgtacccctatgagcagtatgtgaaatggggcggcattgcactggccgtacagctggtatttaccattatactgattctgttctgcatgagaaaaaaatcggtccattcctgggcagccagaaggccggtacgccagaaactggattttgctcccacaccgtccctgctgacgccctttatccctgtattccttttaattgtgttcaaggtgcccattatcatgggctttctgatcggcggcttctatgcgctgtttgtatgcggaaagctgaaaagcttccgcgctgcctgcagaacctttaacaaggacttctttgacggcgtggtggatacggctcccctggtaggcttcctgctggtggttcccatgttcaacaaggcggctgaactgtgcattccatatttcaacgcgctattgggaaatatcattccccacagcaccttattcatcaccattattttctgtgtgctggcgccccttggaatgttcagaggacccttcaccctttacggctgcggcgcggctaccctgggcattttaaagggcgtgggttttgaggtggccttcctggctcccctgatgattgccgccaccacggttatgaacgtgtcctgctgcatcacccagtcatggattgtatggggaatcagctacgcaaaggtatctaccaaggaattcttaaagatgagcgtggtgtgcggctggattatctgctgcatcctgcaggttataacatttatcatgtttggttaacgggaggagaagaaacatgggaaacagactggtgagaatgggaatcgacgttggaggaacccatacaaaggcggtagcgattgacaacgccacacatgaaatcataggaaaatcttctgtcaagaccactcatgatgacaggtacggggtggcggccggcgtggtgaaggcatttcagaactgcttaagggaaaatgatattgcccctgaggatgttattttcgtggcccacagcaccacccaggccaccaatgccctgattgaaggcgatgtggcctgcgtgggcgtgctgggcatggggcccggaggcgtggaaggctttctggcaaagcatcagacccgccttaaggatatcgacctgggatccggcagaagcataaagataaagaaccgttatctgagcgacagtgaagaggacgagaatacggtcaggaaggcggttgaggagcttaaagcagagggcgcccaggtgctggtggcgtcagacgcttacggggtggacgacattgccggggagcagtttgtgttcgagattgcccatgacgagatgggcatggagacaaccgttgcctcggacattaccaagctctacggcctgaccagacggaccaggacagctgccataaacgccagcattctgcccaagatgctgaacacggccaattccacggaggagagcgtgcgaaaggccggcgtggaggtgcctctcatgattatgcgtggagacggcggtgtcatggaaatcaatgagatgaagaagcgcccggtgctgaccatgctttccggtccggctgccagtgttatgggatcccttatgtacctgagggcatccaacggcgtgtattttgaggtgggtggaaccaccaccaatatcggcgttatcaagaacggacgccctgccattgattactctgtggtaggcggacacaggacctatatcagctccctggatgtgcgggtgctgggcgttgcaggcggaagcatgattcgggtgaacaagagcggcgtccacgatgtgggcccacgttccgcccatattgcgggactggattacgccgtatttacagatgaggaagaaatcgtggagccccggctggaattcttttctccgaaggagggagatccggaggattacgtggccatccgcttaaagagcggcaagcgcatcaccatcaccaacagctgcgcggccaatgtgctgggactggtgacgcccaaggacttttcctacggcagcgtaaattcggccaggaaagccatgcagcccattgccgattacctgaacaccacggtggaggatgtggctacccagattcttaccagggcctatgagaagatcgaacctattatcatggagctggctgacaagtaccgcctggagcatgaccagatatccctggtgggcgtgggcggcggcgccacatccctgattgggttctgtgccaataagatgaatattaagtacagcgtgcctgaaaatgcagaggttatttcctccataggcgtggctctggccatggtccgcgacgtggtggagcgggtagtacccaaccccacgccggatgatatcagaagcatcaagcgggaggcagtggacaaagcagtggagagcggggcagcgcccggatccgtggaggtccacattgaaattgacccgcagacctccaagctcactgccattgcactgggctccacggaggtcaagacaacggaccttcttaaggagtgcagcgaggaggaggcaaggaacctggcggcggaggatttaaggtccgggccggaagagctgaacctggtgggccagacgcctaacttctatgtctataatatggaaagcaggggccgaaagccacttcgtatcctggataagaagggatttatcaaggtgcagaggacagacggggaagtggttcttgccaaggcatcctcctaccggagcattgtttccagaatgtgggaagaaatggccattttcaaggcagatgccatcctgcggcccgactactatctgtgtgtgggcgccagagtcatggactttaacggcacaggtgagctggagcagattctcatgctcatggatgtggaaatgcagatggtggacccgtcggaagatattgtgattgtcggagcaaagaatcagttgtagaatagaaggggacaggcgcagaggaggtttttccatgaagagagaagacggcagaaagctgttccgggcttttttgggaaacagcagggaaacggcaggggaacaaagggccatgatggagcagatggcggttccgtcaagggagaggtccctgtattccatggtggaacacctgctgtccctggacgagacagcctggtacctctatgcctggtccagggacccgctggaaggcaggttttccagggaacagaagctggcatatggctttcgggcggcagagtgcgggcgaaatgaggcgcagctgattctggggaagacagatgtctgggatattgctgccggcatggggcttaaggttttaacgccccaggtgccagggggcggcgggcatgtgatttttgcccagtatcaggaaccggattccattaccattttcatggacggcgcagagcgggcgcagaagctgattcgggaagaaaagctggaggggcttctgggcaacagggcagtggaggacgtgctgctggcccatgaactgttccatgtgacggagtacaggaaaaaggatttcatatttacccagacagaaaaggtggagctgtggaagaagccgttttccaaccgttccaggatactgtgtctgggagagattgcgggcatggagtttgcccgctgcctgacaggaatcaccttcaccccatatgtcctggatgtgctgatgatgtacggctatgacaaagaggcggccacggccctctacgaagaaatcgcggcgtttgccggaaacggcgaaggaaaggaaggttgacatgctgaccacaagtattgatttaatccagaaatacgattacctggaggacaaattcaaaaaaggctatgagttcttaagaaacacggatttaaaggcgctgcccctgggccgtgttgatattgacggggatgaggtatttgcctcggtgcaggagtataccaccatgccggcagatgcatgcaggtatgaatcccacgatctgtattttgatatacagtatgtggtggagggccaggagcagttcggctacacaaagcgggcagggctggaagaggaagcgccttataatgaagcggatgatatcgtgttctttaaggaaccggagcagggcggcgccgttcttttgaaggccggggactgcgcggtagtggctcctgaggacgcccacaagcccagatgtattgcaggtactccctgcaaggtgcgtaagattgtagtaaaggtcagggtttaggaataaactatatttctacctgcttccctctgtcatatccggatgtgccagtgcatatgtacctattaccggtacggcattgacacaggatagggcggagggatttattatgggatatggattggcactggcaggcggcggaaccaggggggcagcccatgtgggggtgcttaaggcccttatggaggcgggactgcgcccggatgcagtggcaggagccagcgcagggggaattgtggcaggactttttgcctccggaatgtctgtctcccggatggagcaggcagtgcttcatctggagaaacacggaggcgagtatctggacccggattacagcggcctgctggcatttatgccccagctgctgacgggaaagggcgtaaacctgtccggtcttattaagggagataagctgcaggactatttttttcagatgaccggcaggaagcatatggacgaggctgtgtttaagttagtcataccggcagtggacctgattagcggaaataccatctgctttacaaacagcgaccaggtaagggagatggagcacgtgacatgggagtggaacggatatctctgtgaagccatgatggccggagccagcgtgcctgccatatttgcgcccagaaaattgggacggtatcttctggtggacggtggcgttacggatattctcccggtcaaccttctgcaggcagccggtatccgggatgtgctggcagtggacatcggaggggattacgaagcgccttcggaccacagcgttatggaggtggcttcccactccttttccattatgagcggccggctgaaggactgcgcctccacaggtgaggtactgctgctgaagccgcccttaagctccaaggcaggccttctgacctttgaactgatgggggaatgtatggaacgggggtatgagtacaccaggaaaatgcttccgcagatacgcaaagtccttaattgaatgagaaattgtgtgaaaacagctgctttaatcctgcgaaagtctggtaaattcatgaaaaaagcaggccgggaccgtgaaaaatgcttcattcgggcattttcacgggaaccggccctgaaattgatataaaaatctataacccctccattgacactgacttttatatctgttatagttaataaccgtacgaagcgagaggatgaaaggcccgagacgtgcctgtttacccctcgtttttttgttcgcgtggaggacttcgtttcacgaagaaactaataaattgcggtgcatggtatgacgtatgcgtagccggtgcggtatctggccgggggctttggaaggcctgcttgggggtccgggggaaatgtcctggaaacaggcagacggatgcgtggcagcggagtcagggaatatgcacaaggcggcctgccggaggctcttttatatgggacggcagaggaagaaaggatattaactttatatggagacagttaagtttgacgagttacaattagacgagcggattatccgcgccatcacagagatgggatttgaggaggcatcaccgattcaggctcaggccattccggtagccatggaaggccgtgacatgattggccaggcacagaccggaacaggcaagacagctgcatttggtctgcctcttcttcagaaggtggacccgaaggtgaagaagcttcaggccatcgtgctgcttcctaccagggagctggccatccaggtggcggaggaaatgcgccgttttgcaaagttcatgcacggtgtgaaggtgctgcctatatacggcggccaggatatcgtaaagcagatccgttccttaaaggacggaacacaggttatcgtgggaaccccgggccgtgtcatggaccatatgagaagaaagactgtaaaggtggaccatgtcctcaccgtagtgctggatgaagcggatgagatgctgaacatgggtttcctggaggatatggagactattttaagccagctgcctgaggagcgccagaccctgatgttctcagctaccatgccccaggccattgcggagattgccaggaagttccagaaggacccggtgacggtccgggtgattaagaaggaactgaccgtgcctaaggtgacccagtattactatgaggttaagccgaagaataaggtagaggttatgagccgtctgctggatatgtatgcgccgaagctttccatcgtgttctgcaatacaaagcgtcaggtggatgacctggtgcaggagctccagggaaggggatattttgcagagggccttcatggagatttgaagcaggtccagcgtgaccgtgtcatggacagcttccggaacggccgcaccgatattctggtggccacggatgtggctgcgagaggcatagatgtaggggatgtggaagcagtgttcaactatgacattccccaggatgacgagtactacgtgcaccgtatcggccgtaccggcagagcgggaagggaaggaaaggcattcagccttgttatgggcaaggaggtctataagctcagggatatccagcgttactgcaagactaaaatcattccccaggccattccgtctctaaatgatatcacggaaatcaaggtggagaagattctggaccaggttcaggaggtgttaaatgacacggacctgaccaagatggtgaacattattgagaagaagttaatggaggaggattacacctccatggatttggcagctgcccttctcaagatgagcatgggagatgagagcgaagacatcatcgacagctttgagacagcccgttccctggatgaactggacagctttggacgtggaagcagccgcggcagaggccgtgagcgcagcgcctacggaaaccgacgcaagggagcaacagaccgcgctgctgtggattacgtgctgggcgaaggggatgagaagatggcaagactgttcatcaacatcggcaaggcccagagaatcaccccgggagacattctgggagcagttgccggagagtcgggaattccgggacgcatggtgggaagcattgacatgtacgacggatataccttcgtggatgtgcccggacgctatgcggacgatgtgctgaaggccatggcccatgccaagatcaagggaaagaatattcacgtggaaaaagccaatactaacagaagataagagcgggacttacagtcccgtataaccacagcccggcaggacttctatctgccgggctgtgcctgtatttacattttaccggaggtgtgatatggtgaaggtcaacaggaaggaggctgagccgatgaaggaaggatatgtggacaaccgttttgcgtctctttattataaggaaatgggacagggtatgcctctcatcatgctccacggcaatggtgagagccacgaaatatttgccaggctgtctgagctcatgagc

SEQ ID NO: 3378 - DNA, 627 bp, Unknown
  gut microbiota DNA sequence
tcaacagagcttttaagagagtaaaggcaaacaagggggcgccaggaatcgacgggattaccgtggaggaaacaggcgcatacctgagggaaaaccagaaagaacttatcgagagaatcagaaggggaaagtatacccccgacccggtaagacgagtggagattcccaagccagacggtggaatacgaaagctaggcattccaaccgtaaaagaccgcattttccaacaagccataacacagcgccttacaccggtctacgagccgttgttctcggagaacagttacggttatcgcccgggaagaagcgcgaaagatgccattcagaaggtgaaagagtatgcagagcagggatatatccatggggtagcattggacctgtcgaagtactttgataccctgaaccatgagatactcctgaatatcctgcgcagaaatgtgagggacgaaagggtaatccagtggattaagaggtacttaaagagtggcgtgatggaaaacggagtagtcatggaaacagaagaaggttcgccgcaaggaggaaatctttcccccctgctggcaaacatctatctgaatgagtttgaccaggagtatcagaagcgtggagttgtatttgtccgttacg

SEQ ID NO: 3379 - DNA, 325 bp, Unknown
  gut microbiota DNA sequence
taaataaaaatgaagccgtatattatcccggcgcctttgcaggcaagacaggatacacctccttagcgggaaacaccctggttacctgtgccaggaaaaatgacatgactctgattgcagtggtgctcaacggccaccagtcccattactctgataccaaggctcttttcgattttggtttccgcaattttcagtctctacggactgttgattacgaaaccaggtacaagtccctggaaaatgacatgaccattgccggcatgacctccggcgacagcatatccctggagctggaccggagcggccgcgtggtgatacccaggga

SEQ ID NO: 3380 - DNA, 2200 bp, Unknown
  gut microbiota DNA sequence
tcgccttcataattaccgccgttcaccttaagcttaagcttggacagctcaaagttttcagtgaatgtattgccaatctcagtgaggaacatcttgtcggaacagccctctgcgctctcagcctgacttaagtccagggttccaaccgcgttctcatcttttccctcaatatcaaagctgaggacctctgtgccgtcagtcagcacaccatattcaatcagcttgtccaccagcagctgtgcgtccaggccttccgtgtccagggaatccatatcctgcaccaggcttccgccgcctccgtgatatatggaaatcacagctaccggcataacgttgggatccggaactttatcgctggccccgcctgtgcttgggggaaccatatcctcctgggatttagctgctgccgcagcagtggtttcttttttctgtttttcagtggtaggtgtacaggctgccagggatactgccatcaggacggtcataacaccaatcaaccattttttcataattgtaaagcctccttaaataatcctcttaaaaacttctgaaccaggtgttgagctttgtcagcgcctttaccagggcctccagctcttcctctgtcaattctttcactacgctgtctatcatctgttcatggaacttcttatgatgataataagccttaactcctttttctgaaagggatatgaatacgaccctgcggtcctcactgctgcggttacggactacatagcccttttttaccaggctgttcacggatatagttaatgttcccaccgtgaccgacagttcccgggcaatggatgacatgttctttggcctgtctatgccgatggcgtctatgacatgcatatcgttattggtaatatcactaaactccgaggtgataattgccttctgctctatatcattgacatcgcggaacaggctaaccaaaacttcattcagcgtctcgtaagctcccacgtttctccctttcactttctgcttcaaaagcttcttactgattgtacagtattttaagtgttcgcacaaccccctaaatccttataaaattcttaaaaggttgtgatttttttgtttcatttacatttttatccagatttacttattaaatacaagacgcgaaaatgtttctccccgttcctcaaaattcctgaagatgccatagctggcagcggccggcgacagcacgcagcttgtgccgggtctcgttatctgacgcgcccgcttgacaccgtcttccagatgctccgccagtataagcctggccctgttcttaaattcaggataatacttatgtatctcctggtatatccttttgcccgtggcctccatcaggatgatatggggcacctggcaatccgacagatattcaatcagttccctgtagtcgattccccgatccataccgcctatgagaactgtatccgtatccttcagcgtcttaagggcctgaatggtggtatcgcaaatcgtagagatggagtcgtcataatacttcactccctcccgctccccaatatactgaagccggtggggaaggggttcgtatgtcttaagcccccgggcaaaaacctggtcatccattcccagtatgctgcacactccatacgccacgccgatatcaaaataattatgctgtcccagaagcttgatttcatccgtagggatacaaaaagactttccccggaagtgaacccaggttccgtcctgctcctgaaccacgtccagctctttgccgctgccgtccatacctgcccttatcaatccggacggacaggttccctcctccggcaggcactgtacgttgcagatcagaatgtcatccggcctctggtttttaaagatatgatgcttggcctccacatacttttccatggtaccgtaatggtccagatgctcttcatggatgttcaccagaattcctatatggggtgaaaccgtcatatattccagctgatggcaggaaagctcaaacacaatcctggtgtccggcttcacttcctccatgtgatccagggccggtatacctatattgcccaccagaagggcatccatgcccgcctgcttaagcaggtgatacagaagggtcgtgaccgtactcttgcccttggttcccgtgattccgataatctgatcccggaaacactggaaaaacacctctgtctgcgacaatatactgcacctgtat

SEQ ID NO: 3381 - DNA, 1215 bp, Unknown
  gut microbiota DNA sequence
atgatacagaagggtcgtgaccgtactcttgcccttggttcctgtgattccgataatctgatcccggaaacactggaaaaacacctctgtctgcgacaatatactgcacctgtattcattttcaggccgctccaggacaatgcccgggcttttaaatacaacatcgtaatcatccatacatttctggtaatccgggccggtatgccacaccgtaccgtcctcaggcaaggcagcaggatccttcaaatccgctatgtccagaactttatatgttcccagccgcctgaggacattccaggtggactgtccttctctgccataacccagaagcagtatgcgtttccccttaatccagtgctctatcttctctatcacgtctgttctccttgcaagccgtctgtacagcatttcctcaccagccccgctaattcatccgggaccaggttattcccgtcataataggatgagtactggtctcccctggttctgtaggtctgatacaggtctgtggttttataataggatagaagacagggcagcgcctcacctgcatcctccagccctttgatcgtaagtacgatggctgtattgatttcatcacggctgcccacacactcaaagggtttctcttcctctatcccaatcagctggtccagggtttccttcatatcccaatcgtccagcatgttccggccaaagatatccctgacttcctgaggcttaagaaagggcgacagaatcaggtacacaaacaggcacttggggcagtgtccgcaccaggaatcagtcttgctcccggcattacagcttcggaatatgccgtggtactgcttctgccccgcaaaaaacctggcaatctggaattcactcaaagggcgcagcatactgaagtagtatgcgctccccttcaggtatgtggtctgataataatggaaatcctcctcaaacttaaagcttttggaatactggtggttgaccgtgcttccctggaccgtgctctcgttggcactggattcgttggacagggccaccatggtcaggccatgcatcctggccgctatgataccggaaaatgccaccagtgcggaaaagggcgtatgcccattcagatatccctggcggttgagctccagcatattggagtccagggtgcgctttgcgcttatgacatgggccgcgtccaggcccgccacctcggtggtgtgtatggtggcc

SEQ ID NO: 3382 - DNA, 563 bp, Unknown
  gut microbiota DNA sequence
atatgttgtctgataataatggaaatcctcctcaaacttaaagcttttggaatactggtggttgaccgtgctaccctggaccgtgctctcgttggcactggattcgttggacagggccaccatggtcaggccatgcatcctggctgctataataccggaaaatgccaccagcgcggaaaagggcgtatgcccattcagatatccctggcggttgagctccagcatgttggaatccagggtgcgctttgcgcttatgacatgggccgcgtccaggcccgccacctcggtggtgtgtatggtggcccctctgggattgataatataggcgcagacggaccttcccgccagacgcagaagctccagcgtcaccgcggaatcctttcctccgcctatggggaccaggacgccgttacccttcccatctgtttccacaccacattcctcatgccgctctttatattggtctgtgcagggatctttaagctggcacgcgcactgagtctcatgctggccaacgcaccggatatccataaaatgattgggatccgcttcctttataccgt

SEQ ID NO: 3383 - DNA, 25599 bp, Unknown
  gut microbiota DNA sequence
gtcctcatgccgctctttatattggtctgtgcagggatctttaagctggcccacgcactgagtctcatgctggccaacgcaccggatatccataaaatgattgggatccgcttcctttataccgttcacatagaaaaattcacccaatccgttaaaatacagatccttccaccagtcaatctggtcctggttcagccatccggcttccactgtcactataggcgggcaggctattttccagtagcttaccagctccaccattcccagggaaaatatcatgtcctgcataagcctgtcttctgaccatctgcggcagtccccctctgccttgggaaacacccataccggcgcaaactcagacagtcccagggtctcaaaccggtatgtgatcttcaggcagctgtctttttcctctatctcatatcctctgtaagcaaaccggggatactgttcccgcaggctcagatactgtttcattcctcattcctcttctcttcacagcataaacccgctgtatgccagtgtatggccgtagcgtccagccgtaatgctcattccggctggacgcaggcataccctaaggccctgatgtaatcctatacagggcgcacatacaacggattcccttttactatggctattatagtcaataacccttgatattgcaatgtttttttacacgtcggcaagcgccggacacagctttatctgaccgcacccgccagcaccacgctggccgccactcccgccgccgtggcaataagcccccctgccaatgtatacctggtcctggtaatgcctacgctgccaaaatatacgctcaggcagtacagcactgtctccgtactgctcatgagtacagacgcaataagtccaagcgaggagtctgtgccgtactccttaaatatatccagcaccagccctgtggcggctgagttggataccagacgcaccaggaccacaggtacgatttggggcggtatgtgcagaagagccgcgggcatctgcagcagctctcccagaaaatccagaaacccggatgccctgaggactcccaccgacaccagaagtcccaccagggtcggcaggatacctgccactgtcttcatgccgtcctttgccccgtctatgaagtcgtccagcaccggacggcccgataaaaggccgaatcccacaatataaaaaatcatcagagggaccattgcctctgacaggaaaatcaggaatttcatatatcagttccaggtccgtttgtttattacatcttattcccctgatctttgtttcatgacgggaaatgcccctgcgccttttctcccctgttatcataaaaactgccgtccaaagagcggaacggcagttctgattttacggtagttctgattttacggtatatccattctgcaatccgtcatgagtccctctttcttccatgaagggcaatatacaatccggataacaaagaggaaatcacggctgcaagataataactgcggggcccttcccctgtctttggcagaggcgcaagaggcacatcctcatccaaaatcgttatttgggccggttcctccggccattgtgccatgggtacctgcaaagtatataccatggcggttacatccagatcacattttacacatttgctaaatttttactaaaagccctctacacctgtatcattctcaccatccgcatcagttccagagcgctcctgaagctgacaacctctccctttgtgattctcccgcgcacacttccctgcagactggaattctgtctgtattttatatagaccaccagcacttccctggcctttaaggcatgctggaaaggaatacggtctatgctgtacaccagattatccctgctgacctggggatgacgggcactgtcctcccggtactgcctttccatctctctgttcaggaacctgtaatccgtagtggactgaggagcccccacccagttgcacatctcatccagcttcaataccatgtctccggccccgttaaacaataccggctccctcagataacagttgtagattcccccgcaaggctccccttcccttgtgccctggatacataccaacattgtacttgccctgtcggatacgattagttcctcaattcgttttatggcctcttcatcctgtactaatgtgccgcccatattctcagctcctcttccctcttatgctctttgatttccggattacaacagaatcccccttttgttgtaaatttccgcgccatctgtctccccccgcccatccgggcataattttgcggtttatccacactcaattgcacacacaaaaaccaggccggttagacatggctttaaccagcctggtttttgtgggataacagccgtaaaactcagcagcttttcacattcatatggcatacgttccaaatatgtagtataataattcttaacagaactccggcgtttacaacaaaagggggattctgttgtatctgtctatcagcagattcattttctccagttgtctcaggtgattctccccgctttccattgtataaattctggttgtgttgacactgctgtgtccaagtatgtctgccagccttaccaaatccttttcctggctgtaatacacccttgcaaacaagtgcctgagattatgagggaataccttgtccggattaacccctgccttgcggctgatttgtttcatctcccgccatatgttactccggtccatgggctttccgctgcgcgtgacgaatatcataccggatataatgtttctcttccttgcatatgccttaagaagcctgcacaatccgttggtcaggaatacggttcttacctttcccttgcagtccacctccgcaacctgcttatccaccgcattcaccgtaatgaagctcagctctgatatacggattccggtggagcatacggtctgcagcagcaggctaagtctctcattcccctcaccgcgggcaacgttcacaagccgtatatattcctcccgtgaaagctccctctgcccggaacagaacatcctatgctttacttttatgagccgtaccgtgcagtcctcccagccaaaccacttaaagaagccgttcagtgccgcaagggcgctgttggctgtaaccggtgaaagctgttcccttaacgtatctttccacacaatcaccaattccttactcaccggctttccatcggcatatttcctgaacaggttcaaataataaaaatatttcttaatggtaccgctgctcatttcattctgatgcatctccccgcaatagtcctttatcatattgtctgtgattattctcttagccatgtccgttcctccttgggttgtcccgggtctgtcccttatggggtaggcttcccattcattggcggattattctgctgtaatgcttcggtataacaggtaacgccaaaaaggcacccgaaaccaaagcagttccggatgccccttcataaccatatcattctcataattacgccctgaaaagctgcgtattccagcttctacaggccaaggcccttgctcacattcactacaaagtcctgcacattggtcacaatgcttttggcagacaggcttcccctgtcacccagtttattcacggcgaattcagacacatctacactgtaaaaatacacctggcgtatggtcccgtccggcataacacggaaggaaggagtcatattgcccgttgcaatggagtgaagggtggtggccatacagatgaccgtggtagctttcctcacacagtctctcatggcatcctggccctcatatacattggcgtacacctccggcagcgggccgtcgtcacggatggaacccaccagcacaaagggtacatccttcttcacacagctgtatatgatgccgttatcaatcccctccttctcaacaaaggccggaatggagccgtggaattttacccggttgatggtgtcgatgtggttgtaatgaccgtttggctggctgtactgggtatagatgttctgacccaaagcagtgtttaagtaagccccctccaggtcatgggtggccagcgcattgcctgctaaaagggcatccacatacccgttcatcaccagttttgaaaaggcttccctggaatcggaatcaaaagcacaggcaggtcccatgacccaaaccacatatccgtgttccctctcatggcgaagcagctcataaatgttatcataatccttggaaaaggccgtctccctggagcgtctctggcggaaggcaaatgcttcgtcatggcctccctctccctcgtcaaagccgtggggatatacaaaaataccgtcctcacagttctcggtcctccccgtaaagaccaggtccccctgttttaagttcctaaactccctgacataaatcttcccattctcgtacactgccacgcagtccatacggctctcttctgccagcagccactggcccttaaccttaaaatactccggaaaaatggtggttgcatggtaatgctccggcgccaccttatccttgggcgccggggccgtcacagcgtccggtgcatccgtaaattggctttggctgaaatccggctccttatattttaccagtttaaaagacattgcgttatccccctatacggtttgtttatggatttaagcatatcacgattaccgccgccgcgcaatgacgccagaccatgttttccacagcctggcgttataatattgtatatggttgtatgttgcctaaggattcaccacattctgctcccctactccacaaacaaagccgtggaataataccggtccccgctgtcaggcagcagtgcgacaatggtctttccctcattctcaggccgcctggcaacctcaatcgcagcatacagtgcagcccccgatgaaataccggtaagaagtccctctgtcctggccagcatctttgctgttgcaaagggcgcttcattatccactgttataatttcatcgtatacgcgggtatccagaaccttgggtatgaatccggctccaattccctgaatcttatgagggccggcacttcctccggaaagaaccgccgatgtggacggctccacggctattaccttgatgcggggattcttttccttcaagtatgttccggtccctgtaagggtgcctcctgttcccacggaagccacaaatatatctacctgtccgtccgtgtcctgccaaatttccggacccgtactctccatatgagccctgggattcaccggattatcaaactgacccggtatgaaactgtccggaatctcttttgccagctcctccgctttctcaatggcaccgctcatccccttctcaccaggtgtgagcacaatctcagccccatatgccttcagtatattgcggcgctccacgctcatggtatccggcatggtcagtatcatcctgtaacccttgactgccgagacagcggccagaccaatgccggtgttgcctgaggtaggctcaatgataacggaacccggtttcagccggccggtacgttccgcgtcctcaatcatggccttcccaactctgtcctttacactcccagccggattaaagtactccagcttcacaagaagacgcgctttcagctgttccttcttctcgatgttggtcacctctaccaacggggtgttgcctaccagctcaatggctcccttataaatcttagacataacttccaccgttccctcacaggcgtgcagggcctttcttatttattcatagtttgtcactaggttttctaggattatatgtccggggaggcaatttgtcaagtattaattcatccaaagatgcagtgattcgtaatggattcataattctgcagatttataaattaacccttgatgcttgcttttgtgggcatataatgttatattgtaacaaccagacgatagaggaatataagtatctgtcgctcattatcctatattttataatatctatatgtatctgggtcttaatgatccatcttagtattctgccccgtatgtgtcgggcaatgatttccattctatcataaactacacaatgaatctgctaatatataaaaggcaaaggtgctattgtctggcttaagagaaaacgttataatggggataggttcttatatggcttgccggaacatgaggctgtatgggtgaaagaaacctgcgtgagcagggagaaacaaatggattcggtcagttggaggacaaggtaatgaaaacagccgctcagtttttcggggaggatctgcttccctatataggcgtaaaaggaaaaattcttacagttgcgcctacagagcatgttcatctggagatgcgcaggctggaagaggattttaattttatcatggaaaagggagcaatacggcatctggagtttgagagcgacagcatcacggaacaggatttaagacgcttccgggaatatgaagcttacataggaatgatatacagtgctcctgtaatgacaaccgtaatctgtacttccaatacaaaggtccagaaaaaggaactgattaatggggacagtgtctacaggatagaggtggtacggctaagggacaggaatgccgataaggtctttaaaaaactgagacagaaaatccataaaggtaagagactgcgccgccgtgacatttttcccctgctcctgacgccattgatgtcaggggatatggaaatgagtgagcgtatttatcagggcatggagtttctccagtgtgaagaactgcaagtaagctctgatgagagaaaaagaatgcagtccgtactgtatgcactggctgtaaagtttttgagcagaaatgaattagagcgaataaaggagaggattggaatgactgtattaggaaagatgcttttggaggaagggatagaaaaaggaattgagaagggtatagaacaaggaatggagcaaggtgtaaaacaggggcaggggcgtgtcaatgctcttattgtaaagctggcagaagccggaaggatggaggacatcgtacgggctgcatcggaccgtgagtaccaggaccgtctgtttagtgaattcggattataacctagaaataccggcatatcagagaagggtgaaactctctggtatgccggtattttatgaaaccttcctaaatcatatttttttatcttgtcggttccgccataaccccattagagtcaaaggtataggacacaccatcaatatccatggtagtatcatgaatcatgacgccattggtgtccagataataccaggcaccatccacctcaacccatcctgtctgcttcacataccccttcatgtagtaccatctgccgtccacatgcttccatccgtcagcaggaatcacggcactgtaatccgtaaatgccagctcgatggtcacattgccgttaatgccatccactgaaccggtatcagtgcactgccagatagtgcggtttggataactgttcacagtcccgtatctggcataccatatatcatagggaatctggccggtgtccatatttctggtcagccattcattgttcccatataccaccggatgatacccggcatcagaaatggtcttacagaatgcgtttacattgtctgttatctgctgcctggtcagtccgttgtccagaagatgctgggattccacatcataggcaatgggataggatatggggaaatccttaattaccttcagcacgaaattggcctcgtcaatggcggtctgtacgtccagagcctgggtatagaaaaacaccccggtgtgaatgccgtttgcaaatgcctctgtgacattcctgtcaaaataagggtctttatccttataatagcccacccgtatcatggcaaatgacacgccgtccgatgccaccctggaccagtctataccgttttcattggcccggttctggtacttggtcacggtgatgcccttttccagcgcccctgctatgggcgctcctgacgcatccacatactgcccgttctccagtgaccagggctgggccccgtaagctgctgccggcgcaaacagcgacatggcgcctataatggccgccgccgcgcatgctgccgccctctttcccttcgttaccggctttgcagactttcccgtccctcccgtctttcccggcgctccgctccttcccggccctcccgtctttcccggccctcccgtcttttccgactctccaatctctcccatctttccggccttccccaatatcctcatatcatccacctcatactctcaaattccatattaatccatatgttttttattttagcacaaaggcctctccatcgtgttgaggttttcttaatgtttcctttcaacttaagagtatatgatggcctccggcctagaagttaaattcattttcccagtcaaagtccccggattcctccaggctccggggccaatggccgcaccagtccggcacttggggatgctctacccggtccagactgggggtgtacggctttaaatccagcacaggacttccctgcctggcatctgcataagcaatgtagataacaccggcctcatggtctatatagagaatctgcaccacgctaagggcaatgggattaggcctctggggggaccgggttgcaaatatgcccattgtatccggcccctgcttataggggctttccgcctcaagtacgctcctgttttcctcatcgtcgcagccgtcaaaccaccagagtatgtctgcatgtccaaagccctccagggacttaagggccgggatgtattccggcaggagctttacgtacatgccatccttgtccatttccattgtgccaatctgttttactgtaaattgtttcatactgaaacctccttcacttgatataggctgagtttaaaccctctcacggtgtcagagtcaatatgcgccggaccggtgtttgtacttctgtaagaaacttctgagagtcagattcatcccaggagcctatatggcaaatctgccggcttggcccggctatttcatactggcggtgttcttccatccagcaggcaaaggcatgataggataatccgatattttcatatggaccatagaccataatacaagccatatcctccacaggctctgtctccctgtagcagaaaccgcccttgtccgctccttctctttccaccataacccccacctctatatctactccgtcctccgtggtccccccattgtgataaatggcaagattgttagtgcctgggctcagttttatctgttcttccctcacaaaggcatagagctgttcccacagcctcccttcacaataataatctgccacagttttcctcagggacaaaatcttacagccgggaacagactttatggtcacgttataatgggtttcaatggtgctttctttaaaatctctcatggcaatttctatcttccgtatgcgctgctgttccagccggattgaatctaaaagctgtcttttcttgtcctccagatattctgtcacaccgctgctctcccagcattccattacagcaccgatctccgtcacattaaagcccatatccctgagcaggcatattttctgcaggacaggtatctggtctgtggtatacatccggtacccggtaaatttgtcaataacagcaggcgttaaaagccctgcattatcatagtagcgaagcatccttaccgataccctggttagctttgaaaatgctccgatgcggaacataaagccacctcccttcatctgttgtatccagtataccgtctctttcggcatactacaatgcaccgcctgaacctaccggtccataatcctgcagaatatcaccgcaaccactgtgctgataaaggtagccgccagggcaggccctacaatggctgtgggatttacgcttccatactggctcctgtatgcaatcatgttcatgggtataagctgtaaggaggatatgttgataatgagaaatgtacacatctcattgctggcagtcccctcctgcctggccgcaccgcccatcccgcgttcctcctccacctttttcagctcttccatggcttttaagccggccggcgttgcagcccatcccaggcccagtatgttggcaatcatattgacgcttatctgtttccttgcctccccatccgggtccagccttggaaaaaggaaggtgagtaccggtcccattcttcttgccagctggtccaccagtccggagcggtgcccgatctccagcacccctgtccacagggtcatgacacccagcatggtgatgcacagcgtcacagcctccttcgatgcctggattgccccatcggtcaccgccgtcatctgaccgtgaagcgccccccagagtattcctgtcagtgtcattcctgcccataaataattcagcatgtttctccgcctgtttcatggcattcttattccattctattcccggtcccgctatatattcccatatcggcaccccatatgaactatttcacccaatctttcccaaatattcataattgcgctttctccgtaagaattcttacatgggcttgcgtaaaatttacagttcattacgtttacataacttctattgaccctggagcagctccatagtatattctcaccatgtcagtgatgacaacgtgcggcgccggccagaacaccggcgaaacggcagccgcatcccccaaaaagacaattaaggtgataatcctgaaatcaatggactgaatgacagactgaaaggagacatgattatgaaaagacaggcaaaatggtttctgattccatgtgcagccatggccctgaccctgggaagcgcactggtatcatttgcagccatcggatgggctgaggaaaacggcgaatgggtctattataacaacgatggcagcaaagccaccgatgtattcaagaaatccggcaacaactggttctatctggattccgacggaaacatggctaaaaaccagctgattgaggacgatgacaattatttctatgtcaactcagcaggggcaatggtcactaaccagtggcgctccattgaaaatgaagacgcaggctcagacgaaccggatgagtggtggtactatttccagtccaacggcaaggctgtaaagaaatccggaagcagtgacaatgtgaagttcgtcacccttcccacctccaccggacaggcaaagtttacctttgacgacgaaggacgcatgctctacggatggattgacgagagcggcgaaatgctgacggatgacgatgcctggaagagcggcatgtattattgcagcgataacggagacggccgcatggccacgggatggaaatatatcacagctgtaaatgacgaggacgacgacagggaaggggatggatactggttttatttttccaccaacggcaaaaagaccgcggacaacgactccaagaaaatcaacggccggaaataccgatttgatgaaaacggcgcagcccactttgaatggtataacaatcccggcaccgcctcctcctctaccgtaaacaaatactataacacagaggaagaatgctggatgtccaccggctggtttaagaccgttcccagcgaggatgtggatccggaggcccacgacgatgatgaggcccactggttctacgcagagtcaaacggcagcctggtaacggcccagattaaaaaaataaacggacagtactacggatttgatgtaaacggaaaaatgcttcagggtctctaccgcattgaatttgaggagaatggaaagaccatccgatctgctgaggagattgaggacgtggacgaactcccggatgaggacgaggacggcgtattcgtatactatttcggtgattctcctaaggaaggcgccatgaaaacaggcaccatgaccatggaaatcgacggcgacaagtactactacagctttgagaaatccggcagcaaaagaggggccggaacagacggcattgacggtgattccatctacgtgaagggaagaaggctggaagccgaggagggcaccaagtatcagccggttacctataaggatgaaacctatctcatcagtacttccggtaagctggtaaagaacaagaagaatgtaaaggattccgacgatgtatactacaagacagacagcaagggcagaatcctggattcaggcacggaaaaactggactaacgggagagtcaagccagaaccgcgcaggtaagtcacctgcagaattaccggatgaattatcaggtgggattacatgaaaacatccgtataatgaaaatcaaacatccgaatggagaaaatccccacttgacatcccccggggtacatgaggtatactggtagtacaacataacagggcggcccggaatcccttggattcccggaccgcccctaaccggttttataacctttttacagaaaggacgttttattatgaagcagctgaagaagctggcttgccgcgctgtacaggaattatccataacctttcccccaaagactgtgttatccatcatccttggtacagccattaccacctttggtatctacaatatccaccagcaggcggatataacggagggaggtattctgggattgattctgctctttcatttctggttcggcatgtcatcttccatactgtcacctgtgctggacgccttaagctatgccctgggctttcgtttcctgggcaaggaattccttaagacctccatcttcgcaaccatatgtatggccggattcttccggctctgggaactgtttcccccggtacttccaagtctggctgactacccccttctggcggctctggcaggcggatgcttcatcggtaccggatgcggcctggtggtccgccagggagcttcctgcgccggggacgacgccctggccctggtcatctccaaggttacgggctgccgcatatccagggcatacctgctgacggacgtatccgtactggtactgtccctgtcgtatattcccgcaggacgtatcgtatattcgcttataacagtgaccgtatcctcctttatgattgacttcatccagaacttcggcattcccagaaaggatgaggacaacggcaaggaaactgcggctgataacgggtaaggatacaccggctgataacggatacgggtaagaactcttacccgtatcataccggcgatgcaatccttttaaaaggcatatagatttccagacaatatgtagtcctgtcctttgcgaaaaaggacgtcatatcattggcgtatacgcactccatgggctccaggccatgtttatgggcccattggaccatcctgtgaatcatatcaaaatccggaagggtatattctgattcaataatagtatagatacattccggctcctccgtcatagagtacagactacggtcaaattcctggcccagccccttctccagtccctcatagagcaggagctgggttcctttttcctccaggtcctgtcccgtgtatgtgagtacattataaaaataagccatatccagtcccggaatggtagaggacagcttaaaccacgttcttaacccctcctgcaggtcggaacagttggccatgacaaatgctttggggaattttcttatggaatacctgcccatacacgcctctatgcggcttatatccttttccaccagcttaagcctcatgattgcctggctgtgccgcctgagggcttcctcctcctcggccatgcgctgcctgacatgctgtctcatagcggatgtggagttctgtccgctcataagacctcctatctcttccaggctggtattcatttttctgtgataaagtatgtacatcaatctgtagatatcatcctctgaataatatctgtacccattttccttcttatctgcacggatgattccttttttctcataaaaacgcagggcatccctgctcagaccgaccatctgggcaacgtcacctatgagatacccccctgttttctccgccaacgctttttccatcttcacaccctctgtttcattcagttttttcatagctacattttaagacctacccttttgagggtcaatgggcaggcggaaaatgaaagagaaccgtaataaaaatgacagatggaaggtcatgggacagccctggatatccgatggtggataatgtggataacttgtggatatctttgttaattatctggggataagggttgtcccattgtaccggataacataaattccttgtaaaataaggaaaaaagagccggcattaagccagctctcctgttaattccttcataacgttatccacagtatcaattttttccgcacggtaagcattgcttccgcagaacaaaaggccatggtccgtgtcgccctccgccgcatataccagtgccatggtaatgcagtagggaatggtcctgatgtcacagtgctccaggcactggaagcaggacttgatggccggcctggtgccgccctttatctgacttaagaaaggatttaagattgcccttcccggcatgcccacaggactctgggtgatgacaatatcttcctttcccgcatttatataagcctgcttataggcgtcagaggcatcgcactcctgggtcgtcacaaacctggtggcaacctggacgccgtcagcccccagctcaagctggtgcatcacatcttcatgggtgtatatgccgccggcagtgaccacaggtatatgcctgccatacttggctccatattcctccactacctttatgacagcctttacctcccggtcataggcctcccggtcataggtggccggcacatcggaagtgtcggcgccataggcagataactggtccagtgagaatcccagatggcctccggccagcggtccttccaccacaaccagatccggggcaatgtggcatttcctgtcccacatcttgcagatgaccatggctgatttggcagatgatacaatgggagccagcttgatcctgcggtccggcttcttctccatctcggcataggcagcttccacgtattccggcagggacacaggaagtccggcacctgatatgataatgtcagcgcctgccttcacagcctccttaacccacatgtcatagtgcttggtagccaccatgatattgaaaccaatcgcgccctggggtgcgatttctctggccagtttcatctccctgcggatggaccttaagtttgcttccacgaaattggtggtgaaatccggctccctgaaaccaatctgggcagctgagataatgcccatgccgccggcttttgccacggcaccggccagcctgtgcaggctgatgcctacccccattcctccctggatgattggtttttcaactactaaatccccgattaccaatggttttaactcactcattacattctcctaaatctctggtacctgtgctccctaagctcctcatcgctcatggcgagatacgttttaaagaactctgccatggcgctgtccatatattcagcgagacggtagagattgtccgtgcatgctggttcttcctcaggcacgatgcgttcaatcagctcaagctgtaaaaggtccttagccgtcaccttcatgactttggcggcatccggcgccttcttgctgtctttatacagaatggaggcaaatccctccggtgaaaggatggagtaaatggcattttccagcatccacacctcgtcggccacagccatggccaatgctccgccgctccctccctctccgattacaatggagagcacaggcaccttgaggtctgatatctcgaacaggtttctggcaatggcctcgccctgtcctctttcctctgcctccagaccgcaaaaggctcccggcgtatccacaaagcagacaaccggacggttgaaggtctctgcctgcttcatcaggcgcagcgccttgcggtagccgtcaggggacggcattccaaagttgcggataatgttgtccttggtgttcttgcccttctgctgtccgatgaccgtcacgggcataccgtggaacatggcaacgccgcccacaatggctccatcatccttaaaataccggtccccgtggaattcaatgaattcatcaaacagggcgttgatataatccgttgcaacgggacggtcggacttcctggagagaagaacggtatcccaggcagtttttccactatccgcctgcaattgggatggtttatccacaaatgtcctggctgtctccaccggactctttaactctatgttcatcttgtggctgcggtgcatatacagaatctggccaatgacccttttctggtccttccgctccacaatcttatccacaaatccatgctccagcagaaattcagaacgctggaacccttccggcagcttctgcccaatggtctgctcaataaccctgggacccgcaaaaccaatcagcgcatgaggctctgccaggataatgtcgcccagcatggcaaagctggccgtgacgcctcctgtggtagggtcggtaagtacgctgataaacagctggccggcctcatgatggcgctttaaggcagccgaggtcttggccatctgcatcagggatacaatgccctcctgcatcctggctccgcctgagcaggcaaagaggataaccggcagtttttccctggtggcccgctctactgcgtcggtgattttctcacccaccacatggcccatgctgctcataatgaaacgggcatcgcagacgccaactaccgcaggatttccgtcaactttgcatttgccggtgacaatggcctcgttgaggcggctcttttccctggcagctatgacctttttctcatatcccggaaaattcagagggttggagaaaggcatttccttgttccactcctcaaaggttccctcatcagccagcatctcgatacggcggtatgcatgaacacggaaatagccgttgcacttgggacatacgtagtaattgttctttacgtcttccacatagattggctgcccgcacttattacatttgcgccataatccttccgggatcaccggctcctggtcggaaccggcctggggcttatatttcgtatctattttcgtatacgtttttttgaacatgttccgcaacatagcaatttcctttctgcatcgcgcacttgtaccgcgcatttgcactgcgcacgccagctcctgtcctccaggcgctaatgtgcgaaagcacttcgccatacttagcggggtctttaacaatttagtatggtcgatgtttccttcccgtcagcggcacaaaatcaccgcacatagtccgggaaatgcttctcaataaagctggtgtctgtatctccctgctggaatgcgtcattttccaggatttcatactggaagttgatatttgtctctattccctctatgattacctcgcccagggcgctgcgcatcttggatatggccgcctcccggtccttgtcatatactatcagcttcatcagcatggagtcatagtttgcaggcaccttataatcattgtaaatatgggtgtccacgcggactccgttgcctccgggaatgtgaacattggtgatgcgtcccggacatggcatgaagttcttagagggattctcggcattgatacggcactcaatggcatggccttcaatcctcacatcctcctggctgacgcttaaggtttcccctgcagccacccggatttgctccttaatcaggtccattcccgtaaccatctcagtaacaggatgctccacctgaatcctggtattcatctccatgaaataaaagttcttatccttatccagaaggaattctatggttcccgcattctcatatcccactgccttggctgcctttacggcggtatcgcccatggcttttcgcaggccgggtgaaatcacatcacagggagcttcctccagcaccttctggtggcgtctctggatggagcagtcacgctctcccagatggaccacattgccgtgcttgtcggccatgatttggaactccacatgccttggcttttcaatgtatttctcaatatacatggtgtcgtcggaaaatcccttcaccgactccatctgggccgcgttaaagagctcggtaaagtcctccgggcttctggaaatcctcatgcccttgccgccgccgccggatgacgccttaatcatcaccgggaagccgatttcttttgccatggccagaccgtcctcagccgcgtggaccggttccttgctgccaggcaccacaggcacccctgcttccatcatggtttttcgggcttcggatttattgcccatcttattgataatttccgcgctgggcccgataaacgcaatattgcactcggcgcacagcttggcaaacctggcattctcagacaggaagccgaatcccggatggatggcgtccgccttcatggccactgtggctgccagaatcctctcaatattcagataactgtccgtggaggctgcgggcccgatacagatagcctcgtcggccagcatggtgtgaagacagtccctgtcagcctcggaatatacggccacggtctgaattcccatctcacggcaggcccggataacgcggaccgcaatctcacctctattggcaatcaaaatcttgttaaacatcggcattctccctcgattccctaacctaccatgaatgttagctctgcgctcaccgccagctttccgtcaaccgtcgcagtggcctttcccacaccaaccggtcccttctgcttgatgatttcgcactccagctttactctgtcgcccggcactaccttgcgtttgaacttagccttttcgatgcctccaaagtaagccacctttcccttgaacccttcctgggacagaatagccactgcccctgtctgggccagggcctcaatcagcagcacgcccggcataaccggctcctgcggaaagtgtcccttaaaaaatgactcatcataggtcacgcatttatatcccacggcgcgcacgcctggttccagctcctcaatacaatccaccagcaggaaaggatgcctgtgcggtatgatctcctggatttctttaactcccatcaacatatccttaaatccctccgtcttttggtattatttgatgcggaacaatggctggccgtattccaccacttcctcgttgttcacaaggacagcttccacgataccgtcgtattcactctcaatctcattcatcagcttcatggcctcgataattcccagtacctggccctttttcacggtatctcctgcctgtacaaaaggagcagcgtccggtgaagaagcattgtagaaggttcccaccaagggggaagtaactaccttgtctgaaccaatatcagcgcggccagccgtgtcctgggctgcctgaggcatcatggccggggacatcatggatggagctgccaggccgttctgcatagctgccatctgcatggacggcgcgtctggggacggagcgcttaccgttacaatctgaggcatctctttttcgcgcttcagtgaaagcttaagctctccttcctttaactccaggctggtcagcccgttgtctgaaactgcctgcattaattttatgatttcatctacgttcatagctcatggcctcctattattcgctgaactttttcacaatcaggctggcattatgtccgccaaatccaagggaattgctgatggccacatccacgttcatggaaacgccgtcgcccatggtgtaatccagatcgcagccctctcccggcttctcaagtcctactgtggcatggacaaatccatcctggatggacttcacgcaggtgataaactccacgccgcctgctgctcccagaagatggccaatcatggatttggtggagttaatcttcactttttccgcatggtctcccaaagccagtctgatggcctttgtctcaaacaaatcattgtgatgggtgctggtgccgtgggcattgacatagtcaatatcctccgccgtgatacctgcatcccttatggcgttctccatggcacgggctgcgccgcttccgtcctctgcaggggaagtgatgtggaaggcgtcacaggtggcgccgtatccaactacctctgccaggatattggctcctctggcctttgcatgttccagggactccagcactaccacgccggctccctcgcccataacaaaaccatttctgtcctcgtcaaaggggatggatgccctggaagcgtcctctgtggtgttcagggctgtaagggaggtaaatcccgcaatgccgataggggtaatgctggcctctgctccgccggccaccatcacgtccgcctcgccgtactgaatggaacggaacgcctcaccgatggaatgggttccggttgcgcatgcagttaccacgttgaagcattttcccttaagcccgaactggatggcaacattgcctgcggccatgttgcttatcatgagtggcaccagaagggggttcacacggctgggtcccttctcgttaagcttctttacatccttttccatggcctggagagagccgatgccggatcccacgcacacgcctactcggtagggatcctccttctccatatcaatgccggactgctccagggcttccttggatgcagccaccgcaaactgagaaaatgcctccatacggcgggctgccttggcatccatgtactgttttggatcaaatccctttacctctgctgccagcttgcacttataatcggttgtatcaaaataagtaatggggccgattccaactgtcttatccttaagtccctgccagaagctctccacatcatttccaatgggagtaatggcacccataccggttactactactcttgttttcatactatctcactcctgttcttttcagcccggaaaatattccaggtcatcctacatggccattccgccgtctacgcttaagacctggcctgtgatatatcctgccttatcagaagccaggaaagcaactgtctctgcaatgtcctgggtacttccgaaatgtttcattggaatctgctccgttgcagctgcctttacgctgtcgctgagaacatcggtcatctccgttgcaatgaaaccaggagccactgcatttaccgtgattcccctgctggccagctccctggcagctgatttggtgatgccgatgacaccggccttggccgcacagtaattggcctggcctgcattgcccagaacccctgatacggaggagatgttgatgattcttcctgccttctgctttaacatctggcgggaaatatgcttgatgcagttaaatacgcccttcaggttcgtgcttatgacagcgtcaaaatcttcctctgacatcttcataagcaggttgtccctggtgattcccgcattgttcaccaggatatccagacggccatacctggaaaccacgtctgccatcatcctgccgcagctctcaaaatcggaaacattgcactgaactgcctctgccttgcctcctgctgcttcgatttccttcactacttcctctgcctttgccgcagagccattataattcacgattacggatgcgccttcccggcccagtgtaagggcaatctgacggccgattccgcggcttgcgcctgttaccagtgcaatctttccttccagcatatggtctctcctcctgcttatgacttaagtgcttccgctactttactgatatcttctaatttttccacattgagggttttcacgtccctgcttattttcctcatgaagccggccagggttttacctggtccaatctcgatgaaggtgtccacgccgtccgcaatcatggcttccacgctctgctgccatctgaccgaggatgaaacctgccttgtgagcagctcctttacctctgcagcgctcttaacatactgtgccgtcacattggccacataaggaatctgcggctcatgaagctccacctgggaaaggacctctcccagcttctcgcctgcatctgccagcataccggaatggaagggtccgctgacatttaacatcactgccctctttgctccggctgcctttaacttctcacaggcgtcttccacagcagccttctcaccggaaattacaatctgtcccggacagttataattggcaatccacacaccttccatggctcctgtcacttcttcaatggcagaagcgtccagggccaggatagctgccatggcgccctcgcccacaggtacggcctcctgcataagtattcccctctggcggacggtacggatggcatcctcatcactcatgactccggcagctgccagggcgcagtactctccaaggctgagtcccgcggccacatccggattaattccattttcttccagaacacgcatcatggcgatactggcggttaccatggctgcctgggtgtattccgtgatatccagcctgtcattttcctcaaagcacagctggggcatggaaaatcccattaactctgttgccttgtcaaagattctttttccggtctcagtctgctcatagaaatcctggcccattccgcaggcctgggctccctgtccagggaaaataaatgcaatcttgctcatacctgttatctccttatcctaaatcctgtcccaatcaactggttcctgccggcaaaatacgccgtgcggtattagttccagcccatcagcttacctgcctgtgccatgatttcctcaatcatctccttacaggtctgctccttggatatcatgcctgcaatctgtccggccataacggttccgccgtttacatcaccttccataaccgctttgcgcagggttcccagagtcaggtactccagctcctcaaaggacttgccctcctgctccagtttgatgtattccctggtcatctggttcctgagacctcttacaggatggccgtggctgcgtcctgtgaccgtggaatcaatatccttggccttgataatgcgctgcttataattctcatgtacaatggattctttggcaaccacgaacctggttcccatctgaactgcctcagcacccagcataaaggccgcggctattcctcttccgtctccgataccgcctgccgcgataacaggaatggaaacagcgtccgctacctggggaaccagcgtcatggtggtctgctctcctatatggccgccggactccatgccctcagccaccactgcgtccgccccgtacttctccatacggcgggccagggccacgcttgctaccacaggaatcaccttaatgcctgctgccttccacatttccatatatttttcggggtttccggcaccggtggtaaccaccttgatgccttcctccacaaccacctttgccacatcctccgcatgggggctcagcagcatgacattgacgccaaaaggcttatctgtcagctctctggccttgcggatctcgtcgcgcaccacttcccccggtgcattggcaccgccaatcagtccgaaaccgcctgcttcggatacggctgctgccaggttgtgttctgctacccaggccatgccgccctgaataataggatattcaattcctaacatttctgtaattcttgttttcattgttctacctccagttctacatttcctgggctttcccctattaaagtaacagcgtgcttcaattcatccacacgccgttgtcaaaccctatctgctatttatgcctctacgcctttggcttttaagtagttcataacctctccgaccgtggttaactgctctaaatcctcagcaggaatctctacagagtactcatcctccagagccataaccagctcaaacaggtctaaggagtcagcgcctaaatcttctttgaaggaggaagcctctgtaacggtatctgcctctacgcttaactgctctgcaataatttctttcatcttctctaacatggttgttgttctccttttacattttcttgatttatattataattttatttttaccactctaacagggccgcaccccaggtaaggcctgcgccgaatccggacagcaccactttgtctcctgctgacagcattcccttacggttcatctcatctaaaagaaggggaactgatgcccctgatgtattgccgtagtgttccatattcaccgggaaacggtccacatttaccttcaggcgttttgctatggattcaatgatccggtaattggcctgatggattgcgaaatacctgacatcctctgcctttacgcctgtatcgtccagtacttccattatgcactgcggtactttttttactgcaaatttaaatacttcctggccgtccatggtcatatatcccagctccggcttcttgcccatgaggaaatttccattggtcctggaaccgcaggtcagcactccgccttttgttccgtctgagtgcatgttcattcccagaataccgttttcatcggcttttaccaccactgcgcctgcgccgtctccaaataacacacaggttccccggtccgtccagtcaatcagcttgctgagcacgtctgcgccaatcacaagagctgtcttatagatgccgctgcttataaatgcatgggctgtattcagcgcatagacaaatccggtgcaggccacgctcaggtcaaaacaggctgcgtttaccgcgcctatgcggccctgtacctcgcatgcgccattgggaaaacagtaatccggcgatgaggtggccagcagtataaggtctatttcctcaggctttacgcctgcattctccagcgctttgattgaggcttcagccgccatataggaggtgctttcgctggtggcaatccttctcgcccctatccccgtccggctgcggatccactcgtcgttggtctccacaatctttgcaaggtcgtcattggtcacaatctgctccggtacatatgaaccggttcctacgattcttgttgtcattcttcttacccatcccgaatccatcagcaatcagcggactcatgccttccttcttttgcttgctcagaggaaatactttgaacatcaaagtaatactacaggaaacgtaagtatttgtcaagaaatattttttgtcgctttttgttaactttactgttctcttacatttcttaccaattctgacatttacatatattgactttgctccctgaatttggtaagttaaacttgtacaaatggggcgaatacatttcacaagggggtattaaccatgaaaactacaggtgttatccgtaaattggatgaactcggcagaatcacccttcccatcgaattaagaagaagccttgatttggatgtgaaagatggtcttgaaatcacggttcaggatgactgtatcatcctgaagaaggcagaatgtgctgacatcttcaccggaagcactgacgatttgctggaatatgaaggcaaaaaagtatcgcgtcagtccgttgtcgcactggctaaattagccggccttaatgtcaccgagtaatcaaagcacgtacatagagagaacctgcggctccttctcaacatcagaaggcatatacgccgcaggttctctctatctctttgcgtatcgttccaaatcattctcatcccatattgtctgcgtccccatcacagaa

SEQ ID NO: 3384 - DNA, 619 bp, Unknown
  gut microbiota DNA sequence
acacgtacatagagagaacctgcggctccttctcaacatcagaaggcatatacgccgcgggttctctctatctctttgcgtatcgttccaaatcattctcatcccatattgtctgcgtccccatcacagaagctgctggtacacatcccgctttgtgattccccggtccctggccactgccttcatggcttccttcctatccatgccctggtccgtatagaaggccagatgttcctgaatttccatctcttcccagcggcttatctgctcctttcgcagctcctccagaggctttccttctattactatgacacactctcctttaggctcctcctcatggtagtgttccagggcatcccggaacgtggtcctgtaggctgtctcatattttttcgtaagctccctgcatatggttatgttcctgtccccaaggaccttatataaatcttcgagtgttctcaccagatggtggggcgcctcatatacgataatggtcctggtctcctgcctcagctcctccagaattctggcccgctccttcttatctcccttctcagagggcagaaacgcctcaaagcagaatctcctggtggatagccctgacatggtaagggccgtg

SEQ ID NO: 3385 - DNA, 21145 bp, Unknown
  gut microbiota DNA sequence
aagtgttctcaccagatggtggggcgcctcatatacgataatggtcctggtctcctgcctcagctcctccaggattctggcccgctccttcttatcccccttctcagagggcagaaacgcctcaaagcagaatctcctggtggatagccctgacatggtaagggccgtgatacatgctgccggaccaggaagagaggtgacctggattcccgcctcatagcactgccttaccagttcttctcccggatccgatatgccgggggtgcccgcgtccgtaatcagggctatgtccaccccttcttccagctggcccaccaggtatctggccttgtccaccttgttatactcatggtagctggtcatgggagtctttatatcaaaatgattcagaagcttgatgctgtggcgcgtatcctctgccgcaatcaaatccacttcctttaatgtcctgagtaccctgaaggtaatatcctccagattgccgattggcgttgcgcagagatatagtgttcctgccatggccctctcccttctgttctttggatgcttaagcgtctgttcccggaacatttaagcgtctgttctttggacgctgccatcatccgtcaatatccgtaggtggtccgtatctccggggaatactccccattctggtcaaagacaatgaccggagcttccatcttaaggagaggaccgcctcccctcacggcctctatgagcaccatgttggcctcccggtccgcataaggatggaccatcttcatgcgcttgggctccaggccatggcgcttcatgacagtgataatttcaatcagccgtctgggcctgtggaccatgaaaaaacggcctcccggcttcaggacccgggttccctccctcaccacatcctccagcgtgcatttaacctcatggcgtgcaatggctttggcatcccccggattcttaagcccatgggattcattcatataggggggattcgtggttaccacatcaaaagaagccagtgcaaacaacttgctggcctccactatatcgccggtgacaatgtccaccttgccttccagatgattatatgccacgctccgtctggccatgtccgcggactcttcctgtatctccaggccggtaaagtggcttccctctgtcttggcggtaagaagaataggaatgatgcctgtgcctgttcccaggtccagcaccttttccccctttttcacaacggcaaagccggacagaaggacggcatccatgccgaagcagaatgcgcccttcctctggatgattccataatggttgcgctgcaaatcatcgatccgctcgtcgtcccgcagcataatggttccttcctgacgccaagtgtgtttcaccgtaactgtatcagttgtcatccagcttcgactttccttccttcttttcaagggcttccagctgcttaagctctgcgtccggcgtatcgcctccatgcttttctccgccgcccttgcccttctttttcctgggcttgaacttaagctggtccaccttgtattccctgatttctttttcgtcccgctccacggtcactatgaccttaacctgctggcgcagcacgttgacgctgtgcacctcgccctttaacccgtcgcttgtggtcacatagtctccgggattgggcagcttgctgtttaatacctcatatgtctcctcttcattcttaaggcagcacataaggcgtccgcacacgcctgatatcttggtgggatttaaggacaggttctgttcctttgccatcttgatggaaacaggaatgaattcagacagataggaatggcagcacagcgcccttccgcagatgccgatgcctcccataattttagtctcgtccctgacgcctacctggcgcagctcaatcctggtcttaaacacgctggccaggtccttcaccagctccctgaaatcaattctgccgtcggcggtaaagtaaaacaggaccttattattatcaaatgtgtattcggcgtcaatgagcttcatatccagatgatgctttttgattttttcctggcagattttaaaggcatccctctccttctgcttgttcctggcctctgccgtctcatcctcatccgtggccatacggatcactgattttaagggcggaaccaccttggattcatccacctcccggttgcccagaaccacatacccgtactcaatccccctggccgtctccacgataacatggtcgcctgtcttaatctggcggcctgcggggtcgaaataatatatctttcctgcggtgcggaagcgcaccccgattactgtaatcattctgtgttctccttctcttgcagccctgacacgtcctaattctccttcatagtaagaagcatcagctccatgaccagttcggtgttcacgttggcgtccagcctgattctggccttgtcaatggcttccagaattttctccagaccgtcatagccgcttgtggtgctgacactcttaacagcggagaattcatccctaaatatcagcaggttaatatcctttgtggttttatacatcaggatatccctgtaccacatctgcataaagtccaggcattccctgatatccagattctcctccttaaccttgcggatgtagtctaaaagctcggatatatccgtatccttgatatgcttcagcagatgaagcatctcccggtacatcaccccaaactcctccgactgggccaggtggatggccttgcccagattgcctctggcaaaagccgcgtatatatcagcctcgctctcattttctcccagagactgaatcagatattcctttaccacgctgtcctttaaaggcttcagcttaagctgtacacaccttgacaggatggtgggcagaaacgcgtcctgattcgtggtcaaaagcaggataaccgcataggcagggggctcttcaatggtcttaagaagggcgttctgggcctgtacggtcatcttctccgcctcatccactatatatatcttataataactgctgtagggacgtacctggatggtatcgttaatctgctcccttatatcgtccacgccgatgctggcgggcttttcatgtgtcacgtaaataagatccgggtgatttccggaaagtacctgtttgcaggcatggcactgcatacagggctcctccatccccttttcgcaaagcaggctgagggcaaatgcattggccagggatttccttcccattccagcctcgccgctcagtatatacgcatgggaaaccttccctgtctgcactgcgttgcggaaatgttcctttatctgttcatgtcctaatatatcgttaaatcccaacatagtgattggttcccccttgcgctgccggcctggtttccaaaaccccggaaatgccctaaaccggtatatccggacctccatcccggcagggacagacatcctcaataagtatagcataagaatttttcaatgtatagtactacatttttccctgtttttcctatttataacctctgtgaacccccgccgctatctgcacctgtcctgatactcggacggcgacacccccagtatcttcttaaactgcgcgctgaaatacgctgtgtctgaatagcccacctggtccgccacctcgtatacctttacccggcagtcctttagcaggtttatggccatctgcatccggtaataggccagatagttggtaaaggtgtagtcggtttccttcttaaagacccggctcaggtagccttcgctgatttccagaaaagaggccacggtgctgatggtgatatcctcccggtaatgctccctgatataccgggtggctgcctccacatacttattcttggattttttatcggaatgaaagcgcaggaccggagccgtgtctgtctcctcctcctttgccggatgttcttccatctgctctctgatgtgcctcaccgcctgttccaaatcgccgtccctcaaaggctttaacagatagtcgctgactcccaacctgagagcgctctgggcgtatttaaaatcgctgtaggccgtcaaaataatgaatttggcccggcagtcctgttcccgcagttttgttatcatctccacgccgtccattctgggcatcttcacatccgtcacaattatatccggggacaggcggaccgccagctctgccccctcctccccgttggcagcctcccctgcaatcacacagtccagtgccgcccagtcaatggtcaggataatcccgcgcctgaccattgtctcgtcttccaccacaatgactttatacatccggtacctccttctgaaccggcagcctgagggtgatggtggtcccatcctccgtgacagccgccttcacaccgtactcctgtccgtaatatattttcaatatgttgataacattgtacaatcccagatggccgtccctctttgccggagcgtcgctgttaatccagtcctccatctcccggctcatgccgcatccgttgtctgtcaccgatatgttcagtatcccctctttctggaacgcgtaaatacagatgtagccgtgtccgcagccgtccagtccatggataatggcgttttcaaccaggggctgcaggatcatcttgggcaccatgcagtcctccagctggtccggtatctctgtctcatacaggaaccgccctgtaaaacgtattttctgtatctccacatagctctcgatggtctcaagctcctctctgagtgtgataaaaggccggctggatatgctttttctcagaatgacagccaggttttccgccagcactgcaatctccggaacctggttgattctggcgttccacttgatggaatccagggtattatagagaaaatgagggttcagctgggtctggtacagcttaagcgtggtcttatttaaatccttctgcttctgcaccgtatcatccaggtacttctgcaggtccccggtcatctggttaaaactctctgtcagcctgcccagttcatcctgccggttggtgcggatgcggatggacaaatccccttttttgacctttgccatggccttgtccaacaagctcaccggctggccgatgctccgggacaacgcgcctgatatgaaaaggcagagcaccagtcccaggccggacagcgcaaggctcaccgtacccatggtgcgcacggccggggcgctgatgggagcggagcagcgcagcaggatgtaaaagccctgggaaggttccctggtccacagatatctggtatataccccctctttttccgtcccgccctggcccgatatggtatgcccgattatatcactgatttcacgttccccgtattccggcctggaacagtacaggggcttctggtgggaatccagtaccagcagtgtatcaccggacgaataaaaaccgttcagcaggttgtcaaaattttccctggtaaagtccagcaccacatacccggtcctggccccgtgggtgctctccagtgaaaatgcaccctgcatcagcacgtcgctgccggaggacggcaggtaaggatctgtcctgtaataggtgattccctgctcccccgacgccttgttgagcagtccccagttcacaggcagacggctgctcttgggcgccgtatccgtggtaaaacgcagtttcccgcccgcatcatagatactgaactgcgcatggctgtatatctcctgaaccgcctggtacatggacaaatacaaatccttctggaactctatggtcttattgtcaatcatgacccatgccgcagaaccgtcctctgtcagcgtttcacaagctttctggcaattttccaacagctgggtaaaccgttccctgacttcttccagctgctggtttccgtccacggttatctggcggttgattgaggcagtaaacagacgcatcatcacaacacttgaaaatgtaaggggcaccaaagccaccagaaggcagcccagaaataccctggttttaaaagagagtctccggtaccatatcatttcatgcccccccccccgcattttgccgggacagaatgctgttccacctggccagtacatccttcttttccctggaaagctcctccaggtccatctcaatcagcggcagcctgccaatgggcgacaatcccggcagcggcggcacatctcctctcacggagcggcggtttaaatccgacaccagaatcctctgggtatccctgctcaccgtaaaatccaggaattgcctggcagcgtcaggattcgcgcatccctttacaatggctgtgccgtccggaagggccgtggttccctcctggggataaatataatccacgtcagctccctctgacagcagggcctgggcggactcctccatggtgaccccaagggaataccttccatccaggataccggcattcacctcctgcatactgtccagggtgccatattccagattttccataaaccgttccagataatccccctttttctcccatgtatggacagccgtcacaagggcagccgaatacacatcagaccggcgcgggtccacaaatgcaatccttcccttccacctgggctccagaaggctgttccaccccaccggcagttcgcggtaggtcaccacatttgtattgtacatgatgaccagaggcagggcggagaagctggtccaccggttatcctcacattggaagctatctgttataaatgctgcctccgggcttttatatacctgccaatgttccttggtctgttccagggtctctatccccactccaaacaccacatcccaatccggcttttcctcctcattctccagtctgcctgtcatttcctcggaggacccccgttccaccttcaccatcaggttggtgcgctcctcaaactccttgatgatgggctcatatatctcttcctcctgggccgtatagagaaccaggtccggcacagcgggcatgggagctgtctgcggacctgactggcatgaggaaagagctgtcgtacacaaaaagcatagggcacagaacgctatatcccgttttccccaggcagtcctatttatccccttcacactccctcttttacccttcacagctgccttcatacccatgacagtctttttcatacgcttgtttccttcccggcattggcgccccaatgtcaatcagtcccatttgctacattataccaaagaaaaacccatttttccattgacgaagccattgaaatcattcctgccccgtgttacccttaagacagaacgcggaaattaccgttaaacggaggcaaacaatatgggtgtccaaatcattgaacaatttatctgttccaaatacccggaccagaagaaatgcgaggacggtctttttatcagcaatgactttatcgctgtcatagacggtgtcaccagcaagggagagcttacttggccggatgggtcagaaggtggatccgtttttctttctcccatgaccagcgggcgctatgccagggagatactggcccaggctcttaaaaccatggagcccggcatagacgctgcttctgcgatggaatatttaaaccaggccttagcaaaagccggaagcggacggcgtgaattcctgagggaccacccggaggagcggcttcaggcagtggtcatcctgtatagctgtgagaaaagggaagtgtgggcctttggggactgtcagtgccttatcggggatacccttcactcccacggcaaggaaatcgacggcctcatgacagaaatccgctgtctctataaccaggctgaactgattttaggaggatccgaagatgattttgcccggcatgaccccggccgggcctgcatccttcctctgctgcgccgccagttcctgctggccaaccaggaccggccctatggctatgatgtacttgacggttttgccattcactctcaccatgtgtccgtctatccggtcccgccccaaacccaggtcgtgctggccagcgacggttaccccgtattaaaagacaccctggctgaaagcgagaagtccctggatgagttgttgcagaaagaccctcagtgcctccgggaaaacagaggaacaaaggggcttgtaaaaggaaaccagagttttgatgaccggacctatgtgaggtttgcggtgttttaacccttttccaaccggagccccatacatgcctgagggcgccccctgcctgaacagggagcgcccttatggtttctatacttattcacctacatagtaatccttaatctcatattccctcagcgcttcctcatccggctcaaatccaagtcctggtttctggggaacatgcatgtaaccgtccttgtcaaccaggactctatcctcctccttaaggatgtaatccctgcggtcaaccgtccatacaggcggatcaaatgggtattccaggtattccgcgtcgctgacagcacaggccatatgaaggttagccagaaggcccacgccattggaccatgtgtggggacagaaaacagctcccttggactgcacatagtcggcaatcttcttggtgcgggtaaagccgccgcacagcaccgtatccggctggtacacgtcatagcttcccttatctgccaaatccctgaaatcatgccatctgcggttcatctcaccgcctgcaatccggatatccgtcatctcccttaagcgggccagattgtcgtaatccgcatggtgaagcggctcctccagccagtatactcccagcttctccaattccctggccaccttcactgccttcttcaaatcccagatacgctccacatcccatggcattttccatgcctggttgccgtccaccataatttccatcttatcgccaatggccccacggacagcctctaccaccttgatatcctctctcacatcctcatggtggaaacggattttcattgccttaaatcccatctccacatattccctggccttctcagctctttcctctgccggaatcctggccccgcaggagcagtatgcctttatcttatcctgtttcccgcccagaagtttatatatgggctgtccgcatttctttccaatgatatcccatagagcaatgtctaaaggccagcaccttccataatggaaatcaatgttatcaataatcttgttatggttttccatctcaaacggatccttgccgataaagaatttctcatggcccgcaaagcctgtcatcagatcgccggatccgattcctgtaattccctcatctgtgtatacataaacaatggtagacgcgaattttacccgtgggttgggatcccatgatgccaggaatggcgggtccaatggctttgcatactgtttgatttcaatacctgtgattttcataaaatacctccatacatatatataattttttattcatttccattgccaatttaatgctgtccctcttcattcacttaaccctttgcagggattttcctgatactcttaatcaggatgaccgccactgccgcgcccacaatacaggttccgatgccatacaggaacatggagcggtaaccctgtacgccctggtcaatccagcgtccaatcatggtatacagaaatacgtcagggagataaccgatacaggatgccataccggaaaccgcgcctgtgacagaacggtcaatctgcgcctcgtcaatgactgcaaagtatatgcctctcaccgcgtacacggttacatttaacaggatgaaatcaaagacacagagcatggccagtgaaggctgctgcggtgtaagcagaaacacaatcagaaatgcaataatggccgtataccccaacagaactgtctttatcctggaaccaatcttgtcagccagaaaaccgcctgtgattccccctgcaaactgtatgatgtaacggatgcctccaatctggacactgaaattcttggacatgccatatacagataccatataaggcggcaggaagctgaggattgcatagatggaataggctgtaaaaataatgagacatatcatccacatcttgggcatcaggagcacgctcttaatctgctgcaccaggcttgtaccgcttaccacatcctccttcttatccttaatcaggaaccaaagggcaatgccgactatgatggccagcagggcataggagcgaatcacccagctcaatccgaactttccgcctcccaggctgttaaaaagccccagaagcacaaacacggccgttgccgacacaactcctcttccgccctccagtataccgaacaggcggccctgttcattgctgtcccccagacaccgcactgccttgataagcgctgaccagtatgtaagtacggtggtcacaccgaaggccgcaaatatcagcctcatggtgccatagctggggaaggtggagaatagaagtcccaccaggcccgtggatatgaaggaaatagtcagcagcttccttggggatacgcgatccgcaatccacccgccgaagaaataacatatcatggaaatggttgcataggacgtggacagtgctccaaattcctcattgcttagattaagggcctccaccagaggaatataaaatgtattccggatatagggaagctggaaaataacacctgtaccgcagcagagcaccaacagggatgtccactttttcatatcaaattttttattactgttcactataaaacccccttttgtaccgtcttctcttggtttttgttgatacgcgtctcaacttgtctctcattataccgtataaaaatcaaactgccgtcttcttgttcaaaagacaacagtttggttacagctttgatacaatccgtcccaatttactgtcagcgtatgatgttggacgcctcatacacccacaaagaatcctttttcacctggtctgtctgttccggcgattccagtcgcaggtaatcagcagcgggaaacctcatcgtgaccgtggtatacgctcccactacactctcatatttcagcgagccatgatggtgcagcatcaccgacttgcaaatggccagtcccatgccaaaaccgtctcctccctggctgtgggccttatcccccttaaaaaacggctggtctatcttatccagaatatcagccgggattccgattccatgatctgttacctggatgtaagccagtgcccccccttcgccggctgccctgacttcaatgactccgccttcatgggaagccttgattgcattgtccaggacattttccatcatggtaatgagaaactctctgtcaccatagcagaatataccctccggaatatccgaagtaaaatgaatctgtttctgcccggccttcatcctcacagccatcagcgatgtctccagcatcttttttacgtcctgccgctctatgttcagcagccccggctgtatacgcgacagcttaatcattttccgggtaatggaattcagccgttttccctcttccaggatataatccaatgcctgttcctgaagctccctgtcacactcatgattcttaagcagctctgcgtaaccaatgatggatgtgagaggggtttttatttcgtgggtcagattgcctacaatctgtttgtaatcatcaatgttcctgttgatggcctcagacatcagattaaagttatgggacagctcactgatttcatcctccccctcaacggccagcttaaggggaatggattcctgagccataagctttgccgcttcattcagccgttcaatgggcgaggtaattctcttggtaatcagaaacataatcatggctgtgataaaagcctgtatcaggcacagagcaaaaaaaatattcagctgcatgtcgcaggatttatatatatcagataaatccttaatcatcacaaccttatacatggcattgtcacagggaaattcggactccacgtacagatacctggaatcccctatatccttcatatacgtaggcgtatatgctgcctgtccctccacgaaagtatagcgcggtgccggaggaaacttctcaaaactgtcatatcgaagctcctccccctcccagacctgaagataccttccctcacccgccagttcttccctgaaaccatccatgaaccctgacagcccgctctgcacatctggttcccggaaaaaagattttattttccgggcgtagacagactggtaatattccgtccttttcatctcaccttccagcgtaaaatgcagcccggtcaccacaatatagaatccgcagaaaaagaatatggccacgctggctataaatgcgcccagaaatattttctgccaaagcttcatctgtcatcactccctttaagcagataccccaccttggttatggtctgtatggcgccctcccaatccagcttttttctcagcctctggatatggatatccacagtcctggtctcccccacataattatatccccatacatcggagaggatttcctttctggtcagtaccttatcgcagttggaacacaagtagtacagcaggtcaaattccttgggtgtcagctctatctcctttccatccttaagcacacggtgctggtccgggtccacgctgatattcctgacattgagggacatggggcggcgcctgcaccggcgcagtaccgctcccaccctggctaaaaggtccatgctgtcaaatggttttgtaatataatcgtctgcccccacctgaagacactggaccttactgctcaaatcgtccagggccgtcaccacgataatgggcatctggcaatcctttaccctggcgagaatatccactccgcttacctttggcagcattaagtccagaatcagcaaatcaaagggttccgcctccaaaatttccagtgcaaattccccgtcataaacctgactggtatcatatccggcaaaagacaaatgggttttaatcaaattggaaatagccttattatcttccgcaatcagtatcctgtacatgtttcccctcccctgtatcttcctttccgtttcctgtatcctgccggcatttatcatacttttcaggatggcgcataattttaatcaacgcggcgcaggatgcaatctgcagaaacatggatggaaaaccgcctatgctggcaagagtcttggctccccccactcctgtaaaaacagccatgacagctgccatgacaccaattatcataccccatagtatcttaaggccggccggtgcctccatttcctcctcggacattcccgaggtgcacacagaagcaattgcgttggtattggaatccgctgccgtaacaaaagatatgaaggttgccagcacgaatatgggaatacacaattgtctcaggggaagcacctcgaaaagtttatatacaatggattctgcccctgaagtctccagcagcggaatcagactttcctgcatatgcatgtggatagccgtacctccgaatatggaaacccaaatcatggaaaaaacagtgggcacaaacagatttatgataatacagtccctgattttgtatccccttgccagctttcctaaaaacagggctgtaaccggagcccaggccagataactggcccagtatcctaccttcatgttcccaaggctggaccaggagctgttgcccaggttcatggaatccgtaaacaggttgcgcataaagaaggaatccatcagctctcccactgattcaacgccaaagttcaatatgaattttgtgggtccaaacaggaaaatgaacagaatcaggaatgaaaatatatatacattaaagctggaaagccacttaattcccttcataatgcccgaagacgccgatatggtatataccaggataatggccgccatgacgattatcagcataatgccgttggtaggtattcctgttatgttggatatgcctcccgccacagaaaatgcccctgtggacagggaacccgacataccggcgcagagtatgaaaatacagagggcgtcgatgatgtctgccagccttccctttgttacccgttcccccagcaacggcgaaatgcaggcccccaatgaaaatggtttcttcatattgtaataggtaaacgcgaatacggttgcggccagggcataaattgcatagggtgtaataccccagtgcagatacatctgggccatggcaaaaacagcagcctgaggtgagttgggctctatatcaaaaaacggcgatggatcactcataagatacagcggctctgctgctgcccagaacataagaccggcggctatggtcgtacacaaactgattgcaaaccagttgaatttgcccagtattggtttggcatcctttccgccaatcactgtatttccaaatttagaaaagcaggcatagaagcatacccccaccgctgccagtccataacctgagaacagccatttaaaattcccccaaatccaatcctttaccccattgaccaccttcaaaaaagcatcctgggacacaaatcccaaaatcaataccattagcagcactaaaaacggaggccagaatacccagcctcttaatctgctttttctcttttgccccgacaccttctccattaccagtacctcctcatctttagtctgagccccttttctgcccgaagacttataaccggtgattgtatatattgacctgtaaaataaagtaattaggctcattataccatttgaacctagagtccagaaacaattttacaactttgatacaaaaaccaggcaaataatccgccaattccacccccttccctctcttttttatggaagcatctgacttacagtctgccggcgttcctttttccacatccgatacaaaacagttacatctttatccacaaaaaaaggctgcaattccaccggcacatgccaacgaaaccgcagccttcctcacacattactgcttaaatcacaattcatataacttcattaccctgatccaaatattttctcacccctgcctcaaacagctgctgccgtttccttgccgtttcccggcaggcttcggcttcctccttccacacatccgccaccagccccggacagtctcccattatccgacacaattcctcagctgtatacacagcgtcctcacccaggccaagaatatccatgatgcggcaatccagcatcttattgtagctgttcttggaacggattccctttatatgtgaaatacaatccgtacatgttttgtcactgcccaggaacctgcatggcccgcatatatcatcagccccggatgtgacttttatctgtatccggtgattccctataatctcatttgctgcccggtaaaaatcatggccgtaatctgtatccggtacaaaaacctggattccgcctccatacagcttgataatgtccataaaatgatggggtttgattaccatttttatatctcctgtctatccggcctgttcctacagtcccagatattcttcaaacagattgcacaccctgactgtgtccggttcatgttccatctcacagaatatgcgaagcagcggttccgtaccagagaatctggcgataacccagccgccgttcttaaaatataccttgcatccgtccatataagaaacatggtctgtctcaaagggcatttccggcagtttccgttcctccataaggatgttatggattcgttccttttcctctggcgtaaacctgtaatcccgctccgccatatggatggctccatattccttcctgatatccgccgctatctccgacagcctcttcccgctgacagctatcatctccaccagaagggccgccgcatagatgccgtcctttccgtgtatatggccctttaccgccagtccgcctgaggactcgcctcctataatggcatccgtttcctgcattttcgcggatatatgcttgaaccccaccggcacctcgtagcatttctgcccaaagctctctgccaccttgtccagcacatgggtggttgccaggttgcgcacagcaggtccccgccaccccttgtatttcagcagatagtaatagagcatgaccagtatgttgtttgcgtggagataatgtccctggtcatcaatgactcccagtctgtccgcatctccgtccgtggcaatgccgatatcgcaataccggtccagcacataattctggagattccgcagagtccgctctgtgggcgccggcatctttccgccgaacagggtgtcgtgcctggaattaatggtttctatggtacaccttgcaatggaaagaatggtgctcagagccgtcaggctcacaccgtacatgggatcaatggcaatgcgcaaatctcgctctttgatggcgtccatgttgatcacggatatgatgttatccagatactcattcatgggattgatttccctgaccatgcccttccttacaagctccaggtaggatggcggcggcatctgtccgttttcctcctcattgggaagataaagttcctctgcctgttccaggtaatactcaatctctgctgtctgcttctcatccgcgtcccttcccccgtatgtaaacaccttgataccgttatagatggccggattatggctggctgtcaccatcatgccgtagctcagctcatgcttcatcacatagaacattaccagcggagtgggcgagctgcggtttacaaaccacacccggattccctggtttccaaatatttcgcaggaccatatgatggcctcttttgaaaggaaccgcctgtcataccccatgacaacgccctgaccctccacaccctctgccttcatcttaaggcatatggccagcgccagcttttgtatgttttcctttgtaaattcttccccaatgatggctctccagccgcctgtcccgaactttaccatatgttttctcctcattttcctcataaaagcctgaaggtttccacaaaacgcttcaggcttttgcacatactacacgattgacacctttcctttgctcaccttcaggaatatcagcagcatgacaaccgtactcacagtcagaatagaggccagcgctgccgccgtaccatagctgttgcggaccacctcagtataaattgctacagagatggtacttgtcttgcccccatagagcatgacgctggatgacagctcattgatacaggtaatccagctgaggatggctccggacagcacaccgggcgccatgagccttgccgttaccttgccgaaggttttcataggtgacacgcccagactgatggacgcctcctccacacttgggtccatctgctgcaggaaggcgctacccgatcgcaccgtatagggcaattttctgaccacaaaggcgataatgatgatcagggccgtacctgtaagaaccaccggtggcttattaaacgcaacgattaagctgatacccagaacagctcccggaataacaaaggggaacataataattaaatccatcagctgcccggccacgcccttctggcggaccacaatataggaaatcagcatacccagcgctataatgaacacaatggcaaccgtggaaaatacaaatgtattcctgatgttggtccacagacggttgaatatggtgatatagctgcccaggctgaatcctttctggaagcccgtgaaatcacatttgataaagctggtgataagcaccacaatctgcggcaggattcccacaaaggtgaccagcatcacagggaatgtggccaggaaacgcttgaatccgtgaagcacttcttccttggggggacgcatggctgtcatgacgtaattctttctggatacataatacttctgcaccagcagcactgtggtggagcagatcacgataataacagacaatgcgctggccagatgggcgttgccgccaatctcactcatatattcattgtataccagaaccggaagcaccatatagccttcgccgatgagcatgggggttccgaaatcagccaggctggtcatgaataccataatggctcctgctgcaatggatggaagcaccacgggcagggtaatggtccacagcctgcgcagcttattgcttcccagattctccgcagcctcctccaggctggaatcaatgcttcccatggcccctgacgtgtacaggtacacataggggaagagcttaaaggtaaatacaataataatacccaatttgccgtaaatactgggcagatggataccgatattggcaaacaggctggtgataaaaccggaacgtccaaacagggtaatccagctgtaagccccgataaacggcgggctcatcaggctcatgatgataaaaatgtggataaacctttttcccaccacattatacctggacataacataggcaatgggcacacccaccactaaggttgtgagtgtggtgaccacggatacgaacaggcttcgccccagggcattgtaatagtatttttttgtaaagaaccggatatagttctccagggtaaaaccagccgcattttttgaaaaaaagcttcgtgttatcagggtacagaagggataaaacaggaaaatcagcataaatcccactaccagtaccttgacccagaaccaaaagtccagctttttgcgcgactttaccatgaaatcacctcctgggttccggcgtcgtaaacgcctaccgcgttgatatcaaagttgaccttgacccgctgtccgtccgggcgcagctcgcggacatccttggtgtactcgttaagctgtacggtctgtccgttatccagttcaatctcatattcaatgaaatcacccaggaaggtggatataacaatttttcccggcagaccttccttttcatcaaagaacagctgctccggcctggcagaaatgattccctttcccttgaaaggtgccttgagactgcatgtaatggtgcactctcccttaatatcaagaactgccgctgccggattttcgccgttcacatcacattccacgaaattggaaacccctatgaatcctgccacaaatgtattctgcggttttttgtatatattctccggggaacccacctgcatcacctcgccctctttgataaccgcgatacggtcagagatggccagtgcctcctcctggtcatgggtcacatagatggtggtaattcccaggcggcgctgcagctttttaatgactgtcctcatctgtaccctgagctttgcgtccaggttggacaggggttcatccattaacagcacacccggctctatgacaaatgcccttgcaagggccactctctgctgctgcccgccggacagctcgttgggctttctgtctttcagattcttaatctgaaccaggtcaagagcctcctccaccttgccgggaatctggtccttgggatacttttttgcctttaaaccataggccacattctctgccacagtcagatgggggaaaatggcatagttctggaacaccatgccgatatcccttttgtgggcctccaggttattgataaccttgtcgtcaaagcagatttctccgccgtccacgctgttaaaacccgctatcattctaagcagcgtggtcttgccgcatccggagggccctaacagtgtaaaaaattcgccctgttttatctccagattcactccctttaacgctgtaaaatcaccgtacctcttaacggcgtcctttatgataactccatggctcataccagtttcctccttatatgctgacgctgccttctcccggcccatcttccaatcctgattcaatcctatcctttacgtgaaagactgtcccgcccttccgggcccggacagccttttcaccgtgttgctctgattctatatctctactgcttatctataagcaatactcccacaggtttaatctaccatgatatcattgaaatgctcaatgatggcttccttctcattggctgcccagtcaaagtcataatcaaccagcggaatatcttccagtttagccatgccttcgccaacttccatgtcgcttcttacaggacggcgtccccagtttccgctctgctcggtctggcactctttggatgtaacgaaatcaataaacagcttggcgttctcctcattcgggcatcccttaaccagggccactccatccggcacagcgctggttccatccttaggatatacaaatcctaccgacgggtcatccttgtactgcacagcagccttctccagggtcagtcccacatagaactcaccgtcagccaccatcttatggcacttgcctgaagagtcaacaatctttccatccaggttgtcatataatttcttgatgaaatcccatccgtcttccttgccgccatggcccagaatcatggtacacagctgtgtataagcggaaccggatttggatggcagacagtacgcaatctttcccttccactcaggctttgtcaggtcttcccatgtctcaggaatggtcaggccgtccttctcaatcaggtccttgttatagaagataaccattggcagcgggctctcgccaatccacagtccgtccggatccttgtaagcagcgcctatgaattcgtcgttagcacatacatatggctcaaaatattccttgaaagctgccagggagtcagcgcctccgccccacagtacatctgcaatgggattggctgtctcagctgcaatacggttgcacagctcgccggtacctgccgccactacctctaccttaacattgggatacttctccataaacaggttaacacctgcattcagaggatccgcgtcatggggcgaatatacaaccacggttcccttataatcctcaggagccttctcgcctgctgcttccgcttctgcctttgtctcctctgccttagtttcctctgctttgtcctccgccttggtatctgccggtgcctctgttgctgccggagctgttgttgtgtcggccgccttcccgccgccgcatgctgccaggcttaaaaccatcattgttgccagtgaagctgttaaaaaccgtttcttcataatacacctctccttttatatcatattttcagttcacgtattcattgggagtttttacctccgatagtcatattatatgactttactgtgcgtttttccatttgttattcttacatttcttttgttattctgaactattgcatatattttatgctatttttaatatttatatatgcatattatccaaccaaacgtattttctgc

SEQ ID NO: 3386 - DNA, 419 bp, Unknown
  gut microbiota DNA sequence
cattcctgtcccttagccgtaccacctctatcctgtagacactgtccccattaatcagttcctttttctggatctttgtattggaagtacagatcacggttgtcattacaggagcactgtatatcattcctatgtatgcttcatattcccggaagcgtcttaaatcctgttccgtgatgttgtcgctctcaaactccagatgccgtattgctcccttttccatgatgaaattaaaatcctcttccagcctgcgcatctccagatgaacatgctccgtaggcgcaactgtaaggatttttccctttacgcctatatagggaagcagatcctccccgaaaaactgagctgctgttttcattaccttgtcctccaactgaccgaatccatttgtttctccctgctcacgcaggtttctttca

SEQ ID NO: 3387 - DNA, 8205 bp, Unknown
  gut microbiota DNA sequence
gtaggtctgggacatctttatatcggatatctctccggttgaagatgattccatgataaatttatcagccgctgaggaataggacaccctgacccctgcatcgctgctgttaatagcgctgattacatcactgagcgtggaatccccggtcagtccttttatggtcacgccgttaatctggaattcatacctgtttccctcaagaggtgtggcaaagttcatatcttttaaagatgtaccataatccagcttgttggaaaatccgccggaaaatcccagcttggaaatcgtatcattgttgccggctgactctatgataactcttctggatgagtccacgggttcgccagcagatttcctttcttcattcagctttacaagcttcacgacatttatgtcactgccgctatcatcttcaccaactttaaccaggtccatccccaccgatgtaccaaaattacggtataacacctggttaatattattaatcgtatcctgctccgttgctccctttgtaaacgttatggtcctgtttaccccatccagtgttagggaaaaagagtgctctcccggttccaactcggacagctttgcctcctgtccctttggctcaccggtcacgttgcctgatgattttaccgaacaagctgttgccagctgctgtatctcgcttatattcatggagctgaccgcattggatgagacagagcttatcttaatggcaccggaactgctgattccggtcattgtcttaaacaggctctggctcatgagattggtatcgcccgaaccataataagaaaaatatttatcactaaaggtattgatttttgttatcaggtccctgtaaatatcctgtttccattcaagctgctgctttaatcctgactgcttatctattttggtctgggtacccatcagaagactcttgacaatactctccgtatccatgccggaagcaagacctgatacgtaattcttattgccgttgccgctgactgtattgattgatgacattgtttgtccccctatctgcgtttatcatagagcacccctttgctcccctgtcccatctgtttcagatatccggtaaatttaccgtttacattattcttttttatcttttcctggagctgttcctgaatcactgccatctttcccggtattccgtcttccagctcccggattctggtcatgatggcaaatacctcctgcccgacccggaatactgcctgctcagcctcagtaaggccggcataatcgcactgatttttcccaatatgaaaacagcgcgcgccgtaagccgatgcttccccgatagcggcaatcctccggtccagtccgtttatcttatctataagggcctgccgtgcctgtactgcatccacgatatcgtccaccgcgtccaggtcatccgtatccagtctcagggtctcctgctcatactgtccgaacagaatggccttttccctgagcagcatcctcatctgctcaagcacttccatttttctcctccctaacttccttttcatcctcctgggcaagagctttcaggtttctggagagctggaacaccttaagcagatccaccttatccgatgcttccttgttattctccatggtaagatacagctccgtgcggcatatcttcatatcgccgggcgctgaaatgcccagacgcaccttgtcgcctttaatctcggacacaaatatctcaatatcatcgccaattttaattgattcgccttttttcctggataaaatcagcataggccgtccctctctccctggctgaatatggactgccgtatgggataatcctggtccagtattacctggacagccagattcgtcttatgattaatgatgacagggcttttcaggtttactgtggaattgcggaacgtctctccgatgaccatgagaacccagcagtccaaatcatcctcaggaaccgcctgcagcaggattaatatatcctgcatcacaactggagcataatcacgttttacttccagaggattcagcatgataaagcatatgtccttctgctcaatggattgcagccagcagattccatttcccatgttggaatcatttacaagtacaaactgcgtatattcttcaaatccgaatatgggctgtttaaatgttataatatttctttcttctatctcaaggattccaaaatcccgcgtctctatcttcaagcatatccccctatctcatccctggccctggtgtcattcataccgcctgttactgcggcccttcatttccggccggattggcgctgggcggtacgtatatgggatctcccatatattctatttctactttgggatactgttccacatttacgctgagctcgcccggcacatacctggccgccggctcctgcacctgaggatcaaacgcaagctgggcaggcgcaaagtcaatggacagatcagcgggctcccaggaaatatccggacctactgacggaataaaggcaatccccgtgaccacattggtctgggccatcatctgattctttataatgccggataccgtcaccccgtcctgaatctgcatcatctggttgcccaccctggaatactgggcagtggcatccgatgcagccttaaggcctgcgctggcagcatccttcataagccctctggcggtcttgaaccccagactgtccctggaacgggacgtatcaatatccaccttgatatgatctgatttcatgttcagcttccccggattgcggatgattcccacctcagggtccggcagcctgctctcaagcctggcgcgctgggaggtcatggacagcttaatgggggtagatgtgatttttaggacgttcatcctcagacacctcttttcaacttatttcataaagtcaaatatggacggcggtatgatgctggatcccagctgaagggtaatcatccaggctgtctcacatgatttgttgttaatagcctccgtctcaatcttaaccgactccaggtctgtctggctcttctgtaaatttataagtcctgtctccaaacggtcctctgtgcggtccagaagtttttctcttgttcctagctcagatgtggcaatggaaatattgctctgcttcttcttaagctgcgacagggtatccattgccccctccttatcgccgccccttaactgctcctccaccttgcctatgaggctgtagagattgttgggaagcccgttctcgtcctttccgtatcccagcacatccacgcctgatgtggaaatcttaattcctgtctttgccgtgttggttcccgacgcgtatgtaccgaatccgatatccagataaaccggcttattctcgtcaaaatacgtgtccggatcgttcttatcataggcatccaccggcttgccgttaaacagcagatttccgtccccatccacggtgaacggagcttcgctattggacgaaccggaaaacaggaatttgtccccatacttggcgttcatggtctgcagaatctcctccttaagaccgcccagctcctccgcaatggcatccatggaatcctggctgctggcgccgcctgccttggtggccttttcgtatactgtttcaagtatggagttcagggtaacaatgttggaatccgctgtatccagctctccccttgcgttcttcaccacgctgatatgttcctcagacctggcaatctggtccctgatggcaaaggcctttgacgctgttgccgggtcctccgatacatgattatactgacgcttggacgacagcttcaggttggaggacgccaaatcagatatattcctctggagattcctgttataggtagatgtcatcatattttccgtgattctcatatgctcctccttaacgccctactatgcccatcttgttgataatcatatccagctgctcgtccatggtggtcataagccttcccagagcctgataagccttgttgtatgtcatcatgctgattccttcttcattcagggaaacgccggacacgcccatacgctccgaatcagcgctttccgcaatagccagggaagcactcatcctggcgctgtttgtcttgattccgcttcccagtgtattggtgacgctggtaataaattcgctgaatgtacccgtgtattcccctccaaaattaaaatcctgctcaaacgccgccttcatatccagaatatcctgattgtccagctctccgtccggattctgtttgcggattatgtaggacacgtcatcggcccactggtcactgatgctgatatttcccgctgtaaccttgccgtcaacacctccctggagaagaaacttgtacttatcagggaaatcagggtcatccgcatgaattttattgttaaacacatctgccagggtctgggcaaaattgtccatcttattctggtagtaaggtattcccgcattgattgggtcagcaccagtcagcatatccgtaaatcctctgatggcccctgctcccagattggcattctggttgttgctgttccacgtcagagtaacgccgtcgctgcctatgttaagcttatcattggtgtaggaagcccccgaagcgtccaccaccactttcccattgattttaacctgaatctttccgtcctccagatccgtcacctgcacatcgccgtaccgcgacaaatcatccagtataacatttctctggtccagaaggtcattgggcccatagttgactccatcataatcgttgttgctgaatatctcatgggcaatggagctgttcagttcagacagctggtccaattttgtgttgatatcctcaacagccactgacaggtcatttttagtctgttccatcagggtttttaaattggcgtcatactcattgaggacctgggtcacacccttaaatgcgttcatgactatgttggcattggtctcctgataaggggactggctgaaatccgccagtgcctgggataaggtggtcaatgctgccttgataccggttccctctacctccggatcgctgatgattccctctatctggtccataatggctgccttctggtcgtaataccccacatcgccgtactgctgcctgaacttggcatccaggtacggattgcggatctgcgccactcccctggcatccacaccctgcccggccagggggatggaactgtagttatactggctgcttccataggtatggacactcactgtatccagacgctgcctggtatacccttttgttttggaattgcttatattattgcctacaatatcaatggccttctgattaacctgaattcctcttttggctgtctccagccccataaatgtcggtctcactttaccactctcctatgtcagcctctgtcaggcctttttctccagtttactgcccttgctgaacgcgggacgcccgtagatgccggtgggatttcccacataccgggagtcaattcccatctgttccagctccgacttggctaacgcctccgccttctggttgtaatactgtatattgccaatggctccgtccattctgcggtacaggtccataagttcctttctctgctccgggcctgcatcctcagcaatctgctttaaggtcctgccctcaatcccataggagacaaacagcttccggcgtctctgctccatgttctccagcttcttatccatggcctcctgcatcatgatggtctgctcaaccttatccagttccctggtcatcagaagtcccagcttttcaatctgcttttgttccatggcctccagtgtttctgcatattctcccaaaaaatcaatgatttcttccaatattttcccctcctacaaaccgctcataaggcgcctggcaatctgctctgccggcacctggtatgtcccctcctgcacctgctgctttatggcggcaatccggtcagccggagccccttcttccatggaccttgacagtgcggctgaaaatgaggatgcaccgctctttttcacaccctcgctgctgatacagatagcgtctccccttgccttaccggctgcctgtacgggagcggaaaggcttttttccgtatgttttgcattgcttactgccttctgataggctgcgtaatttcttgatacctttatatccatatgtccggcttcctttccttacatgctctttgtatggtggtcctgataagtggttgtgatatttctatagtacttatcgtacatggcggataaaactttatagtgtgccagggaatttttttatttttttaatatgattgcggcagttttgccgggttagacaggggtgtggacggaagggggaaggacttggacgggtccggattatccagtgaccggtcaagagacaggtggggtgacagcaggcagggtgacagatgggagaaataatttcagggttaataaaaaccgctaacaagcagaatcctgggattttgcctgttaacggccgatggtatttatttaattggcttcctataattggcaccatccaatgtgtacgatccaatccctatcagtgccagggtgcctttttcacaaccaggatagcctgcaccagagccccggttacctcggaaccattttccagctccgccttcctgcgcttttcctgttctccttccttcatcaccacataccgcggtttcagacggttcagggccagcgccgctatgtccttcttacacttatcacatttacagcagttaaaccggtccagggtggaatccagcttattaatcaccagttcctccataaggtttaccaataccatattattttcttccttaaaaggaaatgttaccgggctgcgcttaagggtctttgccatggcagcagccgaaggcgctgataaggccggcatacccatggcgccttcgcctccatttacacggtcataaagcgcggtatctgattgccctgcgcctgaatttccggtatctgcctgcgccgtctttgcatctcttttagaggcagacggcataatcttgcggtacattatttccttgtcaatctctgtcctgctcttagacatctgccttaagccccctttgaatcaattcctgtatcagcttcttataatcctgcaccgcattgcactcaggcgcatactccagcacggagcgctgaagggactgggcttcccgaagcgcaacgctgtcccggataaatgtgtccagaaccggaacatccaaatcctctgccaccatgcgcagggcgccttccacttctttgctgaaatttgtcctggggttgtgcttggtgagaaatacccccagtatctggatccggggattacagtaattcctgacacggcatatggtttcatccaactgggttatcccctgaagactgaatatatcggaaagcatgggcaccaggacgtaatcagacgcagtaaatgcgttcacggtcagcactcccagggccggcggagaatcaatgagaatatagtcataggaacttttaagtgattccagcgcctccttcaaaagaaactccctgcgtgcgccggtaaactccagctcaatgccgcttagaaggatatttgagggaatgatatccaccagggctgatttctgaaccgcatacctgggctttaactccccctttaacacatcgtatatggtggcgctctcagtgtccgcccccatggcgaagctcagattaccctgcggatccatatccaccgcaaggactttataacccttttccttcagcgctgttgacagcacataggctgacgtggttttcccaacaccgcccttctgattggacaacacaattgttaacgacatggctactcccccagggacctaatatttctctcacattatgatatattatagcaagaaatgccgaaacagacaattgtattttattgtatacccccatagcagggctcaaaaaggcgctgcttcatgactgtgctgccacagcctttttgcagcgccttttttatattatctgtttattgtttgaagatattacactgttaacctgcccgattactgtaattactgtaataactgtaatacggactgtggctgctgattcgcctgtgcaagcatggcctgtgcagactgaaccagaacgctgttcttggtgtagttcatcatttccttagccatatctacgtcgcggatacgggattctgcggaagtgatgttctcagtggtaacacccaggttatt

SEQ ID NO: 3388 - DNA, 265 bp, Unknown
  gut microbiota DNA sequence
aggtcttccagctgggcctggggaagagccaccttttcgggtgcagccccgggatctgcctgaagtcccggagcatacggcgcagctgcctggggtactgttcccccatccgcccccggtccggctccggtccggggcgcctgtccggcaggcgcgctgcctgcctcctgataaacagctgccatggggatggccatgcgccctgcctccaaatcctccatctgggcttccagatctcccaaccgctgcaggatggcatccaggt

SEQ ID NO: 3389 - DNA, 548 bp, Unknown
  gut microbiota DNA sequence
cagccattgcctgtatcagctatacgtacaatgacaggcctgtgggttccgtgtacctgtgttctcctggtttggagggaagcgctgcctccctgacatcccaggacgcctcaggagcctctgcggtttccataggccaggacggagaggcggataatcccgctccttcggatccatccggccgcccagacgcccccggcctccaggatacaccggaagcaccgtctaatgcagaaactccccacgggcagacgccggccccgaccccggccccccgccaggacatcacttcaaaggaagggaccgctgccagcatccggattccggccaacaccctggccattctgggaatcgcattttccctggctgtcatcattgctattgtggcggccgtgaagattcatgtgcgcaggaaggaagaagaagacctatacctcagacgccagcgaaggctggagcgcctggaagacatcggtttttcctcctcggattttgaaaagctggtggcccagcgccgcgtatcctcccctcctctgggagaaaaggga

SEQ ID NO: 3390 - DNA, 1875 bp, Unknown
  gut microbiota DNA sequence
cttttcctcctcggattttgaaaagctggtggcccagcgccgcgtatcctcccctcctctgggagaaaagggaaaaaaaggcaggggacggaggcgcaaaaaatcctttttccgttgaacttccccccggcatacgctataataaaaattgttaattcatctatgcagccggaatgcatccaacgccaacaggggaatatgtaatgaaatcattccatataaataaaaccgaccttaaggctgctgccataaatctggtaaggaatctgcccattaccattgaatatatggctgcagccactttagtttccaccatattttttcacttcagcaacaatgtaacaaatatatccatcatatacaccctggccatcatcatgattgcccgtgctaccagctgctacggcgccggtatcctggcttctcttttcggcgtattctgggtgaattttgcctttacatacccttacctgactttaaatttcaccatgtccggttatcccatcaccttcctgggcatggccctcatatccagcctgtccagcagcatctgcatcatgattaccaagcagaatgtccagcttcaggaaaaagaccgcatgctgctcaatgcggaaaaggaaaccatgagggccaacctgatgcgggccatgtcccacgacctgcgcactcccctgaccagcatcatcggttccagctccacctacctggctcaggaggaatatatgtctcctgaggaaaaacggaagctggtcaggaacatagaggaagatgcccagtggcttctcaatatggtggagaatctgctttcagtcaccagaatccaggacgaaaaaggcgtggcctccgtggtcaaggcagacgaatccctggaagaagtcatatccgaatccgtgcagcggttcagaaaacggtttccggatgtccaggtgcgggtcagcattcccgactccgtcatcataatacccatggatgcaaccttgatagagcaggtaatcaataaccttctggaaaacgccctgttccattccggtaccaatgggcccattgacctggtggctgcctccgaaaaaagcggactctctgtttccatcaaagattacggcaaggggattgctcccgaactgctggatacgatttttgacggcggagggacatcggaaaaccataccggtgacggacacaaaggaatgggaatcggcctgagcatctgcaaaaccataatcaatgcccacggaggcgaaatccatgccggaaatcacctgcggggcgcccagtttacatttaccttaccagattggagggaatactaaatcatgaataccaaagccaacatcatcatcattgaagacgagaagaacatctgtaacttcatagagactgtcctgtccccccagggctaccaggttacctgcgccaacaccggaacggacgggctgaagctcatcgaatcccttaagccagatgtggtacttctggacctgggactgccggacatggacggcctggaactcatacaggaggtcagatccaccagcgccctgcccatcatcgtgatttccgccaggaccctggagcgcagcaaggtggctgccctggacctgggagctgacgactacctcaccaaaccctttggcacggctgagctgctggcccgcatccgcaccgcgctgcgccacagccagagagcggccggcacccagagtcttaaatatgaagtaggcgatcttctcattgactttgaacgccggctggtaaaggtaaagggacaggatgtccatttgacccagatcgaatataagctggtttccctgctggcccagaatgccggcaaggtcatgacctatgagagtattatttccaaaatatggggtc

SEQ ID NO: 3391 - DNA, 1022 bp, Unknown
  gut microbiota DNA sequence
ggaaggaaaaaaatacttgccggtttcttggtgtgtcaaatttgcttgattgttcctctgagtttcctataaaatccttagcggattctttttgatacacgcccaggcggagaaagtaccacagaatgattattctggggtaatccacatgaaaacgccggaattcacatgcatcaccggattggtgctgcttaaggaaggagatacagagatggtgagttgttccttgttagagtatctggccttgaaggcaaaatgtgagtatatgtcagatttacgattcatgcacgtggaagaacggtggctgagggaattcatcctgcgtaacagagatgactttacacaggaagaatggaaggaggcgtgtatctatctgacaggacagaaggcatccactgaggatgaggcaatcggaacaatcctgcatcgctggacggatacgaaagaccggccaggcatgaattacaggacagatatgaattgcaggacagacaggcaggataaaatttaataggagagggccatgggagaaatagaaaaatttataatcatggaggatgatattgcccgtgacggagggcgttatccggaatatacatatacatttctgattggcctccagtcattttcagaagggattgccagagggtatgtaaaatcattccatgtggaaaaattattatacttccaggggcttgaccagatgatcttcattatggaagatataatggatgcagtgggtgcccccatgagagggagagtcccccggagtctgaccggtaaacggaataaagatgcagtaacggttccctttgtggatttgagagggaaaataaagaaggagtatggttttgagcgggaggttttaaggggatttccggtttatcccgcggcctctgtccgggttgtgggccgtcaggacgcagggatacaggggatattccgctctaaatatggggatgtgggattcaggagcggtgtggagcttatgcgtttgatgtacgagttttttgagaaaatgt

SEQ ID NO: 3392 - DNA, 29600 bp, Unknown
  gut microbiota DNA sequence
aaagcaatttcaagagctgttgccccagctctttttctattttaatcagctgccggtccaggccggacttttcataaaaccatggattctcagggctttatatactataattaataatcatcagggcaataaggccctattccaggtaatggaattaaacaggaaaacaggaaacagcgaaagaagaccaggagataccatatgccaaatataattgaaataacagattttgcggccccggagctggatatttacgcccggcttacagaggggcagcttttaaaccgtcatgaaccggacaagggcgtttttattgctgaaagccccaaggtgatagagcgcgctctggacgcgggatgcgttcccatatccatgctgatggaaaagaagcatgtggaaagccaggcacgggaaataatacagcgctgcggtgagattccagtgtatgcggcggaatttgatgtattgacacagcttaccgggtttcacctgacacggggcatgctctgtgcaatgtaccggccgcccctgcccgggcctgaggaaatctgcgaaggggcgcgccggattgctgtgctggaaaatgtcatgaatcccaccaatgtaggagctatattccgctcagcagcagccctgaatatggacggagttctgctgacatccgcctgcagcaatcctctctaccgccgcgccgtacgggtgagcatgggaaccgttttccagattccatggacctttctggacagccggctgtcctggcctcaggagggggtgggatttttgcgggagctgggatttgcgacagctgccatggcattaaacgatgactctgtcagtattgatgattccggtttgatgtcagaggaaaaactggctattatcctggggacagaaggggatgggctggcggcaggaaccattgcgggctgtgattatacggtccgcattcccatgtctcacggcgttgattcgttaaatgtcgctgcggcaagcgccgttgctttctggcagcttggacgcaggtaagagattgataagatgcggaggaggcggaaaatatggctgataatacacaggaaaaatatattcttttagcagtaaacggaacgcttatgcgcggattggaactggaggggaatttacgggaggcaggagctgaattcgggtttgaggccagaacggaggtaagttagagaggaaagagaaacggatattttgcaggaagttccgtggttcagaaggcatggcaaaaagaatgccgcaggatgtttcatatgcggcaagtgtgaatatatttgtgcctgctacaggcgaagcacaccgattcccaccagtccgggaccggtgtgtacagccagggacgcggtgatggccttttccataatcaggcgtccttccgggataccggcaatcagccggggtctcagttcatcggatgcatcctgcccctgaccgtttaacagggcggtcaggcaggggcggccgcctgcaaaggacctggcttctgtcagcagccgggatagtccctgcctggctccgcgtatcttggcggcagtatagtatactccgtcctcattgcaggagataatgggttttatgtttagaatgctgcctaccacggaggtgaccagaccaattcggcctccctttcgcaggtaggtcagtgtatccatataatagaaaaccttggaatcccccacctttttgggaagcatttctttcagctcgtcaaaacttctgccttcttccagctgcatcgctgcccatacggccagtataccggctccaaaggaaatactcctggtgtccagcacaaaggaagtcagctccttttcatcccccagaatgcttcccaccgtattatatgtaccgcttaatccactggaaatacagaatgccagcacatgggtatagccctcagcctttatttcttcagccatatctttcacatcctggggactgggggttgaagtggcgggaatttctcccggaaaacgctgataaatggtctcaggcagaatatccaccccgtcaacataatctcgttccggataaatgatatgaaggtgcattaccttcatgtgaaatctctggattaactcatgggatacatcgcagccagaatcaattaaaatcgctgttttcatacaacacctccatatgtagtattcgatactatatataaaagtatctcataacacaatggctgtgtcaacatgaaaatgaatatatctcctgtttactaaaactgtaagcggagccgcactgtttcatggaagtccgaagcagtgtttctttaagcatgtccagcaggtccctttctgtaatctgatttccgcctgaaagaatgcagcgccgtatattagtctggatattgccatgaacggcgggaaaggatataatatcagcatgtatcagcacaagaggtgcaaaaacagtacaagaagggtaagagttgcgttggatgagatagcagacagcaggaaaaaattgtcagaatccatagaatatctgttgagcagaaaaagcctggatgatatcccggtaagtgaaattgtaaagatggcaggcgtatcaagaaggaccttttaccgtcatttctgtgataagtacgaactggtaaactggtattacgatgaattttacgaagagagctttggcagcattgtgttgggcgccggtctggaggaagcgctgacccagtgcctgaagatttaccggcaaaagcgcagtgtcctgaaacatgcatatgagagccgtgatatcaatggcctgaagaatcatgatatcgagattaccagaaggatttatgagacattcctaaagcaaaggggagccgacatccggtccgagattatgtggttttccattgaaatagctgtgcgcggcggaagcgacatggtgattcagtggatgcttggcaatatagatcttccggctgagaagatggcgcggctgatttgtgaaaccctgccggaagagattaaaaaatatcagatgtctcctgtcacacatgtgtaaatctgtgacttcccttttgacgcgtcccctgctatactgcacatgtaataaagaatgccatgaaggagaacagtagtacagaggcttttcttacagagagcgcccggttggtggaaggacgcaggaaagactgtatgaatacgctccggagcagcagcctgaaggttttagtagggtttgacgggaacgcccgatacagcgtgagagtgttgacagacactcgatgaggaatgttctgtgaaggacattcaagtacagaggtggtaccgcataacctgccctctgcagcaagctgctgcaggggcttatttttttgtctaaaaggaggaagacatgggaatttatgaagaattggaagcgcggggactgattgcgcaggtgacggatgaggcagagataagagagcttgtaaatgcgggaaaggctaagttctatattggctttgaccccacggcggattccctgcatgtggggcattttatggccctgtgtctgatgaaaagactgcagatggcgggaaaccgccccgtggtcctgttgggcgggggcaccggatacatcggcgatccgtcgggccgcacggacatgcgctccatgatggggccggatgtgattcgccgcaactgtgaatgcttcaagaggcagatggaacggttcattgattttgacggggagaatggagccattgttgtaaataatgcggactggctgctgaatctgaattacattgaactgctccgggacgtgggagcctgtttttccgtaaacaatatgcttcgggcggaatgctataagcagagaatggaaaaaggactatcattcctggaattcaattacatgattatgcagtcctatgatttttaccatctgtacaaggaacttggctgcaacatgcagtttggaggggacgaccagtggtctaatatgctgggaggaacggagctgattcggaggaagctgggaaaggacgcgtatgccatgaccattacccttctcatgaactcagaaggaaacaagatgggtaagactgcaagaggcgctgtatggctggatccggagaagacatctccctttgagttttatcagtactggaggaatatcgcggacgcggatgtgatgaaatgcatccgtatgctgacctttattccggtggaagagattgatgccatggacggatgggagggagcacagctaaacagggcaaaggaaatcctggcctatgacctgactgctctggtccacggggaagaagaggcacgcagggcaaaggagacctccgtttccctgtttaccggggccatggatgatgacaacatgccgtttacagaggttggagaggaaaaacttgtccagggcagcatcaatatcatggatctcctggtgctgtgcagactggcggcctcaaaaagcgaggccagaaggctgatcacacagggcggcatccaggtcagccagaaaagggtggaatccatagactttaccgtgacccggaacatgctgatggacggaatcatcattcaaaagggcaaaaaggtgtttagaaaagcagggctgaaatagtaaaatgactgccgtataagccgtcacataggtttcagatttttctccagccgttcaaccatccatgcaaagcgtctggcgcgtccgtcgtctgtcctggcatcatagtatgccctggtataggttttttggacggatggaggcattttctgaaaattagtataggccggctcatgttcttttaaaaggccggccacggtcccgatttgttctgctgtgacagcaggcggtccggaaggcttgtcccattgaccgttcttcctggcctcctgtattttctctcttccaaaatcagtcatcaggccgcgtttttccaggtcttctgccagagctttatttttttcagaccatttgctgtcctttctgcgggcagaaaaatatttgatataggattcatcgtcaatccgtttcatcactccgtcaatccatccaaagcacagtgcctcttccagggcgtcgccggccttaaacgctgtattctttgacttttcaaacttcagccatatgccgccgccggacatgcagtgatttatcagccaaatgcggaactcgtcacgtgtcttaaagtgaaggggctcgttcataatatattctccgttctgtattggggtgaattcaggtgcttaaattataacatgggtcagggaaaaagaataggacctgtgggaagatatcagagcgggcagactggaaccgaggaaaaaccgctgtaatctggtgatatatactttgtttttatggggttgtctgttataatattcaaaacgattgacggttctgagtgtgacggcagaaggagatattaatggaacgcagaaaagtgatgaccattgcggcagttttgatttcagttatggtggctgcgggggcctgcggtaagatgatgggagatgccccagtgccggcagaaaaggccggagtctcatcgggagacaggaaggcaccggcggacagtactgaaaaagctgaggcaggtacggcagatacggaaaagaatgaaaaagaaagaacaaaaaaacagagtccgacggagacacaggccgaatcagaacaggctgctctcaacgtgcaggaagtgcctgttctaaagggtgaagcagagcctgcgaagctggattcttccggtctcctggctaaggcatcgcctgaaaccagcgccatgactctgttcatatacgacggaacctctgtgcgcctttactatatgtttgacagcgaaaaggagagggagatactggatgacttaagttccgtaaaggcagagccggcggaggactggtcggccaaggatgcctccctgcctgtttacggaattgagattggccgggaggatggactgagcctgtttgcggcgtggaccaacggcaggtggattgcccaggatgggtctgtgtatcaattcgattatgattttgaagctctgaagcagaggaaggagtgggagagtgcaggagaactgccctcttttacaaactttccgtgtgcgcgggtatttacacaggaaaaagaacagtggaatacccggttcctggttccggcagctcctttaaatcctcccaggggaattaccatgacgctggattcctgggataatgatatagcggcagtgaccattaacaatgagagcggcggggaatggagctgcggtgaattttatgagctgcaggttctgattgacggcgtgtggtatgagattccggccatgccgggcaactggggatttaactgcatggggttttatataccggacggaggcaaacagagcatgatcaatcatctgacaatgtacggggaacttccgtcaggaacataccgtcttgtcatcaaggaattgtccgcagagcatgtcataccgtgattttatcaggaacacgctgcggggcctgctggctggggaagaaggcagcgttctaaaagcacgatgctggaggacgcagacaggaactcctgggtggtgagcatggatttttgctgctgcttcagttcatcgtgccggaaattccggcggtattccttgggggagcatccatactgccgcctgaagccgctgttaaaatatttggaatcagaaaaaccgcaggacatgcagatgtctaacaatgggaagtccgtcagcaataaaagctggcgggctttttcgcatcggattttggccaggtattcttgaaagggaagtcccaggtaatccttaaaaaagtgggacaggtaggtaaggctcaaatcttctttgcgggcaatgtccgacaggagaagtttttctgaataatgttcgtcgatatagtgggtgattttgcgcatacgtgaagccttgctctgggaggcgtttttttccttgtcggacagaagcctgttgggcagggtgtccagcaggccggcaaagagcagatttaaaagtcctacgcattttaattcaaatttgtcagcttttttcaggtaaaggcaggcaagctctatcatcatgtcatacagttttttgcagacatccgtcccgtccctttgaagaataagagaggtaaattccagattggcaatccgcgggtagtaagaagaaaaaaaggatgggtgtacctgtaatgaaactaagagggcaggggaatcagccttcagctcatggctttgaaatggattcacaacaaagaaatccccggtttccaggctgtgggtttcattttgggcctgaagaaagagactgccgtccagaagaaggcagagctcaaaatccttatggatatggggggtgcggtaaagcatatttacaagaaaaagcttaaagttcatctggctgtgggatatgatttcaaactcctggttcatggtatctcctccctttctgacagtatacgtctccgggggcgggcttgtaaagtaaaaagcaaatttgtcatggtttgaaccgtaaatttgtttgggatttgaggccgggaacttgatatagtataggtatgagatacagataaccgatgaatcaggagggtaaggatatgacaaaattcaagttttccgtgggaccgtggaatgtgcattcaggagcggactcctacggacccgcgaccagagatgaaattgcctttgaggagaaaatcagaacattcgctgagctggggttttccgccatccagttccacgatgacgatgcggtgcccaacatcaatgattatacggaggaagagataaaggaaaaggccagaacccttaaaaagatgctggacaaatacggactggctgctgagtttgtggctcccaggctctggatggacgggcggaccgcggacggcggatttatgagcacctcagaggaggacagggaatacgccatgtggagggcttaccgctccattgacattgcaaaggagctgggctgtaatatggtggtgctgtggctggcaagggagggcaccctctgcgcggagtccaaatcccctgtatgggccacgaagatgctgattcaggccatcaataaaatgctggaatatgattctgatatccggatttgcattgagcccaagccaaacgagcccattgacagaagcatctgcgggaccatgggccatgtgctggcagtgtcggcagccaccattgacccgggacgggtgggcggcaatctggagagcgcccatgccatcctggccggccttgaccctgcccatgaaatcgggtttgcaatggcaatgggaaaactgatgaccgtccatctcaacgaccagaacggtatcaagtatgaccaggataaagcctttggtgtggaaaacctgagggctgcctttaaccaggtaaaggtgctgaaggagaatggctacggtgaaaacggggagtatgtgggcctggatgtaaaagccatgaggaccaccagggatcaggacagctataagcatctggagaacagcctgaacatatttaaggcactggaagaaaaggcggaccggtttgactatgagttccagaaggaatgtgtgaggaacagagactttgaggggctggaaatgtatgtgatgaatctcctgatgggccttgtctgatgtgaatgtgaaggatggaaacagcggataggaaggtaaaacgggaaggccgactggaaaggccaaagggataaacccgtgaaagggggtgttgtggtggctgatgagagggcagcggaaaacaagagagcagcaaaaggcaagagggcggtggcggcaggacatatatgcattgacatcactcccctgttcccgaaagggagcacaggggaggcaggaaggatactggcgcccggacagctggtacagatggagggggtgaatatccatcccggcggggcagtggccaatacaggcctggccatgaagcacctgggagtggatgtccgtctgatgggtaagataggaaaggatgaactgggaacccttatccttaactgcctggagaaatacggggcggctgaggatatgattttgtcggaccaggaaaagacttcttattccgttgtcctggctattccgggaattgaccgtattttccttcatgatccgggcgccaatgtgaatttttcgggcagcgatctggattttgaggcgatcaaagaggcggacctgttccatttcggatatcccaccctgatgcaaaacatgtaccggaatcagggggaagagatggcccggatgttcaggcagataaaagaagggggaaccgccatatccttagacatggccgccattgacccggcctcaaaagcagccggagcggattggaaagggattttgggaaacatattgccctatgtggatttctttgtgccaagcgccgaggagctgtgcttcatgctggatggggagcgttaccgggagtggaccaaacgggcggatggaagggacgtcacagaggtgatccgggttcgggatgtaaagcctctgggtcagatggccctggacatgggggccagggttgtcctgattaaatgcggcgctttaggcatctattaccgcacggcatgcaaaaacggcatagaggacatgtgcaggcagctgaatctttccatggaagcctggaagggcaaagagggctttgagccgagctttgaaccggatacagtggtatccgccacaggcgcgggggataccagcatagccgccttcctggcctctgttctcagagaagctgatttaaaggaggcagtggagatggcagcagcagaaggggcatgctgtgtggctgcttatgacgccctcagcggattacggtccctggaggaaatgaaagagagaatcaggaagggatggagcaaacgggaatacagaccgtgacagggcggagtgtaaaaaagcagcagaaccaaccatgaaaggagaaaaaagatggcaaagagactgacatacgcaatggtaggcgggggtccggatgggtttatcggcgatgcccaccgccgggcaatcgggctggatggaacagcagccatcgcggcaggggtattttcaagaaaccgtgagaaatcattgcagatggcggaaagccttggcatttccccggaccggtgctatgaggattaccagacaatggccagggctgagggggaacgtgaggacggcattgactttgtgacagtggtcacccccaaccagtcccattatgaaatctgccgggcctttttggaggcgggaatccatgtggtatgcgataagccggtgacaacaacgtaccggcaggcaaaggagctggaagccctggcagaggataagggacttctgtttatggttacctatacctacatgggttatgtgactgcaaaatatgccagggagctggtggcctccggcgccatcggagaggtacgcacggtcatggcggaatatccccagggctggcttgcctttgaggacgatttcgggggaaaacagggagagtggcgctgcgaccccggtcagtcaggcggagtgaactgtctgggagacttaggcacccatgtggagaacgcggtggctgccatgaccgggcttaagattaagcgccttctggctaagatggatgtcattgtgcccgggcgggtactggatgacaacgacagcattctggtggaatatgacaacggcgccaccggaatatactggacgtcgcaggtggcggtgggccatgacaacagcctgagaatccgtatctacggcagtaagggcaccatccaatggttccaggaaacacctgataagattacggttattgacgcagacaataccattcgggaaatacaccgcggatacggcgccatcggggaaagggcaggtaaatacgcaaggattccggccggacatcccgaaggctggtttgaggccatgggcaatctctaccgcagctttgcacaatgcgtaagcgcaaaaaaggatggaacgtttacagcggaaatggtggattatcccacggtgagccagggcgctgaggggctggcgtttgtggaagcctgtctggaaagcaatcagaacgggaatacgtgggtggagtttaggaggaaatgattatggcaagaccggtaacgatttttacaggacagtgggctgatttgggtttggaggagatgtgcaggacagcaaaggacatgggatacgacggactggagattgcttcctggggccagattgatttgcagaaggcagcggaggatccggagtatgtaaagaacctgaagggcactctggaaaaatacggacttggatgctgggctatcggcgcccacctgccgggccagtgtgtgggcgatgtgtgggacccgcgtctggacgggttcgcgcccccagaactggcgggcaagccggaggaaatcagggcatggggcatacagcagttaaaatacgctgccatggccgcgaaggccatgggagtcaatgtggtgaccggcttcatgggttcacctatctggaagatgtggtattcattcccccagaccacagaggaaatggtagaggagggatttaaacagattaaggagctgtggacccctatcttcgatgtgtttgaccagtgcggcgtgaagtttgccctggaggtccatccgacggaaatcgcctttgactattacagcacgcagaaactgctggaagtgtttgaataccgcgagacactggggattaattttgaccccagccatctgatttggcagggaatggacccggccatgttcctctatgattttgcctccagggtatatcatgtacatatcaaggatgcggccgtgaacctgaacggaagaaatggaatcctgggctcccatatcaccttcggagatccaagacgggggtggaactttgtatcgccgggccacggggatgtggattttgataaaatcatccgggtactgaacgtgaagggctatgaagggcctctttccatagaatgggaggacagcggcatggaccgtattttcgggggtacagaggcgtgcgcgtttacgaagaagatcaatttctcaccgtcagatattgcctttgacgacgcattaaagacaaagtaagaaggacaggtaaaggacaatgctggtaaacttaaatgatgtattggttcccgccaggaaggggaagtatgcggtgggactgtttaacacggtcaacctggagctggccagaggcgtgatggaggctgccgaggaactggattcccctgttatcatcggaacagcagaggtactgctgccctatggtcccttagaggacctggcaaaccttctgattcccatggcagagagggcgtcggttccggtggtggtgcatttggatcacggcctgaaggaggagacatgcaggctggctctggaactgggattcagctccattatgtacgactgttccactatggactacggggacaatatggagcatgtaaaaaggatggcggaaacagctcattcctttggtgcttccattgaggcggagctgggccatgtaggggataatgaaggaggaagcgctgaaggaagcggccctggggctgaaccgtcgcagttttacacggatccggtccaggcgcgggacttcattgaccggaccggggcagatgctctggccattgccgtgggcacggcccatggagcctataagcttccgcctaagctggattttgaccggatttcggaaattgcagaaaccatttccacacctctggtccttcacggcggatccggtctgtctgactctgatttcaggacagcggttgaacggggaatcagcaaggtcaatatttttacagatatcaaccaggccggggccagggccgcgggcagcggatacagggaaggaataggacttacggatatgatactgcctgagatagaggcggtgaaacggtccgtgatggaaaagatgaggctgttcggctctgcggggcaggggagcggaagataataatatgaaataaagagggatgcagtaccggcttacgctggttttgcatccccttttgctatattgaggaattcctccatggcccggctgaaataccgtccgtttttccagtaaaaatacagattcctctggcagaggctgccgtccagcttatagtacaccacgccggggtggaaggggacctgtttaatcagagtatcgctgatgaaggatatgcccattccggaacaggtgatgttgtaggatgtaagctgctggtccagttcaaaccggatgtcaggggtaatgttatggccggccaggattttcaccgcccgttttctggtatcattatccggcttaagcatgatataaggctccccgctgaaccgctccaggggaacaggcgcaatgctgctgtccaggaaggaaccgtcatgaatcatttcaagaggaatctggtaccgggcggcttccctatttacgtcaagggctgccggcactgccagaagcaggtattccgttcggtagacacggctgtcaaaggcagtcttgtccaactggcagttatcaatcataaggtcgattccgccgttttgcagcagtaatttgagttccgatgtattttcttccatcaattccacctttaccatgggaaactgccgtgtaaagctgccaatcagaggaggaagcacccatgatgaaaaaagactgctgccgcccagaaccagttttcctgtttttaatccgccccagtcattcatgaagctgctgaattcatgttctacggagatgatttgttccacagagctgatataccgtttgccgaactcagtgagggtcaggggctttgtacttctgtcaaaaataggatagcctatgtgttcctcaactctttttacggtggcgcttaaggagggctgtgatatgaacagcttcctggctgctttggaaaagcttttttcctgatagaccgtgtagatgtattccattccctgaaacataacattcccctttattttccaaaaagtatactttcaaagttataatcaatatagaaccatatgtattggattatattataccccagccttataataacatcaacttgatattatatcattcgtatatgggaggtttcgttaaaatggacggaagaaaagattacagggtggaaatggattcagtgggcgcaaaggatgtgccggaaaatgtatactatggggttcaatccatgcgcgcggcagagaatttccagattactggtctgaatatgcacccggaaatcatcaacagtcttgcatacataaaaaaggcggcggcaatcaccaactgcgaaatcggactgctggaaaaaaagacggcggaggcaattatacaggcatgcgacgagattctggaaggcaggttccatgaggactttattgttgaccccattcagggcggggctggcacatccctgaacatgaatgccaacgaggtgattgccaaccgcgccatcgagattctgggcggccagaagggtgattactttatagtcagccccaacgaccatgtgaactgcggacagtccaccaatgatgtgattcccacggccggcaagatgacttccctgcggctgttaaaaaacctgaaatcagagcttatgcgccttcacagggagtttagccataaggcggaggaatttgaccatgtgatcaagatggggcgcacccagatgcaggacgctgtgcccatccgtctggggcaggaattcaaggcgtactcggtagctgtcatgcgggatatccgccgtatggacaaggccatggaggagatgtgcaccttaaatatgggcggcactgccattgggacaggaatcaatgcggatgaagcctatctgagaagaatcgttcccaatcttgcggaagtgtccaacatggagtttgtgcaggcctttgacctgattgacgccacccagaatctggatccctttgtggctgtatcgggcgcaatcaaggcctgtgcggtgacgctgtccaagattgccaacgacctcagactgatgtcctcaggaccaaaagcaggctttaatgaaatcaatcttccggtcaggcagaacggatcttccattatgccgggcaaggtcaatcccgtcataccggaggtggtaaaccaggttgcctttaacatcattggaaatgacctgaccatcaccatggcggcggaagccggacagctggagctgaacgcctttgagcccattattttctactgtatgttccagtccatcgacactctggcctatgcggtcaggacatttgtggacaactgcgtatccggcatcacggccaatgaggagagatgccgctccctggtggaaaacagcattggagtcattacggccctttctccccatgtgggatatgagaaggcggcggatatttccaagaaggcccttcagaccggtacgtctgtgagaagcataattctccaggagggactgctggatgaggaggagctggaccatatcctggatccggtgcggatgactgagcccgggatatcggggaaagagctgctgatgaagaataatatagatgaaaaatagtacggaacaaaatgacgcggggaggcacgggatatggattatgcagaggcggctttaaaaatgcaccgggaaaatcacggcaaactggagatggcaagcaagattcctttaaccacaagggatgagctgagcacagcatatacaccgggggtggctgccccctgtctgaaaattaaggaggacaagagcgaggcatacacctatacggcaaaaggcaacctggtggccgtggtgacggacggaaccgctgtgctgggactgggagatatcggcccggaggccgccatgccggtcatggagggaaaagccgtcctctttaaaaaattcggcggcgtggacgcggtccccatctgtctggataccagggacacagaggaaataatcgagactgtaaagcggatcgcccccacattcggaggcatcaatctggaggatataagcgcgccccgctgttttgaaattgagcagcggctggagcgtgagctggatattcctgttttccatgatgatcagcacggcaccgccattgtggccacggccgccctgatcaatgccctcaagctgacaggaaagcagatggatgggattaaggtcattgtaaacgggccgggaagcgccggcacggctatcactgagatgctgcttggtgcaggggtgaaggacctgattgtctgcgatgagcacggggcactgtgtcccggccgcgaaaagatggatggacataaagaaaagctttccctgatgaccaacgtaaggaaggaaaaggggcggcttgaggatgtcattgccggcgcggatgtttttatcggtgtctcggcagcaggcgtggtatcaaaggatatggtaagaaccatgaaaaaagatgccatagtgtttgccatggcaaatccagtgcctgaaattatgtatgaggaagcaaaggaagccggagcccgcgtcatggctaccgggaggagcgactgccccaaccagattaacaatgtgcttgtatttccaggattattccgcggagccctggactgccgggccagggacatcacctgcggcatgaagctggcggcagcttacgggattgcgggcctggtcagcggtgaagaactgggggaggagtatatcattccttctgcttttgatgaacgtgtggctaaggcagtggctgaggcggtgaaaagggcagcggttaagagggatgcggcgaagagggatgcggcgaagtgggatgcggtgaagcctgcggcagtgaaggcggccggggaggtaaagcagggccgggaatagaacatactaaaaaggggcggatattttccgtccctttttctgccattttttatgggtagaatttcttatgggtagagattcatctttgcaaaacctgtcagacactacagaatacggtcgaattcacttgttgagtaagctttcccctcatccttaagttttctggcgttctgcatggcgcggaagcggactctgtttatgggatagaaacaaacaaccagcgcgcacagaagcatcaggcatccggggatgatggaagccatattggtgacagcggctttggcgctgtccggctgtatggtgagcgacgcgtcgtagccgcccaggtccagaaggattcccactgcctggagcgcggttgccttgcccagcttgatgaaaaatgagaagtaggaaatcatgaccccggtgagcatctcccctgtcttaaactcataaacctcacatacgtcgtagagcaggttatagctgagcaccaggaagcctataatggcaaagtgcgccatacagaactggataacctggtccgtgatgctgtggaagcccacaaatttgaatatcaccagggcaaagcccgcaatggccatgaaggtgataaagacccattttttatcaaacacaacagccagctttccgatgagcacggacaggataacgcccacaatggtgcctgccagatacacaacagccgtatctgcctcagttgcgcccaccaccacgatggtattgtaaataacactggcattgcaggtgttgaatgcaaaatagaagaggaaggaggccacaatcaccaaaatgtaaggcttatacgtcagcaccttgcccagactcttgaaaatgggctcatccttgctctggggcggatatttgatttcccatcccctggtggcgcgccatgtgataaagatggcagtacctgctatggcgcccagtgtgagggctgcaaacgtccaggcacgttcctcgctgattccctggcccttaaacaggctcaccagtatcatgggcagggcgttggcaaagaacaggccgcaggtgccgaatacctggcgtatggaggaagcgcgggtcttttcatcgttgttggtggtcagctcagaacccagtgacaggtagggaatattgaacagggtgtaagcggtccagtaaaacacagacacaacaacgaaatatagaaactttaagttagctgaaaagttcacttttgtgaacatcatggtagtcagcaggatcaggggcacggtggatatcagcaggaacggacgtctgcgcccggcttccagtgtgcaccggtctgacatggttcctatgatgggatcgctgatggcatcccacataactcccagaaagacaatggtaccggccagggcaggccgcacgcctgcgatatttgtcagaaagaagatgaaaaatgctcctacaaactcagtgatgactgtgtcgcctaagttggcaataccaaaacccagttttaccggcatgggcaatagtcggtcatagttatctttgtgctccattcttgtttcctcctcttatttgcttttacctgctactggccgagaatatccttgctgattgtgccggcttccatgcgtttgcgaagctgcctgtatgtaactgctattttatcaaaatccatgacttcatccaacagggtgttatgaatgggagcgttgtggggagcgctccttattgtctccggctcctcatagcattccctggatatctctttgaggatggccgcgaattcatccaaatcatccttggaaaatgactccgtaggctccagcgtaaatggctcaggcacaatccacggatggtgggactgccagtaatgctgcatgccgaaatccaccagacgcttggtcacatccacggttccaaagccggtgtcctcttttaagggctgccagctgtaacggcattgttcaatccggcgtttcccctcggcatagaatatcttaacgcctttaatctgtcccacctttttcatcatatactgattgttgagaacagcgcacacagcggcttcccgcaggccgtcggctcctaactggcggatccacatgtaaacacggaggattacgttggcatttcccatgaacatgcggacctttccaatgctttcagggcaattgcagtccatataatactgtttgccgtcgtattccacccggggtacgggcagaaatgcctttaacggttccctgacacagagagcaccaacgccgggtcccatgccgccgtgaggggaggagaaggttttgtgcagattgtagtggattaaatcagctccgatttcctttgcacgggtaatggtcatgatgccgtttacattggcctggtcatagtagcagagggcgcctgcttcgtgggcagcatccacgatttccttaatctggggattgaagatgcctgtatcctcgggattggtgataaagatggcggcagtgcgctctgacaaggcgctccggaaggcttccagggagggcatgcctgtctccgggtcgctcatcagggtgatcaccttgtatcctgcggtggcaggggcgcctgcgtcacaggggtgagagaatatggtggtgatgatttcatccttctgggtattgccctttgcctcatgataagcacgaatcacgctggctccggcaaagcaggcagcggcgcctccgcccatgtggcagcaggcagcgtccataccggaaatttcacaaatcatttcttctgtttttttgtatatttccaggatgccctggatggtggatgcatcctgcagcgggtgtacgtcgatgatgttgggatgggtattggcaatatgctcctgcaccttggggctgtatttgatggtacaggtgccttcgcccagatcaggagtaatgtcgttgcccagaatttcctgggtcagacgcagatagtggcggttgaccctggcctggtgtacctcaggcaggaacgggggtgtctttcttctcatgcagggaggaatgtcgtcggcgccgtcgcccacttcttctgttatctgtggacttggctttgttacattgacacctctctgtccgggaacggacaaatcaaaaatcagctcttcgtcccattttgcttcatggaacctgcgtaaatgtttgctgtaatctcgtttcatattctaatgtcctcccttaatttaatatagcctgcaacgcaccagccagctggtctatggattctttgtctgcagtctcggtcacacagtacagagcgctctgaccaagttctggataatcccgggacaggtccacgccgccaaaaatctggcgggagagcagcagctgattgatttcctccactgttttgccggttttatcgaaattcaccacaaattccttgaagaacacagatggaaaccggagtgatacgccgggaatcccagccagttttttggctgcgtattttgcgttggtcataatggtatggccgatttcctccatgcctttcgggcccatgagggacaggtaaacagccacgggcgcggtccacagattgttctgggttccggtaaattcttttccgttttccctcatggcatagtgggtgcgctcgatgagcacaaccgaatagccctgttccccgggtaccgtggtctccaccattccgtccaccagctccttgaattccgtgatatagcgcatatcgtcatggctggcaataaaacctgcctggccgccgccaaagttcagatgaaggcccagtccgtgaaggtcgcccacacagatggtagcgccgtagttggcaggagcctccagcacgcccagggaaatggggtccgtatacacgatgaattcggctcccgcagcctttgccagcttcccgatttcctcaccctgggtctcgatgatgcccagaaaggttggattttcaatgtagacagctgccgtatcctggtccagcctggatttaaggtcttccaggtccagcattccggtatcgctgcggcaggctaccagttcaatcttaatttcctggtccgcatctatcattttcaggtaattgcgcaccagagccaggttctgacggttcatggtatggggaaggaggaccttgttccttccggtgatacggcaggccatgcgaaggcctgtggctgatgcctgaccgccgcagtggcatgggacggtcaggaaggacatgtctaacagctctgccatcaggctctggtattcaaagaatatctggtattttccatggtcggcccatgtctcggctccgtaagtggtcagaagctctcccctggatgcaatttcatcgcagacagccggcacatagtgctgggcgcagccggctcccatgaagttggagaattcattgcagtttttgttttttgacaggattcgttcgatatggcgtttgattccctgttcatccggaatggcctccggcagatttaaagcaccctggtagcggatggcctccggtatttcttcgtagagctccattacatcactgattcccacctcagccatcatctcagcctgtacatccggcgcggagttagggatgtaggggtatactgtttttttgctgtccatttcttacctcctgatttttgattttatttgtggatttaataaattacgtttgccatgattacgtccttgtacccggtggtgaccgggatataaccggtgagcatgcggtttacctcctcatcgcccgtgtcaatcagaagagggtttccgcccagagaaaagattttgtccctggaggcaatgaccatgatgtttttcgtccccaccctgcgtatgacttcggcggagatctgctggtttcccctgccgaaaatatatccctgtcctccaatcacagtgactatgattttggccctgggatacttcttaagcgctgccaggatatcctgctccgtgcagtctgagcctatgacctggccctggaaaaggagatccacccctaacagggtgttgggcttacccatatagttcatcagccgggccgtggtggatccggttcccacaatgtagagatattccggctcctgttctatgagccggctgacgtacatgcacatggactggatggacgcgtcctctgagcagcccctgccgctttttaaattctggacaaatttcttttcattggggaccttcaggtatccgtacagcctggcgtcgcagatgccctggcggaacagattttcgtcaatatccatgacttctgcttccctgtattccatgaccctgccctctgcataccggaccatcagttcgccggctgccctgggggttcgggcatagactgcggaatgtatcttacatcccgccgggatgcccaggaccggaatagaggttcccactgcatccaggatgttgcgcgcggttccgtcgccgccggcaaacagaatcaggtccactccttcattgcagagcattccggcagcgtccatggtgtctttgggggtagtgttccgggaagagggggagcactggctccaggctttggtcccctcagctaagcggtagtttaacccggcctgtttgcagatgtcctcacccatattgcctgggcaggtatggatttccagctgttgttccattggctttaaaagcttcatggtgcccagagcctttgcgcctgcttcaggaacagcgccaagctccagggcttttttcagggtctgtgttccgtccgaaccctttaatcctacttttcctccgataccagccacaggatttacgataaatcctatttttttcatattatttatgtacttaatccgctgctgatgatttaagtaatctcctttctttatggattaataatctgataatatgtttaaaaattaactaatgtcattataaggtatgctctataagggattgtcaagaaatattttgaaataaaaccgaattgaaaaagaaaaaccttcctcttagggggaaggttgcagaaaaacaaagcgctatgaattttggcagatgaccatgtgaatttttgtgacaaactcatctgcgtttttaatcagattgggtccgatgaaatagctttcaaaagactggcctgtcaatatgattccgtttttctttgcataggccagagtccggtggtaggcctccatgatttccttatagctgccaaggtgtatggtggtgagacacggatattccggcatgaccttgatttggctgtctctgatctgggtttctttaataggataaaaaatctgaaagtgggtgggaatatcaaaaaactggtggctgaaatggtcataaaagaatgcggtcagtttaccggcaatctccaggtggcgcgtgtccatataattttccagctctatttcatactccagaaagaggttgctgacataggcgctgctgtaatgattggaaaaggcaatgagtccgggagaatagatttcacgtttcacctgtccggcagtggaggacagattatcataaaactggtctgacaggcggtcgcggaaatcgctgaggcgcagtatgcttttgcgcaggcgcgtaagctccctggagcagtcctcaatcttgcggttgagcaatttgaccttatcctgtctctggttcttttgcaggtaatcccggatttcatttaatttcaagcctgcattctttaatttttttgtggtgataatatcctgaatctggtcttttgtataataacggtaattattgttctcatcaatatcaggtatgataagctgaatttcatcgtaataccgaagtgtttttgtgctcacattgctcagtctggcagcttcccccacggaatacttatccttgatttcagacacgaccccttcccccgtttcataagatgttacccacgatgttccaaaataagtatagtccattgaaaggggtttgtaaatatttacacagcaagtacacaaaaaggaaaagcccttggaaagagtaacacattgtccacctgtcccatacaatataccataatcatatttattagaggaggttttgatatgtgttgtaatagatgctgctgtaggtgttgtagatgttgtaattgtggcaataattgcggtaataactgcggtggtaactgcggtaatggctgcggtggcaactgcagatgctgccggtgctgcagatgctgcaggtgctggggctccaaccagaatgactgggataataactggtggccggtatgggacccgtgtgcaggcgagaggcgccaggcttaccgcgcaggttttaacgaaggatacagagtgggatttgaagacggaaggcggaattggcgtcctatcaaccgataaaacaggagggcgggtaccggcagtggccggacccgccttttgcgttggaattttgtgttgaaaatttccccggagggcgaaggcggcggtcttgccgcattgccaggaccggtttgaagggagatgaagagcttgttttgtaatccttcccgtggtagaatcaaaagaagcctgcacagtctgtctgtgcggggcaaggaggcaatttacatatgatggatgacaagaccattttattcgaaaagacaccagttccaaaggccgtgatgcagctggcagtacccactatcctgagctcgctggtcatggtgatttacaacctggcggatacatactttgtggggatgatgaacaaccctgtgcagaatgccgcggtgacgctggcggcgcctgtactcctggccttcaatgcggtcaacaacctgtttggcgtgggaagctccagcatgatgagccgggcattggggcgccgggattatgagtcggtccggcgcagcagcgcgttcgggttttactgtgccctgtttttcggccttcttttttcagttctgtgcacggttggcctgaatcctctgctgattcttctgggggcggatgccaacacaatggatgcaacggccggatatctgaaatggactgtgctctttggggctgctccggctatcctgaatgtggtaatggcatacatggtccgagctgaaggttcatcccttcatgccagcatcggaaccatgagcggctgtctgttgaatatcattttggatcctatctttattctgccgtgggggtttgatatgggagcggcgggagccggccttgccacgtttctttccaactgcgttgcctgtgtctatttttttgtgctgctccgggtcagaaggaaaacaacctttgtctgtatcaatccagagaagttttcgcttcagaagtacattgtgctgggagtgtgcgccgtgggcataccggcggcaatccagaatcttctgaatgtgacaggtatgaccatactgaacaattttacatcctcctacggcgcccaggcagtggctgccatgggcattacccagaaaatcaacatggttcccctgcaggtagccatgggcttttcccagggaatcatgccccttatcagctacaactatgccagcggcaaccacaggagaatgaaggaaaccatattctttaccatcaagaccctgctgccgtttctggtggtggtatccctggggtattttgccggggcgggcttgcttacaagggcgtttatggacaatgaagcgattgtggcttacggcacaaggttcctccgggggttctgcctgggacttccgttcctgtgcatggattttctggcagtaggggtatttcaggcagtgggcatgggaaaggcagcactgagctttgccatactgcgtaaaatcgtgctggagattccggccctgtacctgttaaacctcctgttcccgctgtacggtctttcctatgcccagctggtggcggagctggtgctttccattgcatctgttattatgctggcccgtatttttagaaggatgcagagggaggacggagcatcttcctgatatgctgaaattatatgtgttaataaaatcctctggtttggagtacgggccaggggatttttgcggtacgggaaaggacggttttttatgttattataaaatccgtttatattgggaagtaatagaatatagcggaacagcaatcatgaagtttgatatagaaaaaaactatacataacattcaatacatatatttcaccgattggacaaaacaagcaggtgtttttataattatcaaggtaatatagaatgtgcagcataacagatacatcaatataaatttgggagtggagaaggattatgaaaaaaagatggttaggcattgcgatttgcgccgccgcattattggcagcaggatgttcctcaggtacggatgtgtcaagggccgcggatgagtctgataccggcacggctgccggcaaggcttctgagacaactgctgagacggccgcggcaaagtcggaagcaggcgggacggccgcagaagcatctgcggtaaaggcagatccggttgaaaagaagaaggtctatgtgtcgccggactgggttcagagcgttctggacggcaatcaggaggaatcagaggattatatggttctggaatgtgcctggggtacagtccaggatgcggcggcttataaggaaggccacattaaaggcgcctaccatatgaatacggatgatattgaatcggaggagtactggaatatccggactccggaagagataaaggatctgatggctgaatacggaatcacaaaagatacaacggttatctgctatagtgataagggcacgaattcagcggacgaccgcgtggcatttacacttttatgggcaggggtggagaatgtaaaatgcctggacggcggttatgaagcctggcttaagagcggatacgggacagagaaaaccgttaataccccgcagccctctgacagggagtttggcgcggatatcccggttcatcctgaatacatcctgtccattgacgaggttaaggacaagctggcaggagacgataactttaagctggtcagcatccgcagcagggacgagttcctgggcggaacaagcggatacggatatattgacagggcaggcgaaccggaaggtgctgtatggggacatgatacggatgacggttcctatcataatgaggacggaaccacagcaggcctggatgtattgaagggctatctggaggaatctggcgcttcccttgacaatgagctgtccttttattgcggcacaggatggagggctactattccgtttctgatttgctatgaaaacggaatgaccaatatgaccgtatatgacggagggtggtaccaatggcagatggatgattctcttccggtacaggtgggggatcccgcggaaagcagctgccagtttaccacggtgggtgagctgtccacagacaaagcaaaaaaataaagactgataaaaataagcgttgcgtcttgattgagccaacgcttattaaatgtaaaagggaaaatgataatgaagaaagtggcatatatatctgcgacaattctggaaatcctgtgcctggcaggggcctgggccgtacagttctttacccgcacaaaaatgggaatggcccggtatgttgtatataaaaacaggggatgggagtccagatatcccatggaactgctggcaaaaggggccgcgcttgtgatggtcctcctgaccgccatgcttcttctctgtttcctgcgccggagaaggaacctgacaaaagcgctgtgggttatgagcgccggtatggtgcttctgacatctggatatgcggtatttacatggatgaattcaacaaatgaatttcgggcatattatttcatcagcgcaatattgggggctgtgtctctgatacagtgtatcaaaacatggattggaatgctggggtgccggcaggaaggcagcggggcgctgttccttccatgacctgacagggagagaaaacagcgggtgcagcggctgtgcctgtttctggggaatatgcctgggattccggaatgtgatgagaagccggatatggggaaatcaatggtcaacaggatgcttacaaagttttggtgaaggtttgacaagacagaaaatggagagaatcgtatagatgaaacgcgcgattattatttttacaagggtccctgaacccggacagacaaagaccaggatgatgcctgcgctcagcgccaagggctgcgcccgcctccacacctgtttcctggaagatataaaaagggaatgtgggaaggtggagggacagctttttgtatgctttacaccggatgagggcagagaacgtttatatccggtttttggcagaggggagcattacatttcccagagaggcagcggcctgggagaacggatgtatcaggccatccgggaggtgctgggccggggttatgaggcatgcatcctcatgggaaccgatgtacctgaagtgagatcggagtatctggaacgggcgtttggcctgcttgagcaaaacgatgtggtattggggcctaccagggatggggggtattatctggtgggtatgaagaaaccgcagcgggacgtgtttgatgtggaagggtatggacagggctccgtgcttcgggataccatgtaccggcttaagacggctggctgcagggtgggattaaccgaaaccctgtgggatatggacgtttaccaggatcttcagggataccggcagagaatgcgggaggataagaggctgcaggagacgtccacgggacggtatctggccaaaaccagccgtatttccatcatcgtacctgtttacaatgaggagaagaccattgtacagatgcaggaccagctggagccgctgaggggaaaatgtgaaatactgtttgtagacggcggcagcacggacagaaccatggaacggattcgcccctgggttaaagtcatacattcggaaaagggacgggccaggcagatgaatacgggagccatggaaagtcatggggacatcctgtttttcctccactgcgacagtgaactgcctccccgcccgctggccgagatacgcagggtgatgaaggaccacagcgcgggatgctttggaattgcctttcattcgtccaatttcttcatgtttacctgccgtgtaatatcaaaccaccggattaaggaccgcaggatcatgtttggggaccagggcatctttgtggaccgcagcctgttttttgatgcaggcatgttcccggagattcctgtgatggaggattaccagttttccctgacgcttaaagagaggggagtaaagctgggcatgacagggcggcgcatctacacatcggacagacgttttccaaaaggaaccctgcccaagcttaagctgatgtggaaaatgaaccggctgcgtaagatgtaccgggatcgggtgcccattgaacagattgaccggatgtaccgggatgtgaggtgagatgaaatggaacggatagccgggttaaaggaatatgtggcctggaagcagtaccgcagcgcgctgggactgccggaccaggtgacggaggaataccgtatgctggcccagggggagtacaacaggaattatctgtttacccaccctgttaccggaagaaagctggtgctccgggtaaactgcggcagccagatgcatttggaacatcagatacagtacgaatatgaaacattaaagctgctccggcagtcgggcaggacaccgcggcctttttatgcggacgggagtctggagaaaattcctcatggcatcatggtaatggaattcctgccgggtcacgccatggattacaggacagagctgtcctttggggcggagtgtctggcggatatccacagtgtcagggtgggaagcggcagccatctggtcaggccagaggatcccttggaggcaatcctgacagaatgcgaggccatggtcagga

SEQ ID NO: 3393 - DNA, 13467 bp, Unknown
  gut microbiota DNA sequence
tatgaatgctgcatcaacacggagcttaattccaccaattttctcatcaacggagagggaaagggaaactacctggtggactgggagaagcctgtctatggagagcctgcccaggatctgggccattttcttgcgccaaccaccaccttctggaaaacagatgtgattctgaccccggaggagatggaggacttcatacatctgtatatccagaaggtggacggcagatttgacacaaaggggctgatggagcgtacccttgcctatattcccatcacctgcctgcgcggcattacctggtgcgccatggcctgggtgcagtatcagcagccggataagctgctgtttaaccagtccacgttccaaaagctggggcagtatctggacatggaatttttagagaaaatggacaggctgtaggaaaggaatataaatagagaaaaaacagagtgaatggatatggaaaaccgtggtggccgcatgcatagccatgtccatactgagctatatgtgcataccatctgtaaaaaatatgatgaacaaaatcgtggtcatgtttgccgccggcttaatgatattatttgccttatctgcctttgttgtcatggtaaggaaaatatatatagaaaaacaaggaaaaacaaggaggaagaaatgaaaaagaaattcgtaacattaggaattatgatggcgctgtccatgacagtggcggccggatgcggccagaaagcaggaaatgaaacaacagcccaggaaacggctgagagtacggcggcagataccgcagccgcagacaccacagcggcggacacagcagccccagatacaacaggagcggatggggcaggaagtgagacagcggcggcagcacagtcagatggcagttatcagtatgtatccccaaaggaggctgtggcggcggcaaaagataagagtgcccatgtgctggatgtaagggaatgggataactatgtgaagggaagagtggctgattccatgtggtgccctattttcccgctggaggatgactcactggcagaggccatgggtacatatgccaaggagaacttaagcgacggacagaaaatctatatcatctgcaacagcggcaagagaggcgctgagaaggcaaccggtgttcttaaggaggccggcattgatggttccctgatttatactgtggagggcggtgccaaagccctggagtctgagaaaggcgcccttaccaccaaccgcgctgaggaggatattgactggaagacggttgcggcggcagatgccttaaaggcagtgggtggaagcgatgttcaaatcctggatgtccgagacaatgatacatatgcagaaggccatttaaagggatccctccagagctccttaaaggaaatcgaggacccggccgcacagactgccatgtacaagatggcaaaggaggagatggacccgtccaaacctgtatacctgctttgctacagcggcaacaagtgtgctaaaactggtatttccgttatgaaggatgccggattcgatgttgataatctgtttatcattgaaaatggtgcaaaggataaggatatccaggctgcatttgtgacagaataggataacccttccggtgatgtgatttctcctgtccgtactgcataagcttacggcagggggaatcatagattcatcagacagggttattatttttaaggaaaacagcggaggagaaagtatgaagaaaagaatcatggcagcggtactggctgccgcaatgacgttgtcccttggagcgtgttcgggcagcggacagacacagggcgccggaagcagtcaggctgaggataccggaagcagccaggccggggatacagacagccgccggtccggactggagaatatgacctttgaccagatgaaggaggaggcaaagggaacaacggtcaccttctacggctggggcggggatgaaaaactgaaccgttggctggacgatgaatttgcgcgggtcatgaaggaaaaatacgatatcacaatggaacgtgtccccatggatatcgaccaggttttaagccagctcaccggggagattcaggcgggagagaaggacggaagtattgatatgatttggattaacggggagaacttccagtcggcaaaggaaaacaatatgctgtacggcccctttacagacaagcttcccaattttagtgactatgtggatggggaaagcgaggacgtgaccatggactttgcttatcccatcgaagggtatgaggcgccctacggtaaggcccagctggtcatggtggcagacctggcagtgacgccggatgtgccaaagagcgccggagagctaaaggaattcgtggaaaaatatccgggcaaggtgacatatcccgcgcttcctgattttacgggcagcgcgtttgtgagaaatattatctatgaaatctgcggctacgagcagtttatggatatggcggctgataaggaaactgtccgggcggcagtggcgccggccatggagtacttaagggagctgaatccatacctttggaatcagggcgctgccttcccggattcctccactaccgcggacaacatgtttgcggacggggaactggtgatgagcatgacgtacggagcctatgacgtggctctgaacattgaggacggaaaatatacagataccacggcagccttccagtttgaaaagggaaccatcggtaataccaattttatggcaattgcggctaattccggcaataaggccggggctatggtggcaattaatgagatgatatcgccggagatccaggcagaccgctatgaaaagctgagggtcattccggttctggacaacgaaaagctgtccggtgagcagaaagcggcctttgacagggtggatctgggtaaaggtacaatcccccaggatgaacttctctctaaacgccttcccgaaatgcccgcacagctggttcccattatcgaggaaatctgggctgaggaagtagtgggtaaataacgggggagaatcggatgggtggaatcggagtggaagggaacgtaatgcaagggaacagcataagaggggacggatggagagggaacagaatgggtgggaacggagtggtgggaaagatatgagaaggaaaaaaatgagaagaaatctgattccgtacttacttctggtcccccaaatcatattaaccctgttttttatcataggattgacaactggaattacccaaagtcttggggtaattccagcttttggattgagggaaccaaccttaaaatactaccgggaagtgctggccaggccggatatgctaaagtccgtgctgtacagccttaaggtggcatttctgtctgcgggtgttgccactgcggcaggtgtgggtttaagtgctgtgtgtgtgatgcacaaaaggacaaaggggcccatgatgcgggtgatacagcttcccatcattgttccccatgtggtggtagccatttttatggtcaacatcttttctcagaatggtttgctggccagaatcggttacgcccttggagtattacaggaacagcagcagtttcctatgctcatttatgacacaaagggagtgggagtcatcctggcatatctgtggaaggagattccctttataatttattttgttattgctttgatggcaaatatcaatgagaaactgggggaggcagccataaacctgggggcgggccggtggactgctttttgtaaaatcaccctgcccctttgtaaggatgcggtaatcagcgggttcctgattatatttgtatttgccctgggcgcctatgagcttccctttctcctgggcgcaacctccccaaaggcccttccggtgctggcataccagcagtatatccatccggatttgagaaaccggccttattccatggcgttaaatggaatcattatcgttctctccgtgctcagcgcctggatgtattatttcatcatgcgtaaaaatatgaaggcactgacagagcagtagaagatggagcggatggagatgaagaagagaaaatcgtttatcacaaatatgattctggccctgctgtgtgcatccattctgattcccgcggccagtctggttgtatgggtatttacggaacggtgggcctggccagatctgtttccccaggtgctctcggaccgggcagtcatggaaattgtcagaagaaagggagaactggtctcactcatggcatccagcgtcatgatttcttctgtggtggccgtcctgtcggccgtcatcgggatactgacatccagggcccttgtcctgtaccggttcagggggaaggatttgatgtcatttcttaccgtgcttcctctcatggtacctgggactgtgtttgccatggggatacagattacgtttatccggttgggacttaacaatacagtggcgggggtcattctggcacacctgatttattccctgccctacgcggtgtgcctcattatggacggcacccgggcagtgggcattgcgctggaggagcaggcccgggtgctgggggccggttcctttcaggcatttagaaggaccacactgccaatgctggttccggtgatactgtcggcagtcagcatgtcatacattgtatccttcagccagtattttctgacactgcttcttggaggcggcagggtaaagacctttgcggttgtgatggttccctacttacagagcggcagccggaatattgcctgtatttacagcattttgttcatgggcatcacccttctggtatttgctgtttttgaacggattgcggggtattggacaggacagatagttggaggatattatgagtcttaacatagaaaatctgagggtatcccttcagaaaaagaagatactgcatggaatcgacctggaaatacaggagggagagtttgtatctctcttgggaaaatccggctgcggaaagaccacactgttaaaatgcatagcaggtcttttggagcaggagagcggggatatacggatacagggagcatctgtgatggaccagcagccaaaagagaggggaacggtaatcgtgtttcaggatttgcggctgtttccccatatgacggcggagaaaaatattgcctttcccatggaactcagaaaggtgccgaagaaagagcagaaggagcgggtggaggcactgctgcgggcggttcagcttcccggatttgagaagagaaggatgaaggagatgtcagggggccagatgcagagagtagccctggccagggctttggcagcagaacccagggtgctgcttctggacgaacccttttccggcctggacgaggggctgaggacagagatggcgcggctggtaagaaaacttcatgaggcgtggaaaatcacaactattctcgtcactcacgacaaggctgaggcccttcgcttgtccgaccgcatagcattgatggaggatgggaagattcttcagtacggaacaccggagcagatgttctgccatccgggaacaaaaaaggtggcagagtactttggaaaggtaaattatatttccgggtcagtggcaggaggctggtttgtcagccctttgtttgaaaaaagaacggatttgccggatggggtctatgatgccatgattcgtccgaactcagtgcagctgaaagaggagggcgattataccgtggaggaagttaccttcatgggggagatgacagagataagggtgagggtgcctgagaaaatggctcccggcggaagcatcctgtgccagagaatggaaggccccggccggccggcaaaattacgggcaggtatgaaggccggactggccgtggaaacggaaggggcagtgctgctcaggcatgatatggaatgagggaaatggggccggaaacggtatgtggtggcaggttatgtgttgtggcggggactgtgcccaggcggggactgtgtccaggcggggactgtaccgggaaaacatggacgggaggagatgcagatgaagaaaatcatatttgactgtgacaatacctttggagtaaaggactgcgatgtggatgacgggctggccctgatgtatttgctgggaagcagggaggcccaacttctggggattacgtccacctatggaaacagcagcctggatgtggtgcaggcagtgaatctgcggatgctggaagaattggggcgcagggatattcctgtaaaaagaggcggggagaagaggggctgttaccagagcgaggctgccgtctttctggcggaaatggcggaccgccatccgggggagctgtcgattcttgccacgggttccctgacaaacctgaaaggcgcatatgagagggacagtcatttctttgaaaaggtaaaagaaattgtcttaatgggcggaatcacaagcccccttgtatttgaaaagaaggtgatggaggaactgaatttttcctgtgacccgccggctgccaggaccgtcctcacaaagggccggaatgtttccgtgataacaggcaacagctgccttaaagttttatttacaaaacaggaatacagggaacggttatcgggaacggaaaacagggcggcagcgtatattatggaaaaaacagatgattggttcagatataatgatgagggctacggcattcacggtttctataactgggatgtgacggcagcggcttatcttatgcatccggaattgtttgcggataatgtgaaaggcctgtgtgtgtcggaccaggacctggagacaggatatctgagaatggaggaggatgagatgaacgggggatggaaagccggaatcaaagctgggatgaaagccggaatgagaggtgctatgagaggtgcaatgagagatggaacggagtcccggacagcagacgggaggtgtatatgcaatctgccgctcatcagggatggggcggtgtttaaggacaatatttatcggagttggctgagtgtgaccggaatcctggcggatgtctgaggatgccttgaacaggtatgaatcaggtctgagcaggtaagcatatgaaaaaggaccctgaaatgagatgtaggggtccttttgcggtattataatctttttgtcagtccggctgtcaggaaagcttaaggacgcaccaaaagtttggcggctgtcatgcgttccacaatctcatacatattggtgacgctgccgacctgaagcttctcgctcaatccataaaaattcaggcaggttccgcaggtgagaatctccacgccctgggattccatggattttaaatcctccaggttatcagagccttcgcaggaaagataggcgccgctgttatacagaagaatggtttccggcaggacatcctgctgtgtaagggcgtagacaaaccctttcatgagagcctttccaagttcagggtcaccgtggcccataaggttggaggacagaaccactgccatgccctttttgcggctgtcaggcaggcaggccgccggttcctcatccgaatcatccggcgctccggaagcaggggttactccctggccaactggtatttttacggaaaattcattgtcgcttattttctcggaaacagctgaaaggcctttgctggcagccatcttgctcaggttctggaccgcaatctcattgtctaccaatacctcaaccgtctcccccggattgcaggattccaacgctttcttagtgtcaatgacaggcttagggcactgttttccgcgttcatctaatttcattgttcgtatcctccttaaacatgtatctgattcttcctattcccggaagtgtgctttgaaattatcatcacatgtctctaattatagcaggtttgaaaatgtatgcaaacgcttttgcccctttgcaggcccggcatttattttttctataaggaaacagccggctattttttttatctatacggatgcggagccgttattttacaatcagatataaagctgtttatatcacgttattaacccgcttttgataatgatgtatataccaagtccaacaaagacagccggtacggcaaaatacttatacgtttgaatgattgcttttatcttgggcaaatcggttatcttttctcccaggaagcaccaaaccgccatcattaaaacaaacactatgatagttataatgacctgtattgatgaatagccagtaaacaatggaatataaacgccaatattatcagctccatttgccacgcctacgagagcaacgcttaaaatttcaggctttacgattttactggccatagatgttacattccgcaatatattctgcagcttgttggggtgggcagcttcggttttttctgtttccaacggaaattctttacgattggatttgttttgggcaggtcttttgtatgatatccattctttgacgcctaaagcaatcggtataaaaccgagcagaccgacgtatttttgcggaacaaagttgaggccgaaagcggctgacaggcttattgctgtcagtatgccaatagcaagatattgcccaatgacaacatatttctttttaaaagtttcgtcaaccctggcatagagcaccatcatgacaaaaatattatctatgttggtactgataaatgaaacaatagatgtagttactatgctgctcattgtttggaacgcctttctgcaaaatataaaagcccatgcacacattttaagtgtgtataggcttactattccagttctaaccagttatattctgattgacttttatacctgatggtatgaactgcccccgccctatacggatacattgattatagcatagcaatacgttttctttcaatgactttgttcgttggcctgcgttcaatcattttatcttcaggaacataaaaaacgccggaagaagcaggcattgccgccgaaagcttagtgactgctgcgggaaacgaatctgcatgttaattttcatccagcttgtcaagtgcctgggcaatgttgaacgcatggtctccaatgcgctcataatcggtcaggatttccgaatacaggatggaagtctccacatggcatttcccctttcgcatgcgttcaatctggttggagcggtaccgggcggtccggctgtcaatgtcttgttccagcagcagggcctgttccagaagggaggcgtgctgcggtaaggatatatgttctgccggagcgtcatgttccgtcagagagccgcgtttatctggagattcctgctctggagcaaaagtgaaatcaacgcagcaggcgctgcaaatcaggtttacggcgcgcatgcaggaggtcctcatatcggccagttcaaccgatgcctgggaagaaagctccagcctgcgctccatcatggtccatgcatagccggcaatatttgttgcatggtcgccgatgcgctccacatttccgatgatggagaacatgcggttaagcgcatttacttcagacggggaattttccactgcaaggaccctggaaatccttctggataactgggcattgtaaagatcaatctcttcctcacgtttttgaatctgctccaattcgtattcatccctgtgctcaaaagccagaaaactggtttcaacattggaggccgccagagcaagcatccggctgatgtcctcattcagctgcttccttgctatgactgatacgccaagtacatgttcggaggccagcaaatcctcaaaccagcgctcctcatccgttgttttctgcggcttatcaggcagaagcttttcggatatccgcgcaagctgtgtgccgaaaggcagcagaagcagggttgtgacaatgttaaacagtgtatgtacattggcaatctgcgccgcgggattgtccggtgtgaacgaggccatccactgtgtaaagggggacaccaggcagatcagggtaaacacagttgtgccaatgacattgaatatcaggtgaatcagggtggtccgtttcgcgtcgcggtttgccccgatagaggccaggactgccgtgatgcaggtgccgatattctggccgaacaggacaaagaccgcgctgtccagtccgattaatccgcttacagccaaagcctgaaggataccaacagatgcagaagaggactgtatgatagcagtaaaagctgctccggccagaatacccagaaagggattggaaaactttgtcatcaaattgacaaaatgctgggaatcgcgcagcggtatcattgccgcgctcatcattcccatgccgagaaagaggatacccagacctgcaataataccaccggcaaactggacctttttctgtttgacaaaaagaatcagggcaacacctgcaaatgcaatcaacggcgcgatggccccgatgtccagggctatgagctggccggtcacggtggttccgatattggcgcccatgatgatccagacagcctgtttgagcgtcatgagctgggagttgacgaagcccaccaccatgacggttgtggcggatgaggactggatgatagcagtgattccggctcccacgaacacgcctaaaaaccggttggcagtcagccgctccagaatctgcttcatgcggcttccggctgcggcttccagattggtgctcatcatctgcatgccgtacaaaaataatgccagtcctcctaatagactgaaaaacgaatgaatactcacaatgattcctcctcttttatctgtttggcagtattatttcaaaagaaaaaggcattgcccgcatccatgtgtatgaatgcgggtcatgccttttcttttaaacatatgaagcgtggtttttgggtgaaaatttggtcatcgtcgttgacggtggcgtccatatgtatgtcatttcccttctgatgttttgtatatggaaatatcctgtcctgctggaattatatgaggataaagggacaatgtcaacgggatgggaggaatattaacgatactttaatatcaggctgtatttagaatggtatgatttgcataagaaatgggacgaaaatggtaggttttatgcgggtttgcgccgtttttgtaacttccggttcctaccgctttctaccatgttattagggtttattggtcacaataaagtcacaaatcaatgattatcttttctagctcttttcgcagatcctctatgtcacggtggccgtaaaccttgttggtaatgtcggccttgaatgagtgtcccatcatccgtttacggtcgttttcttttacctcatacttttcgcacaacatagaaaatgtatgccggcagtcatgtggtgtatgtttggggtcacctggaattccaagccggtttagtagctcatccatttgttttctgaaatctttgtcgctgcacggaaggagcttcccatacttgcttatccggcgttcaaccaaagggagaataccggaatgaattggtacgatacgtcctttaccagcttccgtttttattccacccataaaatactttttctgtaaattcacttcgaggccaatgtattctgatatacgccatccggaatagcacattatgagaagcatctcagcggtttcatttgttttgttatcccacaggattttcaggtctgcatctgaaaatggcacaccatgttcatcatcgtcatcccgtttgattttgacatactggctataatccttatcacaccatccttgactgtcagcgtacttatacatttgcctgtacaggttcctgataagttccaggctggcatattttagattacacgcatccaggttatcctgcaggtcttttgcgcggagggagctaaatattttatcatagagggacgcacagtttttatatgcggccttgattgaatatttggttgcattagagtatttattgccttcggagaatttatccgtgtagaaggccttgtagacctctgagaaggtcttttcgggttcgtccggctctactcctttgacacggttgtaatcagccatgattttttctatcagggaatcaagagcaccagggttatcgggcagctccagggtggcctccatgccgggggtataggtaccggccttgtaggacgtgaggataatgaatcccttcatccagtcatccacgtagcagagggccgggggacggttcccatcaatgtccgccggcgggtggactgcgtaagggttcttccggctcttgccaaggtatcggatggagccgtagccattggggagtctgggatgtttctttcgttttggcatgatatcattccttcctgttgcgatgtcgcaactgattttgggtataaataatacgccccttgccaggacgttccaggaatgatataattcaagtgtgcttagttgattatatcttccggggtgtccggtaagagaaaatctatgtgagggcggttcctgctggtaacagggccgcttttcacatttgacaattttcgtatctggggctttttgctagaagttatttatactgcttgtttaattttagcataacatttccgttcccaatggagccatagacgaaccagtcatcttgacttttgattttgctttgaggggcaacgcctacaagcgcggtgtattgtttgtacaatcctccgtaattatccttactgcttgactcaatattagaatcttgcatttgtgcatatagattcagttgcctcaccatagtatctgcaaaatccaatgctttttcaggggcggttgaatcatcaaccacgatactgatagtcaaattattaccatccgtcttaacagaataatctgttacaaaagaatagtctggttctaaaattaggccgtcttttaaatcttttatgcattgcgccatatccacatcatagcttttctttgagtcgctgcctccacatgcaacgagggaaacaagcgcaatcatgattatcatggataaaatatttttcttcataaaccctcctactaattttgatatgtttttaattgattaaataaatggaagctcatcttcctcttctccgtcaggtatgttcataaagctgttaattctggatgaagtagaatagttccatatttttagtatatcattattgaaaaataatgaatctcctccacaaacaggacaaaaacgggcatttgttggcaggacttttccgcaattactgcaattttcattcatgcattcattaaccagataattactgcatatctgacaaaaatttccctctatctcagtttcttcattatcgcatttaggacaccgtttcagttttccgttatcataagtttccatcttaggatatatcattttgccatctccccattgcaaagtcttttttccacatattgggcaatacttcccataacgctgtataagcattgctccacaatttttacactctcttttaaaaataaaagaataaaacaaagagaataacttactatcataaaaatcattgggattgatatgttttttccatattgaatattcgtaaaaccttcttttagcggcaggg

SEQ ID NO: 3394 - DNA, 3357 bp, Unknown
  gut microbiota DNA sequence
atattttgcacatataccgtatagttctataagtatcaactttgaagcctatcaaaacagcatgtggaaccagtattagttgagcaaaataatcagcttcagcttccagttcattatattctgtgtccgttaaagaacttctaaaaattcttgttttttgattattaacgtgatgtttaagaagtatatgccctagttcatgcgctatgttccatctataacggttagaagttgtaacacttgcatctacatcattatagtaaatataatacaagtttttattagcatagaaatcggtacacgcatccttgctttctacaaaggttatcatttgattgtatgataaatgaaaacatctcatatgtttactaaagggtatcaagcgtatatttggaaagctcctggctaccgcttttatttttactggaagagaaaaagcgttactattttggagtgctagtaaaactgcgtttttaatttctatttttctatactctggaatattaatctggatcatcagcgccatcttcatcaaaatattgtccgaatgaacgagtcagcatttgcatcataaagtctttgtcttcaacaggcattttttgccgagcgcgctgtattctgcgaatatctaaatcatttgaaacgagcttctctctacctaaaagataatctacagataccccgagttcatcagccacttttgttagcttatcagtgttaggggaagaacttttccatctgctaatagtgccgttacctaatcctacctttgtctctaaatcaggaaggctcatgttacgttgatttgctagttcgcggattttatccactaatgtcatttttattctcctttcgatgatagtagaaaaaaatcatgtaaaaaccattgacaactagcgaattatcatgtaatatatgaatatacaaagaaaacacatgaaaaaaatctactaaattaaataatcgaccaaatcatttaatgtagcttatgaaaatacgctagtgtttttatactcttataatagattattttctagtgtttgtcaatagtataatgcaaaaaatcatgcaaggaggtgagttgatgctacatgatcgtatcaaacaattgtgttccagggacggaatcactattactgaactggagagaatgttgagaattggaaatggaactatccataactgggataccaaaaatccaacattgggaaaagtgataatggttgcaaaacattttggcgtgggggttgattatctcttatcagatgaagaacttccttcaaaagaaactatggaaatagcaataaaacttaataactacacggaagatcagaaaaatcttgttagatgctatatgtcattaattgaaaatggaaaggtggagtgaataatgaacgccttagtaaaattcatcggcaatgatgtttttacagacagcatggttatagcagaggggacgggtaatcaacacgagtcagtagtatccttgattaagacacaccggaagagtctagggcgttttggaaatttggaatttaccgatttcaaatcgggaaaaagaggacggccgacaaggatttttcagctcaacgaaccacaggcgacattgttagttactttcctggacaacaatgacatagtggttgagttcaaagtggaactcgtccgctagttctacgaaatgcgccgcctgcttatggaacgtcagtcacctcactgacaggcgacacgcttggagagcaagaagaaccggcgtatggaaactgacgaaatcaagatgctggtggaatatgcaaaggcccaaggaagcaaaaatgcagataagtattacataagtttttcaaagcttgctaacaaagccgtaggcatccaggcggattccagggatgcgctgacaacaagccagcttaataaccttatactgatagaacacatcattggtgaggttattaaagagagtatcagacaggaaatgtattataaagatatctataaggcatgtaaattgcagattcaacatttccagaagattgcatatttagcggcatagaggatgacaaggaagcagatgagaaggaggacgcgagatatgaatgatatttttaatgaggtttttacaggaagagacacatcaaggttgaccccgattgagattgcattgggggttgatgagaatggtatgaccacagcaaagaaactgtacgattttcttgaattggcaaaggggcagttttcaagatgggcaaagaccaatattcttgataatccatttgcagaagaaggtgttgattattgggggttcgacatcaatgtcgagggcaatgtcacgcaggattatagaatcacttctcattttgcaaagaaactttccatgaaaggaaatgggaagaaagcagaggacgccagggagtattttaccaaggtagaggatggggctaaacagatggttctccggatgcaagagatgtcaccgcagctgcaggttatgattaatatggaactggaacagaagcggcaagccaaagagcaggagcggcaggcagctgaactgaaagaggtcaaggagaaccagagaaccattgcccaggcgctgataaaaccagccgaggtagattttcgaacctgggtaaacagctgtctgtctgcaatcgcagagagcgaaggctacttatacataggaagcgtccaggaaaggcaccgtgcagtgagaacggagagttatgagcgccttaaccgcaagcgcccatgtcggttggatctgaaagtgaaaaatgccaagggtaatgcggcaatcgcaggagccaatgacagtcagttgaacgccattaataaattgacagtgattgaaaaggacaaggatttgcgacctgtatatgaagccgtaatccgggagatgctggcggcctatagagtaaacatataagtcggacaggctaatagaatggaggatttgacaaatggaaaataacaagactgttagaagagaagattatgagcatgggatgaagtatggtgaagaggtttattgtggtcaggatttaagagatttcatcggtatgaccattaaagatgttagctcgaatgacatagattcgaatgtcattatgtggcttgaggacggaaagagaagcgttggaatatattttgataatctgtgctttgatggagaaaacattaaaaccatggggtgagatggctgtgcgatgggttgggccttacgaaaggacaaatgcaaggcgagagggtgaaaattcaagaggatgtagtattaaaagaaggggaactaaatctcgtcctccccaccaaaggtgcattgaaatctgcccagattgacaatcttatcataaaaactgccct

SEQ ID NO: 3395 - DNA, 248 bp, Unknown
  gut microbiota DNA sequence
ctatgatgtacagtgaagtatccgggttcggaaccgtttgaaattccggattccgtagctgctccgttttaatacctttatcttgttgttaaatccttctgtgggaccatttgtcaacccgtatttaaaggcattcagaatttcttttcgccaggccctgtaggtcttagcacaggcctcaaattccttgatcccacagctctgtgcattcgcaatccagtcatcaaattccctctgctgctgacgat
